United States Patent Application Publication US 2018/0126003 A1 - sequence listing, part 22

SEQ ID NO: 36654 - DNA, 8100 bp, Artificial Sequence
  derived and/or modified sequence
atggatgtgaaggagcggaggccatactgttctctgacaaagagccgccgggagaaagagcgtagatacaccaacagtagtgccgataacgaggaatgccgcgtgcccactcagaaatcttattccagctctgagacccttaaggcatttgaccacgacagctcaaggctcttgtacggcaatcgtgtgaaagacctagttcatagggaggctgacgaattcacaagacagggtcagaatttcactctgcggcagctgggagtatgcgaaccggccacccggcggggtctggcgttctgcgctgaaatgggcctcccccacagaggttactctatcagtgcaggttcagatgccgatacagaaaacgaggctgttatgtctccggagcatgcaatgagactgtgggggcgtggcgttaaatccggcagatcttcctgcctctcaagcaggtcaaattcagccctgaccctcaccgacaccgagcacgagaacaaatccgattctgagaacgaacaaccggcgtctaaccagggccagtcaactctgcagccattacctccctcccacaaacagcactccgctcagcaccacccgtcgatcacgtccctgaacagaaacagcctcactaatcgtcggaaccaatcaccagctccacccgcggctctgcctgcggaacttcagacaactcctgaatccgttcagctgcaggacagttgggtgttgggctctaacgtgccccttgagtcaagacatttcctttttaaaacagggactggcacaaccccacttttctcaaccgccactcctggctacactatggcctcggggagtgtttattcccccccgacgaggcccctgccacgaaacacacttagtcggagtgcttttaaatttaaaaagagcagtaagtactgttcttggaaatgtacagccttgtgcgctgtgggtgtgtctgtactattggccattctcctgtcctactttatcgctatgcacctttttggattaaactggcagttgcagcagaccgaaaatgacacattcgagaatggcaaagtaaacagtgacacaatgcccactaacacagtctcactgccttctggtgacaacgggaagcttgggggtttcacacaagagaacaacacaatcgactctggcgagttggacatcggacggcgcgctattcaggagatcccacccggaattttctggaggtcccagctgttcatcgaccagccgcagtttctgaagtttaacatcagcttacagaaggacgcacttattggggtgtatggacggaagggactgccaccgtctcatacacagtacgactttgtagagctgctggacggatctcgcctgattgcccgggaacagcgctccctgctagagactgaaagggccggtcgacaggcaagatccgttagccttcacgaggccgggtttattcaataccttgattccggaatctggcatttagcattctacaatgatggcaaaaacgccgagcaggtatctttcaacactattgttattgagagcgtagtcgagtgcccgaggaattgtcacggaaatggggagtgtgtgtccggcacatgccattgtttccctggatttctaggacctgactgttctagagcggcttgccctgtcctgtgtagtggtaacggccaatatagcaaggggcgctgtctttgtttttctggctggaagggcactgagtgcgatgtgccaactactcagtgtatcgacccacagtgtggcggtcgcgggatatgcataatgggctcctgcgcctgcaattctggatataaaggcgagtcttgcgaagaggcagactgcatagatcccgggtgcagcaaccatggggtctgcattcatggtgaatgtcactgttcacctggctggggcggatctaattgtgaaatcctgaaaacgatgtgccccgatcagtgctcagggcatggaacttatttgcaggagagcggatcttgcacctgcgatcctaactggacaggccctgactgcagcaacgagatctgcagcgtagactgtggaagccatggggtctgcatgggcggaacatgtcgctgtgaagaaggttggaccggtcccgcttgcaaccaacgggcttgccacccgcggtgcgctgaacatggaacttgtaaggacggtaagtgtgaatgctcccaaggttggaacggcgagcactgcacaatcgaaggttgtcctggtctctgcaactctaacgggcggtgcactctggatcagaatgggtggcactgtgtctgtcaaccgggctggaggggtgccgggtgtgacgtggctatggagacactttgcacagatagcaaagacaacgaaggagacggactgatcgattgcatggatcctgactgctgtttgcagtcgtcctgccaaaaccagccatattgcagaggcctccctgacccccaggacattatatctcagtcgttgcagtcccccagtcagcaggccgcgaagtctttttacgatcgcattagcttcctcataggaagtgacagtacgcacgtaatacctggcgagagcccatttaataaaagcctggcctcagtgattagaggccaggttctgactgccgacgggaccccgcttattggggtgaacgtcagcttttttcactaccccgaatacggatatacgatcacacgccaagacggaatgttcgacctcgtggccaacggaggagcctcactgacactcgttttcgagaggagccccttcttgacgcaataccataccgtgtggataccttggaatgtattttatgttatggacacactggtaatgaagaaggaagagaacgacatcccttcatgcgatcttagtggctttgtgcgtcccaaccctattatcgtctctagtcctctctctactttcttccgctctagtcccgaagatagccccattatcccggaaacccaagttctacacgaggagacaacaatccccggcactgatctgaaactgagctacctttccagtcgtgctgcagggtacaaatccgtgcttaagatcactatgacgcagtcaataatacctttcaatcttatgaaagtccacctgatggtcgcagtggttgggagactttttcagaagtggtttcctgcctccccaaatctggcttacactttcatatgggacaagactgatgcctataaccagaaagtgtacggactttccgaagctgtcgtctcagtgggctatgaatatgaaagttgccttgacctaaccttatgggagaaaaggacagccatcttacagggatacgagcttgacgcctcaaatatgggcggctggacactggacaaacaccacgttctcgatgtccagaatggtatcctgtataagggcaatggcgagaatcagtttattagtcaacagcctccagtcgtaagttccattatggggaacggcagaaggcgatcgatttcgtgtccgtcatgcaatggccaggccgacggcaataaattgctggccccagtggcgttggcatgtggtatcgacggctccctgtatgtgggcgattttaactatgtcaggcggatcttcccaagtgggaatgtgacaagcgtcctggaactctcaagtaaccccgctcatcggtactaccttgccacggaccctgtcactggggacctgtatgtgagcgataccaacactcgcagaatctatagaccaaaatccttaacaggggctaaggacctcacaaagaacgcggaagttgtcgcgggaactggggagcaatgccttcctttcgacgaggcccgctgtggcgatggagggaaagcagtggaggctaccctgatgagcccgaaaggaatggccgtagacaagaacggactgatttatttcgtcgatggcacaatgatcagaaaagtcgaccagaacggtatcatcagcactctgcttggttcgaacgatctgacctcggctcggcccctgacatgtgacacctctatgcatatatctcaggtgcggctggagtggccgacagatctcgccatcaaccctatggacaactctatttacgtcctggacaacaacgtggttctgcaaattacagaaaatagacaagtcagaatcgccgcaggacggcccatgcactgtcaggttcctggcgtggagtacccagttggtaaacatgccgttcaaaccactctagagtcggctacggccatagccgtatcctacagcggtgttctgtatataaccgaaaccgatgagaaaaaaataaacaggattaggcaggttactactgacggagaaatttccctcgtggccgggatccctagcgagtgtgactgtaagaatgatgcaaattgcgactgttaccagagtggcgatgggtacgccaaggacgcaaagctctcagcaccctcatcattagcagcctcaccggacgggacattatatattgccgacctgggtaacatccgcattagggccgtgtccaaaaataagcccctactgaattcaatgaacttttacgaggtagcttcacctacggaccaggaactatatattttcgatatcaatggaacccaccaatacactgtgtctctagtcacaggcgattatctgtataatttttcttacagcaatgacaacgacatcacagctgtgactgacagcaacggaaacacacttagaattcgacgtgaccccaacaggatgccagtaagggtggtgtccccagataaccaggtgatctggcttaccattggcaccaacgggtgcttgaaaagtatgaccgcccagggactcgaactggtattattcacatatcatggcaatagcggattgctggcaactaagtccgacgagaccggctggacgacttttttcgactacgactccgagggtagactgaccaacgtcacttttcctaccggcgtcgttactaaccttcatggagacatggacaaggcgatcaccgtggatattgagagctcatctagggaggaggacgtgagtatcactagcaatttatcctccatagatagcttttatacgatggttcaggaccagttacgaaactcatatcaaattggctacgatggctcactgcgaattatctacgcctccggactcgacagccactaccaaacagaaccgcacgttctggccgggaccgccaacccaacagtcgctaagagaaacatgaccttgcctggggaaaacggccaaaatctagtagagtggagattcagaaaggaacaggcccaggggaaggtgaatgtcttcggaagaaagctgagagtgaatgggaggaacttgctgagcgtggactttgaccggacaacaaagacagagaagatttacgatgatcacaggaaattcttactgagaattgcttacgatacaagcggacatcctaccctgtggctgccttcgagcaagctcatggccgtcaacgtcacttattcctcaacaggccagatcgcatctattcaacggggtacgacaagcgagaaagtagactatgatggtcagggacggatagtttcaagagttttcgccgacggaaagacctggtcttacacgtatctggagaagtcaatggtactccttcttcacagccagcgacagtacatatttgaatatgacatgtgggaccgcctctccgcgataaccatgccctctgtggctcggcacactatgcagaccataaggtctattggctactatcgcaatatctataacccacctgaatccaatgccagcatcatcacggattataatgaggaaggcctgctcctccagactgccttcttgggcacaagcaggcgtgtgctattcaagtatcgcaggcagacgaggctcagcgaaatcctatacgatagcacccgagtttctttcacttatgacgaaacggcgggggtgctgaaaactgtgaatctgcagagcgacggattcatttgtaccatcaggtaccgccaaatcggccctttgatcgacaggcagatcttccgattctccgaggatggcatggttaacgccaggtttgactacagttacgacaacagtttcagggtgacaagcatgcagggcgtgattaacgagacccccctgcctatcgatctgtatcagtttgacgacatcagcggcaaagtcgagcagtttggaaaatttggcgtcatctactacgacattaatcagatcataagcacagctgtgatgacttacacaaagcactttgacgcccacgggaggattaaggaaatccagtatgagatatttcggtctctgatgtattggatcactatccagtacgataacatgggccgcgtcaccaagcgcgaaatcaagatagggccttttgccaacaccacaaaatacgcctatgagtacgatgtggatgggcaattgcaaaccgtgtatttaaacgagaagataatgtggaggtataattacgacctaaatgggaacctgcacctgttaaacccttcaaattccgcccggctcaccccacttcggtacgatctcagagatcgtatcacccgattgggcgatgtccaataccggctggatgaagatgggtttctcaggcagcgggggactgagatctttgagtattcttctaaggggctgctaacacgggtgtactccaagggttccggctggacagtgatctaccgatatgacggactgggaagacgtgtgtcatcaaagacctccctcggccagcatctccaattcttttatgctgatcttacctacccaacaagaattacccatgtgtacaaccacagctctagtgaaatcacatctctgtactatgaccttcagggtcacttgttcgctatggagatctccagtggcgatgagttctatatcgcctctgataacacaggcacgcctttggccgtctttagttctaatggactgatgctgaagcagattcagtatacggcttacggggagatctactttgactccaacatcgatttccagttagtcattggatttcacgggggactgtacgaccccctgactaaactgattcacttcggagagcgagactatgacattctggccggaaggtggaccactccagatatagaaatatggaagcgaataggcaaggaccctgcacccttcaatctgtatatgttcagaaataacaatcccgcatcgaagatccatgacgtcaaggactatatcaccgacgtaaacagctggctggtaacatttgggttccatttgcataacgccatccctggtttccccgtgcccaagttcgacctgacagaacccagttacgaattggtgaagtcccagcagtgggacgatattccccccatctttggcgtgcagcaacaagtggcccgacaggcgaaagcattcctctcattgggtaaaatggccgaggtgcaggtgtcccgcaggcgggcagggggcgctcaatcctggttgtggttcgccactgtcaagtccttaatcggcaagggtgtgatgttggctgtctcccaagggagggtgcagacgaatgtgctgaacatcgcaaacgaagactgcattaaggtggccgccgtgctgaacaatgctttttacctggaaaacttacacttcacgatagagggcaaggatacacattattttatcaaaactaccaccccagagtcggatctggggactttgcgccttacctctggccgcaaggccttggagaacggcattaacgtcacagtatcccaatctacaacagtcgtgaatggcaggacccggaggtttgcagacgttgagatgcagttcggtgccttggcactgcacgtaaggtacggaatgacgttagatgaggaaaaagccagaatcctggagcaggcgagacagcgggccctggcccgggcctgggctcgcgaacaacaacgagtgagagatggggaggaaggggcccggctatggacagaaggtgaaaagaggcagctgctctcagccggaaaggtacagggctacgacggttattatgtcctctctgttgagcagtatcctgaactggccgattctgcaaacaatatccagttccttcggcagtcagaaattggtagacgctag

SEQ ID NO: 36655 - DNA, 513 bp, Artificial Sequence
  derived and/or modified sequence
atggatgtgaaagaacggagaccatattgctccctcaccaagtccaggcgggaaaaagaacgaagatataccaattccagtgctgacaacgaggaatgtcgagtccccactcaaaaatcgtactccagcagtgaaaccttgaaagcattcgaccacgactcatccagactgctctatggtaacagagtgaaagacctggtccacagggaagcggacgagtttacacgccagggccagaattttacgctcagacaacttggggtctgcgagcccgctacccgacgtgggctggccttttgcgccgaaatgggtcttccccatcgcgggtatagtatctccgctggcagtgatgccgacacggagaatgaggccgtgatgagccccgaacatgcaatgagactgtggggccgcggtgtgaaaagcgggcggagtagttgcctctcatcccggagtaacagcgccttgacactcaccgatacagaacatgagaataagtccgactccgagaattag

SEQ ID NO: 36656 - DNA, 8100 bp, Artificial Sequence
  derived and/or modified sequence
atggatgtgaaggagcggcggccctactgcagcctgaccaagagccggcgggagaaggagcggcgctacaccaacagcagcgctgacaatgaggagtgccgggtgcccacccagaagagctacagcagcagcgagaccctgaaggcctttgaccatgacagcagccggctgctgtatggcaacagagtgaaggacctggtgcaccgggaggctgatgagttcacccggcagggccagaacttcaccctgcggcagctgggcgtgtgtgagcccgccacccggcggggcctggccttctgtgccgagatgggcctgccccaccggggctacagcatctctgctggcagtgatgctgacacagaaaatgaggccgtgatgagccctgagcacgccatgaggctgtggggccggggcgtgaagagcggccgcagcagctgcctgagcagccgcagcaacagcgccctgaccctgacagacacagaacatgagaacaagagtgacagtgaaaatgagcagcctgccagcaaccagggccagagcaccctgcagcccctgccccccagccacaagcagcacagcgcccagcaccaccccagcatcaccagcctgaacagaaacagcctgaccaacagaagaaaccagagccctgcccccccagctgccctgcctgctgagctgcagaccaccccagagagcgtgcagctgcaggacagctgggtgctgggcagcaatgtgcccctggagagccgccacttcctgttcaagacaggcaccggcaccacccccctcttcagcacagccaccccaggctacaccatggccagcggctctgtgtacagcccccccacccggcccctgcccaggaacaccctgagccgcagcgccttcaagttcaagaagagcagcaagtactgctcctggaagtgcacagccctgtgtgctgtgggcgtgtctgtgctgctggccatcctgctgagctacttcatcgccatgcacctgtttggcctgaactggcagctgcagcagacagaaaatgacacctttgaaaatggcaaggtgaacagcgacaccatgcccaccaacacagtgtccctgcccagcggggacaacgggaagctgggcggcttcacccaggagaacaacaccattgattctggagagctggacatcggccggcgggccatccaggagatccccccaggcatcttctggaggagccagctgttcatcgaccagccccagttcctgaagttcaacatcagcctgcagaaggatgccctgattggagtgtatggcaggaagggcctgccccccagccacacccagtatgactttgtggagctgctggatggcagccggctgattgcccgggagcagaggagcctgctggagacagagcgggccggccggcaggcccggtctgtgtccctgcacgaggccggcttcatccagtacctggacagcggcatctggcacctggccttctacaatgatggcaagaatgctgagcaggtgtccttcaacaccatcgtcatcgagagcgtggtggagtgccccaggaactgccacggcaatggagaatgtgtgtctggcacctgccactgcttccctggcttcctgggccctgactgcagcagagctgcctgccctgtgctgtgcagcggaaatggccagtacagcaagggccgctgcctgtgcttcagcggctggaagggcacagaatgtgatgtgcccaccacccagtgcatcgacccccagtgtggcggccggggcatctgcatcatgggcagctgtgcctgcaacagcggctacaagggggagagctgtgaggaggccgactgcattgatcctggctgcagcaaccacggcgtgtgcatccatggagagtgccactgcagccctggctggggcggcagcaactgtgagatcctgaagaccatgtgcccagaccagtgcagcggccacggcacctacctgcaggagagcggcagctgcacctgtgaccccaactggacaggccctgactgcagcaatgagatctgcagcgtggactgtggcagccacggcgtgtgcatgggcggcacctgccgctgtgaggagggctggacaggccctgcctgcaaccagagggcctgccacccccgctgtgccgagcacggcacctgcaaggatggaaaatgtgagtgcagccagggctggaatggagagcactgcaccatcgagggctgccccggcctgtgcaacagcaatggccgctgcaccctggaccagaatggctggcactgtgtgtgccagcccggctggagaggagctggctgtgatgtggccatggagaccctgtgcacagacagcaaggacaatgaaggagatggcctgattgactgcatggaccctgactgctgcctgcagagcagctgccagaaccagccctactgccggggcctgcctgacccccaggacatcatcagccagagcctgcagagccccagccagcaggccgccaagagcttctatgaccgcatctccttcctgattggaagtgacagcacccacgtgattcctggagagagccccttcaacaagagcctggccagcgtcatccggggccaggtgctgacagcagatggcacccccctcatcggcgtgaatgtgtccttcttccactacccagaatatggctacaccatcacccggcaggacggcatgtttgacctggtggccaacggcggggccagcctgaccctggtgtttgagaggagccccttcctgacccagtaccacacagtgtggatcccctggaatgtgttctacgtgatggacaccctggtgatgaagaaggaggagaatgacatccccagctgtgacctgagcggctttgtgcggcccaaccccatcatcgtgagcagccccctgagcaccttcttccgcagcagccctgaggacagccccatcatccctgagacccaggtgctgcacgaggagaccaccatccctggaacagacctgaagctgagctacctgagcagcagagctgctggctacaagtctgtgctgaagatcaccatgacccagagcatcatccccttcaacctgatgaaggtgcacctgatggtggccgtggtgggccgcctcttccagaagtggttccctgccagccccaacctggcctacaccttcatctgggacaagacagatgcctacaaccagaaggtgtatggcctgtctgaggccgtggtgtctgtgggctatgaatatgagagctgcctggacctgaccctgtgggagaagaggacagccatcctgcagggctatgagctggatgccagcaacatgggcggctggaccctggacaagcaccacgtgctggatgtgcagaatggcatcctgtacaagggaaatggagagaaccagttcatcagccagcagccccctgtggtgagcagcatcatgggaaatggaagaagaagaagcatcagctgccccagctgcaatggccaggctgatggcaacaagctgctggcccctgtggccctggcctgtggcattgatggcagcctgtatgtgggggacttcaactacgtgcggcgcatcttccccagcggaaatgtgacctctgtgctggagctgagcagcaacccagcccaccgctactacctggccacagatcctgtgactggagacctgtatgtgtctgacaccaacacccggcgcatctaccggcccaagagcctgactggagccaaggacctgaccaagaatgctgaggtggtggccggcaccggggagcagtgcctgccctttgatgaggcccgctgtggagatggcggcaaggctgtggaggccaccctgatgagccccaagggcatggctgtggacaagaatggcctcatctactttgtggatggcaccatgatcaggaaggtggaccagaatggcatcatcagcaccctgctgggcagcaatgacctgaccagcgcccggcccctgacctgtgacacctccatgcacatcagccaggtgcggctggagtggcccacagacctggccatcaaccccatggacaacagcatctacgtgctggacaacaacgtggtgctgcagatcacagagaaccggcaggtgagaattgctgctggccggcccatgcactgccaggtgcctggggtggagtaccctgtgggcaagcatgctgtgcagaccaccctggagagcgccacagccatcgctgtgtcctacagcggcgtgctgtacatcacagaaacagatgagaagaagatcaaccgcatccggcaggtgaccacagatggagagatcagcctggtggccggcatccccagtgaatgtgactgcaagaatgatgccaactgtgactgctaccagagcggagatggctacgccaaggatgccaagctgagcgcccccagcagcctggccgccagcccagatggcaccctgtacatcgctgacctgggcaacatccgcatccgggctgtgtccaagaacaagcccctgctgaacagcatgaacttctatgaggtggccagccccacagaccaggagctgtacatctttgacatcaatggcacccaccagtacacagtgtccctggtgactggagactacctgtacaacttctcctacagcaatgacaatgacatcacagctgtgacagacagcaatggaaacaccctgcgcatcagaagagaccccaacaggatgcctgtgcgggtggtgtccccagacaaccaggtgatctggctgaccatcggcaccaacggctgcctgaagtccatgacagcccagggcctggagctggtgctcttcacctaccacggcaacagcggcctgctggccaccaagagtgatgagaccggctggaccaccttctttgattatgacagcgagggccgcctgaccaacgtgaccttccccactggagtggtgaccaacctgcacggggacatggacaaggccatcaccgtggacatcgagagcagcagccgggaggaggatgtgtccatcaccagcaacctgagcagcattgacagcttctacaccatggtgcaggaccagctgagaaattcctaccagatcggctatgatggcagcctgcgcatcatctatgccagcggcctggacagccactaccagacagagccccacgtgctggccggcacagccaaccccaccgtggccaagaggaacatgaccctgcctggagaaaatggccagaacctggtggagtggaggttcaggaaggagcaggcccagggcaaggtgaatgtgtttggaaggaagctgcgggtgaatggaagaaacctgctgtctgtggactttgacaggaccaccaagacagagaagatctatgatgaccacaggaagttcctgctgagaattgcctatgacaccagcggccaccccaccctgtggctgcccagcagcaagctgatggctgtgaatgtgacctacagcagcacaggccagatcgccagcatccagaggggcaccaccagcgagaaggtggactatgatggccagggcagaattgtgtcccgggtgtttgctgatggcaagacctggagctacacctacctggagaagtccatggtgctgctgctgcacagccagaggcagtacatctttgaatatgacatgtgggaccggctgagcgccatcaccatgcccagcgtggcccggcacaccatgcagaccatccgcagcatcggctactacagaaacatctacaaccccccagagagcaatgccagcatcatcacagactacaatgaggagggcctgctgctgcagacagccttcctgggcaccagccggcgggtgctcttcaagtaccgccggcagacccggctgtctgagatcctgtatgacagcaccagggtgtccttcacctatgatgaaacagctggggtgctgaagacagtgaacctgcagagtgatggcttcatctgcaccatccgctaccggcagatcggccccctgattgaccggcagatcttccgcttctctgaagatggcatggtgaatgccaggtttgactacagctatgacaacagcttccgggtgacctccatgcagggcgtcatcaatgagacccccctgcccatcgacctgtaccagtttgatgacatcagcggcaaggtggagcagtttgggaagtttggagtcatctactatgacatcaaccagatcatcagcacagctgtgatgacctacaccaagcactttgatgcccacggccgcatcaaggagatccagtatgagatcttccgcagcctgatgtactggatcaccatccagtatgacaacatgggccgggtgaccaagcgggagatcaagattggcccctttgccaacaccaccaagtatgcctatgaatatgatgtggatggccagctgcagacagtgtacctgaatgagaagatcatgtggagatacaactatgacctgaatggaaacctgcacctgctgaaccccagcaacagcgcccggctgacccccctgcgctatgacctgcgggaccgcatcacccggctgggagatgtgcagtaccgcctggatgaagatggcttcctgcggcagaggggcacagagatctttgagtacagcagcaagggcctgctgaccagggtgtacagcaaaggaagtggctggacagtcatctaccgctatgatggcctgggccggcgggtgagcagcaagaccagcctgggccagcacctgcagttcttctatgctgacctgacctaccccacccgcatcacccacgtgtacaaccacagcagcagcgagatcaccagcctgtactatgacctgcagggccacctgtttgccatggagatcagcagtggagatgagttctacatcgccagtgacaacacaggcacccccctggccgtgttcagcagcaatggcctgatgctgaagcagatccagtacacagcctatggagagatctactttgacagcaacatcgacttccagctggtgattggcttccatggaggcctgtatgaccccctgaccaagctgatccactttggagagcgggactatgacatcctggccggccgctggaccaccccagacatcgagatctggaagagaattggcaaggaccctgcccccttcaacctgtacatgttcaggaacaacaacccagccagcaagatccatgatgtgaaggactacatcacagatgtgaacagctggctggtgaccttcggcttccacctgcacaatgccatccctggcttccctgtgcccaagtttgacctgacagagcccagctatgagctggtgaagagccagcagtgggatgacatcccccccatctttggagtgcagcagcaggtggcccggcaggccaaggccttcctgagcctgggcaagatggccgaggtgcaggtgtccagaagaagagctgggggcgcccagagctggctgtggtttgccaccgtgaagagcctcatcggcaagggcgtgatgctggccgtgtcccagggccgggtgcagaccaacgtgctgaacatcgccaatgaagactgcatcaaggtggccgctgtgctgaacaatgccttctacctggagaacctgcacttcaccatcgagggcaaggacacccactacttcatcaagaccaccaccccagagagtgacctgggcaccctgcggctgaccagcggcaggaaggccctggagaatggcatcaacgtgacagtgtcccagagcaccaccgtggtgaatggaagaacaagaagatttgctgatgtggagatgcagtttggagccctggccctgcacgtgcgctatggcatgaccctggatgaggagaaggcccgcatcctggagcaggcccggcagagggccctggcccgggcctgggcccgggagcagcagagggtgagagatggagaggagggcgcccggctgtggacagaaggagagaagaggcagctgctgtctgctgggaaggtgcagggctatgatggctactacgtgctgtctgtggagcagtacccagagctggccgacagcgccaacaacatccagttcctgcggcagagcgagatcggcagaagatag

SEQ ID NO: 36657 - DNA, 513 bp, Artificial Sequence
  derived and/or modified sequence
atggatgtgaaggagcggcggccctactgcagcctgaccaagagccggcgggagaaggagcggcgctacaccaacagcagcgctgacaatgaggagtgccgggtgcccacccagaagagctacagcagcagcgagaccctgaaggcctttgaccatgacagcagccggctgctgtatggcaacagagtgaaggacctggtgcaccgggaggctgatgagttcacccggcagggccagaacttcaccctgcggcagctgggcgtgtgtgagcccgccacccggcggggcctggccttctgtgccgagatgggcctgccccaccggggctacagcatctctgctggcagtgatgctgacacagaaaatgaggccgtgatgagccctgagcacgccatgaggctgtggggccggggcgtgaagagcggccgcagcagctgcctgagcagccgcagcaacagcgccctgaccctgacagacacagaacatgagaacaagagtgacagtgaaaattag

SEQ ID NO: 36658 - DNA, 8428 bp, Artificial Sequence
  derived and/or modified sequence
atggatgtgaaagaacgcaggccttactgctccctgaccaagagcagacgagagaaggaacggcgctacacaaattcctccgcagacaatgaggagtgccgggtacccacacagaagtcctacagttccagcgagacattgaaagcttttgatcatgattcctcgcggctgctttacggcaacagagtgaaggatttggttcacagagaagcagacgagttcactagacaaggacagaattttaccctaaggcagttaggagtttgtgaaccagcaactcgaagaggactggcattttgtgcggaaatggggctccctcacagaggttactctatcagtgcagggtcagatgctgatactgaaaatgaagcagtgatgtccccagagcatgccatgagactttggggcaggggggtcaaatcaggccgcagctcctgcctgtcaagtcggtccaactcagccctcaccctgacagatacggagcacgaaaacaagtccgacagtgagaatgagcaacctgcaagcaatcaaggccagtctaccctgcagcccttgccgccttcccataagcagcactctgcacagcatcatccatccatcacttctctcaacagaaactccctgaccaatagaaggaaccagagtccggccccgccggctgctttgcccgccgagctgcaaaccacacccgagtccgtccagctgcaggacagctgggtccttggcagtaatgtaccactggaaagcaggcatttcctattcaaaacaggaacaggtacaacgccactgttcagtactgcaaccccaggatacacaatggcatctggctctgtttattcaccacctactcggccactacctagaaacaccctatcaagaagtgcttttaaattcaagaagtcttcaaagtactgtagctggaaatgcactgcactgtgtgccgtaggggtctcggtgctcctggcaatactcctgtcttattttatagcaatgcatctctttggcctcaactggcagctacagcagactgaaaatgacacatttgagaatggaaaagtgaattctgataccatgccaacaaacactgtgtcattaccttctggagacaatggaaaattaggtggatttacgcaagaaaataacaccatagattccggagaacttgatattggccgaagagcaattcaagagattcctcccgggatcttctggagatcacagctcttcattgatcagccacagtttcttaaattcaatatctctcttcagaaggatgcattgattggagtatatggccggaaaggcttaccgccttcccatactcagtatgacttcgtggagctcctggatggcagcaggctgattgccagagagcagcggagcctgcttgagacggagagagccgggcggcaggcgagatccgtcagccttcatgaggccggctttatccagtacttggattctggaatctggcatctggctttttataatgatgggaaaaatgcagagcaggtgtcttttaataccattgttatagagtctgtggtggaatgtccccgaaattgccatggaaatggagaatgcgtttctggaacttgccattgttttccaggatttctgggtccggattgttcaagagccgcctgtccagtgttatgtagtggcaacgggcagtactccaagggccgctgcctgtgtttcagcggctggaagggcaccgagtgtgatgtgccgactacccagtgtattgacccacagtgtgggggtcgtgggatttgtatcatgggctcttgtgcttgcaactcaggatacaaaggagaaagttgtgaagaagctgactgtatagaccctgggtgttctaatcatggtgtgtgtatccacggggaatgtcactgcagtccaggatggggaggtagcaattgtgaaatactgaagaccatgtgtccagaccagtgctccggccacggaacgtatcttcaagaaagtggctcctgcacgtgtgaccctaactggactggcccagactgctcaaacgaaatatgttctgtggactgtggctcacacggcgtttgcatgggggggacgtgtcgctgtgaagaaggctggacgggcccagcctgtaatcagagagcctgccacccccgctgtgccgagcacgggacctgcaaggatggcaagtgtgaatgcagccagggctggaatggagagcactgcactatcgagggttgtcctggtctgtgcaacagcaatggaagatgtaccctggaccaaaatggctggcattgtgtgtgccagcctggatggagaggagcaggctgtgacgtagccatggagactctttgcacagatagcaaggacaatgaaggagatggactcattgactgcatggatcccgattgctgcctacagagttcctgccagaatcagccctattgtcggggactgccggatcctcaggacatcattagccaaagccttcaatcgccttctcagcaagctgccaaatccttttatgatcgaatcagtttccttataggatctgatagcacccatgttatacctggagaaagtcctttcaataagagccttgcatctgtcatcagaggccaagtactgactgctgatggaactccacttattggagtaaatgtctcgtttttccattacccagaatatggatatactattacccgccaggacggaatgtttgacttggtggcaaatggtggggcctctctaactttggtatttgaacgatccccattcctcactcagtatcatactgtgtggattccatggaatgtcttttatgtgatggataccctagtcatgaagaaagaagagaatgatattcccagctgtgatctgagtggattcgtgaggccaaatcccatcattgtgtcatcacctttatccacctttttcagatcttctcctgaagacagtcccatcattcccgaaacacaggtactccacgaggaaactacaattccaggaacagatttgaaactctcctacttgagttccagagctgcagggtataagtcagttctcaagatcaccatgacccagtctattattccatttaatttaatgaaggttcatcttatggtagctgtagtaggaagactcttccaaaagtggtttcctgcctcaccaaacttggcctatactttcatatgggataaaacagatgcatataatcagaaagtctatggtctatctgaagctgttgtgtcagttggatatgagtatgagtcgtgtttggacctgactctgtgggaaaagaggactgccattctgcagggctatgaattggatgcgtccaacatgggtggctggacattagataaacatcacgtgctggatgtacagaacggtatactgtacaagggaaacggggaaaaccagttcatctcccagcagcctccagtcgtgagtagcatcatgggcaatgggcgaaggcgcagcatttcctgccccagttgcaatggtcaagctgatggtaacaagttactggccccagtggcgctagcttgtgggatcgatggcagtctgtacgtaggcgatttcaactatgtgcggcggatattcccttctggaaatgtaacaagtgtcttagaactaagcagcaacccagctcatagatactaccttgcaacggatccagtcacgggagatctgtacgtttctgacacaaacacccgcagaatttatcgcccaaagtcacttacgggggcaaaagacttgactaaaaatgcagaagtcgtcgcagggacaggggagcaatgccttccgtttgacgaggcgagatgtggggatggagggaaggccgtggaagccacactcatgagtcccaaaggaatggcagttgataagaatggattaatctactttgttgatggaaccatgattaggaaagttgaccaaaatggaatcatatcaactcttctgggctctaacgatttgacttcagccagacctttaacttgtgacaccagcatgcacatcagccaggtacgtctggaatggcccactgacctagccattaaccctatggataactccatttatgtcctggataataatgtagttttacagatcactgaaaatcgtcaagttcgcattgctgctggacggcccatgcactgtcaggttcccggagtggaatatcctgtggggaagcacgcggtgcagacaacactggaatcagccactgccattgctgtgtcctacagtggggtcctgtacattactgaaactgatgagaagaaaattaaccggataaggcaggtcacaacagatggagaaatctccttagtggccggaataccttcagagtgtgactgcaaaaatgatgccaactgtgactgttaccagagtggagatggctacgccaaggatgccaaactcagtgccccatcctccctggctgcttctccagatggtacactgtatattgcagatctagggaatatccggatccgggctgtgtcaaagaataagcctttacttaactctatgaacttctatgaagttgcgtctccaactgatcaagaactctacatctttgacatcaatggtactcaccaatatactgtaagtttagtcactggtgattacctttacaattttagctacagcaatgacaatgatattactgctgtgacagacagcaatggcaacacccttagaattagacgggacccaaatcgcatgccagttcgagtggtgtctcctgataaccaagtgatatggttgacaataggaacaaatggatgtttgaaaagcatgactgctcaaggactggaattagttttgtttacttaccatggcaatagtggccttttagccactaaaagtgatgaaactggatggacaacgttttttgactatgacagtgaaggtcgtctgacaaatgttacgtttccaactggagtggtcacaaacctgcatggggacatggacaaggctatcacagtggacattgagtcatctagccgagaagaagatgtcagcatcacttcaaatctgtcctcgatcgattctttctacaccatggttcaagatcagttaagaaacagctaccagattggttatgacggctccctcagaattatctacgccagtggcctggactcacactaccaaacagagccgcacgttctggctggcaccgctaatccgacggttgccaaaagaaacatgactttgcctggcgagaacggtcaaaacttggtggaatggagattccgaaaagagcaagcccaagggaaagtcaatgtctttggccgcaagctcagggttaatggcagaaacctcctttcagttgactttgatcgaacaacaaagacagaaaagatctatgacgaccaccgtaaatttctactgaggatcgcctacgacacgtctgggcacccgactctctggctgccaagcagcaagctgatggccgtcaatgtcacctattcatccacaggtcaaattgccagcatccagcgaggcaccactagcgagaaagtagattatgacggacaggggaggatcgtgtctcgggtctttgctgatggtaaaacatggagttacacatatttagaaaagtccatggttcttctgcttcatagccagcggcagtacatcttcgaatacgatatgtgggaccgcctgtctgccatcaccatgcccagtgtggctcgccacaccatgcagaccatccgatccattggctactaccgcaacatatacaaccccccggaaagcaacgcctccatcatcacggactacaacgaggaagggctgcttctacaaacagctttcttgggtacaagtcggagggtcttattcaaatacagaaggcagactaggctctcagaaattttatatgatagcacaagagtcagttttacctatgatgaaacagcaggagtcctaaagacagtaaacctccagagtgatggttttatttgcaccattagatacaggcaaattggtcccctgattgacaggcagattttccgctttagtgaagatgggatggtaaatgcaagatttgactatagctatgacaacagctttcgagtgaccagcatgcagggtgtgatcaatgaaacgccactgcctattgatctgtatcagtttgatgacatttctggcaaagttgagcagtttggaaagtttggagttatatattatgatattaaccagatcatttctacagctgtaatgacctatacgaagcactttgatgctcatggccgtatcaaggagattcaatatgagatattcaggtcgctcatgtactggattacaattcagtatgataacatgggtcgggtaaccaagagagagattaaaatagggccctttgccaacaccaccaaatatgcttatgaatatgatgttgatggacagctccaaacagtttacctcaatgaaaagataatgtggcggtacaactacgatctgaatggaaacctccatttactgaacccaagtaacagtgcgcgtctgacaccccttcgctatgacctgcgagacagaatcactcgactgggtgatgttcaatatcggttggatgaagatggtttcctacgtcaaaggggcacggaaatctttgaatatagctccaaggggcttctaactcgagtttacagtaaaggcagtggctggacagtgatctaccgttatgacggcctgggaaggcgtgtttctagcaaaaccagtctaggacagcacctgcagtttttttatgctgacttaacttatcccactaggattactcatgtctacaaccattcgagttcagaaattacctccctgtattatgatctccaaggacatctttttgccatggaaatcagcagtggggatgaattctatattgcatcggataacacagggacaccactggctgtgttcagtagcaatgggcttatgctgaaacagattcagtacactgcatatggggaaatctattttgactctaatattgactttcaactggtaattggatttcatggtggcctgtatgacccactcaccaaattaatccactttggagaaagagattatgacattttggcaggacggtggacaacacctgacatagaaatctggaaaagaattgggaaggacccagctccttttaacttgtacatgtttaggaataacaaccctgcaagcaaaatccatgacgtgaaagattacatcacagatgttaacagctggctggtgacatttggtttccatctgcacaatgctattcctggattccctgttcccaaatttgatttaacagaaccttcttacgaacttgtgaagagtcagcagtgggatgatataccgcccatcttcggagtccagcagcaagtggcgcggcaggccaaggccttcctgtcgctggggaagatggccgaggtgcaggtgagccggcgccgggccggcggcgcgcagtcctggctgtggttcgccacggtcaagtcgctgatcggcaagggcgtcatgctggccgtcagccagggccgcgtgcagaccaacgtgctcaacatcgccaacgaggactgcatcaaggtggcggccgtgctcaacaacgccttctacctggagaacctgcacttcaccatcgagggcaaggacacgcactacttcatcaagaccaccacgcccgagagcgacctgggcacgctgcggttgaccagcggccgcaaggcgctggagaacggcatcaacgtgacggtgtcgcagtccaccacggtggtgaacggcaggacgcgcaggttcgcggacgtggagatgcagttcggcgcgctggcgctgcacgtgcgctacggcatgaccctggacgaggagaaggcgcgcatcctggagcaggcgcggcagcgcgcgctcgcccgggcctgggcgcgcgagcagcagcgcgtgcgcgacggcgaggagggcgcgcgcctctggacggagggcgagaagcggcagctgctgagcgccggcaaggtgcagggctacgacgggtactacgtactctcggtggagcagtaccccgagctggccgacagcgccaacaacatccagttcctgcggcagagcgagatcggcaggaggtaacgcccgggccgcgcccgccgagccgctcacgccctgcccacattgtcctgtggcacaacccgagtgggactctccaacgcccaagagccttcctcccgggggaatgagactgctgttacgacccacacccacaccgcgaaaacaaggaccgcttttttccgaatgaccttaaaggtgatcggctttaacgaatatgtttacatatgcatagcgctgcactcagtcggactgaacgtagccagaggaaaaaaaaatcatcaaggacaaaggcctcgacctgttgcgctgggccgtctgttccttctaggcactgtatttaactaacttt

SEQ ID NO: 36659 - DNA, 10896 bp, Artificial Sequence
  derived and/or modified sequence
atgggtctggagcttggaggagaagtctgaactaaggataaactaaagagaggccaatgagacttgaaccctgagcctaagttgtcaccagcaggactgatgtgcacacagaaggaatgaagtatggatgtgaaagaacgcaggccttactgctccctgaccaagagcagacgagagaaggaacggcgctacacaaattcctccgcagacaatgaggagtgccgggtacccacacagaagtcctacagttccagcgagacattgaaagcttttgatcatgattcctcgcggctgctttacggcaacagagtgaaggatttggttcacagagaagcagacgagttcactagacaaggacagaattttaccctaaggcagttaggagtttgtgaaccagcaactcgaagaggactggcattttgtgcggaaatggggctccctcacagaggttactctatcagtgcagggtcagatgctgatactgaaaatgaagcagtgatgtccccagagcatgccatgagactttggggcaggggggtcaaatcaggccgcagctcctgcctgtcaagtcggtccaactcagccctcaccctgacagatacggagcacgaaaacaagtccgacagtgagaatgagcaacctgcaagcaatcaaggccagtctaccctgcagcccttgccgccttcccataagcagcactctgcacagcatcatccatccatcacttctctcaacagaaactccctgaccaatagaaggaaccagagtccggccccgccggctgctttgcccgccgagctgcaaaccacacccgagtccgtccagctgcaggacagctgggtccttggcagtaatgtaccactggaaagcaggcatttcctattcaaaacaggaacaggtacaacgccactgttcagtactgcaaccccaggatacacaatggcatctggctctgtttattcaccacctactcggccactacctagaaacaccctatcaagaagtgcttttaaattcaagaagtcttcaaagtactgtagctggaaatgcactgcactgtgtgccgtaggggtctcggtgctcctggcaatactcctgtcttattttatagcaatgcatctctttggcctcaactggcagctacagcagactgaaaatgacacatttgagaatggaaaagtgaattctgataccatgccaacaaacactgtgtcattaccttctggagacaatggaaaattaggtggatttacgcaagaaaataacaccatagattccggagaacttgatattggccgaagagcaattcaagagattcctcccgggatcttctggagatcacagctcttcattgatcagccacagtttcttaaattcaatatctctcttcagaaggatgcattgattggagtatatggccggaaaggcttaccgccttcccatactcagtatgacttcgtggagctcctggatggcagcaggctgattgccagagagcagcggagcctgcttgagacggagagagccgggcggcaggcgagatccgtcagccttcatgaggccggctttatccagtacttggattctggaatctggcatctggctttttataatgatgggaaaaatgcagagcaggtgtcttttaataccattgttatagagtctgtggtggaatgtccccgaaattgccatggaaatggagaatgcgtttctggaacttgccattgttttccaggatttctgggtccggattgttcaagagccgcctgtccagtgttatgtagtggcaacgggcagtactccaagggccgctgcctgtgtttcagcggctggaagggcaccgagtgtgatgtgccgactacccagtgtattgacccacagtgtgggggtcgtgggatttgtatcatgggctcttgtgcttgcaactcaggatacaaaggagaaagttgtgaagaagctgactgtatagaccctgggtgttctaatcatggtgtgtgtatccacggggaatgtcactgcagtccaggatggggaggtagcaattgtgaaatactgaagaccatgtgtccagaccagtgctccggccacggaacgtatcttcaagaaagtggctcctgcacgtgtgaccctaactggactggcccagactgctcaaacgaaatatgttctgtggactgtggctcacacggcgtttgcatgggggggacgtgtcgctgtgaagaaggctggacgggcccagcctgtaatcagagagcctgccacccccgctgtgccgagcacgggacctgcaaggatggcaagtgtgaatgcagccagggctggaatggagagcactgcactatcgagggttgtcctggtctgtgcaacagcaatggaagatgtaccctggaccaaaatggctggcattgtgtgtgccagcctggatggagaggagcaggctgtgacgtagccatggagactctttgcacagatagcaaggacaatgaaggagatggactcattgactgcatggatcccgattgctgcctacagagttcctgccagaatcagccctattgtcggggactgccggatcctcaggacatcattagccaaagccttcaatcgccttctcagcaagctgccaaatccttttatgatcgaatcagtttccttataggatctgatagcacccatgttatacctggagaaagtcctttcaataagagccttgcatctgtcatcagaggccaagtactgactgctgatggaactccacttattggagtaaatgtctcgtttttccattacccagaatatggatatactattacccgccaggacggaatgtttgacttggtggcaaatggtggggcctctctaactttggtatttgaacgatccccattcctcactcagtatcatactgtgtggattccatggaatgtcttttatgtgatggataccctagtcatgaagaaagaagagaatgatattcccagctgtgatctgagtggattcgtgaggccaaatcccatcattgtgtcatcacctttatccacctttttcagatcttctcctgaagacagtcccatcattcccgaaacacaggtactccacgaggaaactacaattccaggaacagatttgaaactctcctacttgagttccagagctgcagggtataagtcagttctcaagatcaccatgacccagtctattattccatttaatttaatgaaggttcatcttatggtagctgtagtaggaagactcttccaaaagtggtttcctgcctcaccaaacttggcctatactttcatatgggataaaacagatgcatataatcagaaagtctatggtctatctgaagctgttgtgtcagttggatatgagtatgagtcgtgtttggacctgactctgtgggaaaagaggactgccattctgcagggctatgaattggatgcgtccaacatgggtggctggacattagataaacatcacgtgctggatgtacagaacggtatactgtacaagggaaacggggaaaaccagttcatctcccagcagcctccagtcgtgagtagcatcatgggcaatgggcgaaggcgcagcatttcctgccccagttgcaatggtcaagctgatggtaacaagttactggccccagtggcgctagcttgtgggatcgatggcagtctgtacgtaggcgatttcaactatgtgcggcggatattcccttctggaaatgtaacaagtgtcttagaactaagcagcaacccagctcatagatactaccttgcaacggatccagtcacgggagatctgtacgtttctgacacaaacacccgcagaatttatcgcccaaagtcacttacgggggcaaaagacttgactaaaaatgcagaagtcgtcgcagggacaggggagcaatgccttccgtttgacgaggcgagatgtggggatggagggaaggccgtggaagccacactcatgagtcccaaaggaatggcagttgataagaatggattaatctactttgttgatggaaccatgattaggaaagttgaccaaaatggaatcatatcaactcttctgggctctaacgatttgacttcagccagacctttaacttgtgacaccagcatgcacatcagccaggtacgtctggaatggcccactgacctagccattaaccctatggataactccatttatgtcctggataataatgtagttttacagatcactgaaaatcgtcaagttcgcattgctgctggacggcccatgcactgtcaggttcccggagtggaatatcctgtggggaagcacgcggtgcagacaacactggaatcagccactgccattgctgtgtcctacagtggggtcctgtacattactgaaactgatgagaagaaaattaaccggataaggcaggtcacaacagatggagaaatctccttagtggccggaataccttcagagtgtgactgcaaaaatgatgccaactgtgactgttaccagagtggagatggctacgccaaggatgccaaactcagtgccccatcctccctggctgcttctccagatggtacactgtatattgcagatctagggaatatccggatccgggctgtgtcaaagaataagcctttacttaactctatgaacttctatgaagttgcgtctccaactgatcaagaactctacatctttgacatcaatggtactcaccaatatactgtaagtttagtcactggtgattacctttacaattttagctacagcaatgacaatgatattactgctgtgacagacagcaatggcaacacccttagaattagacgggacccaaatcgcatgccagttcgagtggtgtctcctgataaccaagtgatatggttgacaataggaacaaatggatgtttgaaaagcatgactgctcaaggactggaattagttttgtttacttaccatggcaatagtggccttttagccactaaaagtgatgaaactggatggacaacgttttttgactatgacagtgaaggtcgtctgacaaatgttacgtttccaactggagtggtcacaaacctgcatggggacatggacaaggctatcacagtggacattgagtcatctagccgagaagaagatgtcagcatcacttcaaatctgtcctcgatcgattctttctacaccatggttcaagatcagttaagaaacagctaccagattggttatgacggctccctcagaattatctacgccagtggcctggactcacactaccaaacagagccgcacgttctggctggcaccgctaatccgacggttgccaaaagaaacatgactttgcctggcgagaacggtcaaaacttggtggaatggagattccgaaaagagcaagcccaagggaaagtcaatgtctttggccgcaagctcagggttaatggcagaaacctcctttcagttgactttgatcgaacaacaaagacagaaaagatctatgacgaccaccgtaaatttctactgaggatcgcctacgacacgtctgggcacccgactctctggctgccaagcagcaagctgatggccgtcaatgtcacctattcatccacaggtcaaattgccagcatccagcgaggcaccactagcgagaaagtagattatgacggacaggggaggatcgtgtctcgggtctttgctgatggtaaaacatggagttacacatatttagaaaagtccatggttcttctgcttcatagccagcggcagtacatcttcgaatacgatatgtgggaccgcctgtctgccatcaccatgcccagtgtggctcgccacaccatgcagaccatccgatccattggctactaccgcaacatatacaaccccccggaaagcaacgcctccatcatcacggactacaacgaggaagggctgcttctacaaacagctttcttgggtacaagtcggagggtcttattcaaatacagaaggcagactaggctctcagaaattttatatgatagcacaagagtcagttttacctatgatgaaacagcaggagtcctaaagacagtaaacctccagagtgatggttttatttgcaccattagatacaggcaaattggtcccctgattgacaggcagattttccgctttagtgaagatgggatggtaaatgcaagatttgactatagctatgacaacagctttcgagtgaccagcatgcagggtgtgatcaatgaaacgccactgcctattgatctgtatcagtttgatgacatttctggcaaagttgagcagtttggaaagtttggagttatatattatgatattaaccagatcatttctacagctgtaatgacctatacgaagcactttgatgctcatggccgtatcaaggagattcaatatgagatattcaggtcgctcatgtactggattacaattcagtatgataacatgggtcgggtaaccaagagagagattaaaatagggccctttgccaacaccaccaaatatgcttatgaatatgatgttgatggacagctccaaacagtttacctcaatgaaaagataatgtggcggtacaactacgatctgaatggaaacctccatttactgaacccaagtaacagtgcgcgtctgacaccccttcgctatgacctgcgagacagaatcactcgactgggtgatgttcaatatcggttggatgaagatggtttcctacgtcaaaggggcacggaaatctttgaatatagctccaaggggcttctaactcgagtttacagtaaaggcagtggctggacagtgatctaccgttatgacggcctgggaaggcgtgtttctagcaaaaccagtctaggacagcacctgcagtttttttatgctgacttaacttatcccactaggattactcatgtctacaaccattcgagttcagaaattacctccctgtattatgatctccaaggacatctttttgccatggaaatcagcagtggggatgaattctatattgcatcggataacacagggacaccactggctgtgttcagtagcaatgggcttatgctgaaacagattcagtacactgcatatggggaaatctattttgactctaatattgactttcaactggtaattggatttcatggtggcctgtatgacccactcaccaaattaatccactttggagaaagagattatgacattttggcaggacggtggacaacacctgacatagaaatctggaaaagaattgggaaggacccagctccttttaacttgtacatgtttaggaataacaaccctgcaagcaaaatccatgacgtgaaagattacatcacagatgttaacagctggctggtgacatttggtttccatctgcacaatgctattcctggattccctgttcccaaatttgatttaacagaaccttcttacgaacttgtgaagagtcagcagtgggatgatataccgcccatcttcggagtccagcagcaagtggcgcggcaggccaaggccttcctgtcgctggggaagatggccgaggtgcaggtgagccggcgccgggccggcggcgcgcagtcctggctgtggttcgccacggtcaagtcgctgatcggcaagggcgtcatgctggccgtcagccagggccgcgtgcagaccaacgtgctcaacatcgccaacgaggactgcatcaaggtggcggccgtgctcaacaacgccttctacctggagaacctgcacttcaccatcgagggcaaggacacgcactacttcatcaagaccaccacgcccgagagcgacctgggcacgctgcggttgaccagcggccgcaaggcgctggagaacggcatcaacgtgacggtgtcgcagtccaccacggtggtgaacggcaggacgcgcaggttcgcggacgtggagatgcagttcggcgcgctggcgctgcacgtgcgctacggcatgaccctggacgaggagaaggcgcgcatcctggagcaggcgcggcagcgcgcgctcgcccgggcctgggcgcgcgagcagcagcgcgtgcgcgacggcgaggagggcgcgcgcctctggacggagggcgagaagcggcagctgctgagcgccggcaaggtgcagggctacgacgggtactacgtactctcggtggagcagtaccccgagctggccgacagcgccaacaacatccagttcctgcggcagagcgagatcggcaggaggtaacgcccgggccgcgcccgccgagccgctcacgccctgcccacattgtcctgtggcacaacccgagtgggactctccaacgcccaagagccttcctcccgggggaatgagactgctgttacgacccacacccacaccgcgaaaacaaggaccgcttttttccgaatgaccttaaaggtgatcggctttaacgaatatgtttacatatgcatagcgctgcactcagtcggactgaacgtagccagaggaaaaaaaaatcatcaaggacaaaggcctcgacctgttgcgctgggccgtctgttccttctaggcactgtatttaactaactttaaaaaagaaaaaaaaatgtgtacagtgtttccaaatagtcccgaattgtcgacctttgcttacaagaagtagtctgtctgcataggatgtgatagctatctctgttcattttacaatgtggggcaaagttactgtttctagacaacccaactgctttccctgtgcagctttgtagaaggacattggcacagtgacttctgcggcggggatttattaatggattttacaatgctaacgtggtttcccttcggggaaaaaactggcaactagaatccttgtcactgataagcaaaggaaatcctgatttttttgtaaattatgtgagacaagttgtttatggatttttatatgaattacaatttactgtacatcaaatcttagtctcagaggagttaatttatgtaaagtgtttaaaaatttatacttaaaaataaaatgataaaaacgtgaactgtgtgatttttttaaaaggattgcaccttttgttatctgttatagctgtacagtatgaattattatattgtagagatataacaacttatgcctataatgtccagaagtgttaatatttttgtattaggttgaaaaaatgtgcaagcttctatcactagatggataggaccgtgcaattctaggtgggtggcgaatcagagagctcctttctcttccctctctcacgcatcaggccagtgtcctcagcattgtcaactgagaggcacagtagacaactagggctggtggaatgtaagggaagaagattgaaaaaacgggaggaagggttctctggccctctctcaaccttgcaagtcaatggggagttgttgatataattaaccccgaggtttttactgttactgttccaaagctctgtctcttgatggaggagagaccacatcagatgctggggaaataggaggaggaaaggttctgatgtagtcgtgatcctaaacacgtgtcttaagatctaggaaagacagcagaaaccgagcagtggtgggtgagccagatggagccggtcagggttactctaagcccacatgaccaaaccatcttggggggctggtttgaatgacagcctctgctctgtctcggggaagccgggggtggcagatccagctggaagtgaactgacagccgcgccctcctgcacacatgcatgcacgcgtgtgggaacgagcccagccgccatctgcacttccgtgtcggctcagctctgacaaatctctttcctgagcactaaattcagccacgaaaatatttttagaagatatttctcagttcatcgagctatagtacacactgttttcctctatgtataatggtgataaaatatagcaagtgaacatgtcgtaaatataaaggttcaagtgatgtattgaaaataattttctaactgctttgtatgtatcacatactctaaattgcacagtaggcgtgtttattaaacagatgattggctgggaaagtttcaaaatagctactgaatttacagtatcagtgctattactgtctttgtgtatttggtagagcataccgaagtaattaatcttctaatgaatgctgatgatattttattagaatgaaagcacagattagcattaatattttttattctggaaatcctttggcaagtattatgaagcccaaatttagaaaactatgagatttcaaaccacataaacatgattctgttttccattttattttttaactgttaggtatttgcagttctgttccgtggaacttctgcaggcctgtatttagcatgctgtaagtacttttgggtgaaataggctctgagtctaaattctcagacatgtttctgatgtattaccatgaaaagcttgtgccacatgacagaagtgagatcatagtcttaacctcttcttgacgtggactggtcttcactcgggcaccgataaataacagatttggagtatctcctggtgcttattttagatgatgaagtcaaatcaacccaattagtgtcctgttagtaggtataatgagcctatttctttctaaaaagacttgtgatctggacatgcttttacaagaaatagtgaccttggggaatatgtaaacaaaagacctttttctaagagttgggagggggtgggggactgtataatgaaaagaattagcttacaaaaaagaaattgatattcaaagtattttaggcaaagccagtcaaaatgctttcatgatattttgagatgtaaattttgtctgatttgtattgttcttttcatttgccttcttaactttatatgtgacctgaattttccataacttgatgactatagattgcacctaggcattccaataaaagccaacccaatgtg

SEQ ID NO: 36660 - DNA, 651 bp, Artificial Sequence
  derived and/or modified sequence
cggctcgggcggacgcggcggctgctgccggggagcgagccggcggcgcgggcgagccgagcgcgagaggccaatgagacttgaaccctgagcctaagttgtcaccagcaggactgatgtgcacacagaaggaatgaagtatggatgtgaaagaacgcaggccttactgctccctgaccaagagcagacgagagaaggaacggcgctacacaaattcctccgcagacaatgaggagtgccgggtacccacacagaagtcctacagttccagcgagacattgaaagcttttgatcatgattcctcgcggctgctttacggcaacagagtgaaggatttggttcacagagaagcagacgagttcactagacaaggacagaattttaccctaaggcagttaggagtttgtgaaccagcaactcgaagaggactggcattttgtgcggaaatggggctccctcacagaggttactctatcagtgcagggtcagatgctgatactgaaaatgaagcagtgatgtccccagagcatgccatgagactttggggcaggggggtcaaatcaggccgcagctcctgcctgtcaagtcggtccaactcagccctcaccctgacagatacggagcacgaaaacaagtccgacagtgagaatg

SEQ ID NO: 36661 - DNA, 8100 bp, Artificial Sequence
  derived and/or modified sequence
atggacgtgaaggagcggcggccctactgcagcctgaccaagagcagacgggagaaagagaggaggtatacaaattcctctgctgataatgaagaatgccgcgtgccaactcagaagtcttatagtagctctgaaactctcaaagcctttgatcacgatagctcgcgactgctgtacgggaaccgagttaaggatctggtgcatagggaagcggatgaattcactaggcagggacaaaacttcacgctgagacaactgggagtgtgcgagccggccacccgcaggggactcgccttctgcgccgagatgggtctcccccataggggatattccattagtgccgggtctgacgccgacacagaaaacgaggcagtgatgtcacccgagcacgccatgcgactgtggggccggggcgtcaaaagcggccggtcatcctgtctgagttcacgatccaactctgcgctgacacttacagacacagagcatgagaacaaaagcgattctgaaaacgaacaaccagcgagcaaccaggggcagtctactttgcaacccctgccaccttcacacaagcaacattccgcacagcaccacccaagcattacatctctcaatcggaactccttaaccaaccggaggaaccagagccctgcaccgcctgcggccctcccggcagagctccagaccactcctgaatccgtgcagctccaggacagctgggtgttgggatctaatgtgcccctcgagtctcggcactttctgttcaagactggcactggcacgaccccattgtttagtacggccacccccggctatactatggcttctggatccgtttacagcccacctactagacccctgccaagaaataccctgtcacgttctgcctttaaatttaagaaatcaagtaaatattgcagctggaaatgtactgccctctgtgcagtgggggtgtccgtgcttctggctatcctcctctcctattttatagccatgcatctattcggattgaattggcagctacaacagactgagaatgacacattcgagaatggcaaagtgaattcggatactatgcccaccaacaccgtgtctctgccctccggggacaatggaaagctagggggcttcactcaagagaacaacacaatcgacagcggtgaacttgacatcgggagaagagcaatccaagagatcccaccagggatattttggagaagccagctttttatcgaccaaccccagtttttgaaattcaatatctctctgcagaaggacgctctgattggggtgtacggccgtaaaggtttgcccccatctcacacccagtacgatttcgttgagctactcgatgggtctagacttatcgcccgagaacaaaggtcactgctggaaacggagagagccggacgccaggcacgctccgtctccctgcatgaggccgggtttatccagtacttggacagtggcatctggcatctggccttctacaatgatggaaagaacgccgaacaagtgtccttcaataccatcgtgatcgagagtgtggttgaatgccctagaaactgccacggaaatggggaatgcgtctcgggaacctgccactgcttccccggcttcctaggtcctgactgctccagggccgcctgtcccgttctgtgctccggaaacggccaatattcgaagggacggtgcctgtgcttcagcggatggaagggcaccgagtgcgacgtgcccacaactcagtgcatcgaccctcagtgtggcggacggggaatttgcattatggggtcgtgcgcctgcaactcagggtataagggtgagagctgtgaagaagcagattgcattgatccaggatgttcaaatcacggcgtgtgtattcacggagagtgccattgcagtcccgggtggggcgggtcaaactgtgagatccttaagaccatgtgccccgaccagtgctctggacatgggacctatctccaggaaagcggaagctgtacctgtgacccaaattggactggaccagattgctcaaatgaaatttgtagcgttgactgtgggagtcacggtgtgtgcatgggcggtacttgcagatgtgaggagggatggaccggcccagcatgtaaccaaagagcctgtcatccaagatgcgctgagcacggcacgtgtaaggatggaaagtgtgagtgcagccaaggatggaatggggaacactgtactatcgaagggtgtcccgggctctgtaactccaacggtcgctgtacacttgatcagaatggatggcactgcgtttgtcagccaggatggcgcggcgctggctgtgacgtggccatggaaacattgtgcaccgactctaaagataatgaaggcgatggactcatcgactgcatggacccagactgctgcctgcagtcatcctgccagaaccagccatattgcagagggttgccagacccacaggatatcatctcccagagtttgcaatccccttcacagcaggctgccaaaagcttttatgaccgtataagctttttaataggcagcgactctactcatgttattccaggcgagtcaccgtttaataagagcctcgcgagtgtcattcgcggacaggtcttgaccgctgatgggaccccactcattggcgtcaacgtcagcttttttcactatccagagtacggttacactattactcgccaggacggaatgttcgacctagtagccaacgggggcgcatcactgaccctagtttttgagcgcagtcccttcctcacccagtaccatacagtctggattccgtggaatgttttctatgtgatggacaccctcgtaatgaaaaaagaggaaaatgacataccaagctgtgatttatccggcttcgtgagacctaatcccatcatcgtaagtagtcccctgtccacgtttttccgctcatctcccgaggactcccccataatccctgaaactcaagtgttgcacgaggagaccaccatcccaggtacagatctgaaacttagctatctgagttcacgcgccgccggctataagagcgtgctgaaaattaccatgacacagagtattattccttttaatctgatgaaagtgcatctcatggttgctgttgtcggtagattatttcagaaatggttccccgcatctccgaatcttgcatatactttcatctgggataaaaccgacgcatataaccagaaagtgtacggcctaagtgaagcagttgtgagcgtcggctacgaatatgagagctgtctcgatttaactctgtgggaaaagagaacagctatcctgcagggctacgaattggacgcgtcaaacatgggcggttggacactggataagcaccacgtgcttgatgtacagaatggaattttgtacaagggaaacggggaaaaccagtttatatcccagcagccaccagtggtctccagcatcatgggaaatggtcggaggcgcagtattagctgccctagctgtaacgggcaggcagacgggaacaaactgctggctcctgtggcactggcatgtggaatcgatggatcactgtacgttggggatttcaattatgtacgcagaatcttcccatccggtaatgtcacttcagttctcgagctgtccagcaatcccgcacaccgctattacctcgccacggacccggtgacaggcgatctgtatgtgtccgatacgaatacgcggaggatttatcgccccaagtcgctgacaggggcgaaggatttaaccaaaaacgctgaagtcgttgcgggcactggtgaacaatgtctgccctttgacgaagcaagatgcggtgacggcggaaaagcagtggaggctactttaatgagtcccaagggcatggcagtcgacaagaatggcctgatctattttgtagatggcaccatgatacgtaaggttgatcagaatggcatcatttctactcttttgggttctaacgatctaacgtccgcgagacccctcacatgtgatacgagcatgcacatcagccaggttcggctcgaatggcccactgaccttgcaatcaatccaatggacaactcaatatacgtgctggacaacaatgtggtactgcagataaccgaaaatcgccaagtccgcatagcagcgggaagaccaatgcactgccaggtgcctggtgtcgagtatcctgtcggcaagcatgctgtacagaccacattggagtccgcgacagctatcgcggtctcatactcaggtgtgctatacatcacagaaactgatgaaaagaagatcaacagaattaggcaggtgacaaccgacggtgagattagtctagtggcgggcatcccctccgagtgcgactgcaagaatgacgctaactgcgactgctaccagagtggcgatggatatgcgaaagacgcgaaactttccgcaccttccagtctggcagccagcccagatgggaccctctatattgcggatcttggaaatattcgtatacgcgctgtctcgaagaataaacccctgctgaattctatgaacttctacgaagtagccagccctacggaccaggaattatacatcttcgatatcaatggcacgcatcagtacacagtgagtctggtgaccggagactatctgtataacttctcatatagcaacgataacgacataactgccgtcacagacagcaatggcaacaccctgcgcatccgcagagatcccaacaggatgccagttcgagtggtttctcccgacaatcaagtaatctggctcactatcggaaccaacggatgcttaaaatccatgaccgctcagggactggagctcgtgctgtttacctatcatggcaactccggcttattggccacgaaatcggacgagactggctggactacattcttcgactacgactccgaagggcgactgaccaatgtaacttttccgactggggtggtgactaatctgcatggtgacatggacaaggccataacagtcgatattgaatcaagtagcagagaggaagatgtgagcattacgagcaacctctctagtattgatagcttctatactatggtgcaggaccagttgcgtaatagctatcagatcggctatgacggaagcttgcgcattatatacgcgtctggactagactcccactaccagactgagcctcacgttctggccgggacagctaaccccacggtggccaagaggaatatgaccctgcccggcgaaaatggccagaatcttgtcgagtggcggttcagaaaagaacaggcccaagggaaggtcaatgtgttcggaagaaagctacgggtgaacggcagaaacttactttccgtagacttcgatcggactactaaaaccgagaaaatatacgatgaccatcgaaaatttctcctgaggatcgcttacgacacatcaggtcatcctacgctctggctcccatcaagcaaactcatggctgtgaacgttacctatagctccacaggtcaaatagcaagcatccagcgggggaccacgagtgaaaaggtggactacgatggacaggggcgaattgtgagcagagtatttgccgacggtaagacttggagttacacatatctggagaaatcaatggtgctgctgctacacagtcagcgtcagtatatattcgaatatgatatgtgggaccgtctgtcagcaattaccatgccaagtgtggcccgccataccatgcagaccattagaagcattgggtattacaggaacatatataatccccctgaaagcaacgcaagcattatcaccgactacaatgaggagggattgttgctgcaaacagcatttcttggaacctctcgtagggttctgttcaagtacaggagacagacccggctgtcggaaatcctgtatgactcgactagagtctcctttacgtatgatgagacagcaggtgttcttaagaccgttaaccttcaatctgacggatttatctgtaccatccgatacaggcagattggacccttaattgataggcagattttcagattttccgaagatggcatggttaatgcccggtttgactacagttacgataattcatttcgcgtgacctctatgcagggcgtcattaacgagacgccacttcccatcgacctatatcagtttgatgacatttccgggaaagtggagcagttcgggaagtttggagtgatttattacgatattaatcaaattatttccacagccgtcatgacgtacaccaaacacttcgacgctcatggccgcattaaggagattcagtatgagattttccggtccctcatgtattggattaccatacagtacgacaacatgggtcgggtcactaagcgggagatcaaaattggcccatttgctaatactaccaaatacgcttacgagtacgacgtggacgggcagctgcagacagtgtacctgaatgaaaagataatgtggcgatacaattacgacttgaacggaaacctccatcttttgaatccttccaactctgcccggctgacacctctgcgttacgatctgcgagatcggatcacaaggctaggggacgtgcaatatagactggatgaggatggttttctcaggcagagggggaccgagatcttcgagtacagctctaaagggctgttgactagagtgtactcaaagggcagcgggtggacagtaatctacagatatgacggccttggaaggcgtgtctcttcaaagacctcgctggggcagcacctgcaattcttctatgccgacctgacatatcccacccggatcacacatgtgtacaaccattcatcaagtgagattacatccctgtactacgacctgcagggccatctattcgcgatggagatatccagcggcgatgagttctatatagcgagcgataatacaggcaccccactggccgtgttcagcagtaacggtctcatgctcaagcaaatccagtataccgcctatggagaaatttattttgactccaatattgactttcagctggtcataggcttccatggggggttatacgaccctcttactaaactgatacatttcggcgaaagggattacgacattctagcagggcggtggacaactccagatatcgaaatctggaagaggatagggaaagaccccgctcctttcaatctctatatgtttcggaataataatccagcatccaaaattcacgatgtgaaagattacattacagacgtaaatagctggttggtgacctttggattccatttgcacaacgccatccctgggttcccggttcctaagttcgatctgacggagccttcctatgagctggtgaaaagccaacagtgggacgacattccccctatttttggtgtgcagcagcaggtggctaggcaagccaaggcattcctgtcccttggtaaaatggcagaggtacaggtgagcaggcgcagagctgggggcgcacagagctggctctggttcgcaacagtgaaaagccttatcggaaagggcgtgatgcttgccgtgagtcagggaagagttcagaccaacgtgctgaacatcgctaacgaggactgtatcaaggtcgcagccgtgttaaataacgcgttttacttggagaacttgcatttcactatcgaaggcaaagacactcactactttatcaagaccacaactcccgagtccgatctaggaactctgcggctcacatcaggccggaaggccctcgaaaatggaatcaatgtgacggtctcccagtctaccacagtcgttaacggtcgcaccaggaggtttgctgacgtggaaatgcagttcggtgccctggccctgcacgtgcgatacggaatgacgctggacgaggaaaaggcacgtatcctcgaacaagccaggcaacgtgccctggccagggcctgggcacgagagcagcagagagtgcgtgacggcgaagagggcgccagactgtggactgagggcgagaaaagacagctgctgtcagcaggaaaagtccaagggtatgacgggtactatgtgctgtcagtggaacagtaccccgagctggccgacagcgctaataacattcagttcttgcgccagtccgaaatcggacgacgctag

SEQ ID NO: 36662 - DNA, 8100 bp, Artificial Sequence
  derived and/or modified sequence
atggacgtgaaggagcggcggccctactgcagcctgaccaagagccgtagggagaaagagcgccgatacacgaactccagtgccgataatgaagaatgtcgggtgccgacgcaaaagtcttactctagtagtgagactctgaaggcattcgaccatgacagttcaagactgctctatgggaatagagtgaaagaccttgttcacagagaagcggatgagttcacacggcaaggacaaaacttcactttaaggcagctgggagtgtgtgaacctgcaactaggaggggcctggcattttgcgctgaaatggggcttccacacagaggctactccataagcgccggaagcgacgccgacacggaaaacgaagctgtgatgtctcccgaacatgccatgagactgtggggccgcggcgttaaatcaggcagaagttcttgcttgagcagccgcagcaattccgccctcaccctgacggacacggagcacgaaaataaaagcgattccgagaacgagcagcccgcctcaaaccagggccagtctaccctccagccactgccaccatcacacaagcagcactcggcccagcaccatccaagtattacctcactgaatcgcaactccctcactaaccggaggaaccaatctccagccccaccagcagctcttcctgccgaactgcaaacgaccccagaaagcgtccagctgcaggacagctgggtcctcggcagtaacgtccccttagaatctaggcacttcttattcaaaaccggcacgggcacaacaccattgttctcaacagccacacccggctatacgatggcatccgggtcagtgtactctccccctacaaggccactgcctcggaacaccttaagcaggagtgctttcaaattcaagaagagcagcaaatattgtagctggaaatgcaccgctttgtgtgccgtgggcgtatccgtgcttctcgctatcctcctgagttattttatcgccatgcatctattcggacttaattggcaactgcagcaaactgagaacgacaccttcgaaaacgggaaagtgaacagcgacacaatgccaaccaatacagtcagcctcccttctggagacaacggaaagctggggggctttacccaggaaaataacactatagatagcggcgagctggacatcggaagaagggccatccaagaaataccccctggaattttctggcgctctcagctattcattgaccagccgcaattcctgaaatttaacattagccttcaaaaagatgcattaattggagtttatggaaggaaaggcctcccccccagccacacccaatacgactttgtggaattgctagatggaagtagactaattgccagggaacagcgctccctgctggaaactgagcgcgcaggtcgacaggcaagatcagtgagccttcatgaggcggggtttatccagtacctcgactccggcatttggcaccttgcattctataatgacggcaagaacgcagaacaggtaagttttaacactatcgtgattgagagcgtggtagagtgccctcgcaactgccatggaaatggggaatgtgtgtccgggacctgtcactgcttcccaggctttcttggaccggattgctcacgtgccgcttgtcccgtgctatgctctggcaatggacagtactcaaagggccgctgcctgtgtttcagcggctggaaggggacagaatgcgacgttccaactactcaatgtatagatccgcaatgcggtgggaggggaatctgcattatgggttcctgtgcctgcaatagcggctataagggcgagtcatgcgaagaggccgactgtatcgatcccggctgtagcaaccacggcgtctgtatacatggcgagtgccactgcagccccggctggggaggatcaaactgtgaaattctgaaaaccatgtgcccagaccagtgctctgggcacggaacatatctccaagagagcgggtcctgcacctgtgatcccaattggacaggaccggattgtagtaacgaaatttgttctgtagattgcgggtcccacggggtgtgcatggggggtacatgcagatgtgaagaagggtggaccggcccagcgtgcaaccagcgtgcttgtcatccccggtgcgcggaacacggtacgtgtaaggatgggaaatgtgaatgctctcagggatggaacggagagcactgtacaatcgaggggtgccctgggctgtgtaacagcaatgggcgctgcactctggaccaaaatggatggcactgtgtgtgtcagcccgggtggcgcggagccggctgtgatgtagccatggagacactctgtacagactccaaggacaatgaaggcgacggacttattgactgtatggaccccgactgttgtctgcagtctagttgtcaaaatcaaccttactgtcgcggccttcctgatcctcaggatattatcagccagagcctgcagtccccatcacaacaagccgccaagtcattctacgataggataagtttcctgattgggagtgatagtacccatgtgattcctggcgaatctccattcaacaagagcttagcatcagtcatccggggtcaggttctgactgccgacggtactccactgattggagttaatgtgtccttctttcactatccggagtacggctataccattacccggcaggacggtatgttcgatctggtggccaacggcggtgcatctcttacactcgtctttgaaagatcgcccttcctcacacagtaccacaccgtgtggattccctggaacgtgttctatgtgatggacacactggtgatgaagaaggaggaaaatgacatcccttcctgtgacttatctggctttgtgcgccctaatcccataattgtatcatcacctctgtcaaccttttttcggtcctcccccgaggattcccccattatccccgaaactcaggtgctccacgaggaaaccacaatccccggaacggacctgaaactttcatatcttagttcacgcgctgccggctataagtctgttcttaaaatcacgatgacacaatctatcattcccttcaatcttatgaaagtgcacctcatggtggcggttgtcggaaggttgtttcagaagtggtttcccgcatccccaaacctggcatatactttcatctgggacaaaacagacgcctacaatcagaaggtgtatggcctgtctgaagctgtagtgtctgtcggctatgaatacgagagctgccttgacttgaccctgtgggaaaagcgtaccgccatcctccagggatacgagctggacgcatctaacatgggaggctggacactcgacaaacatcatgtgttagacgtgcaaaacgggattttgtacaaaggaaacggagaaaaccaatttatttcacagcagccccctgtagtctccagcataatggggaatggacggcggagatctatttcatgcccatcgtgcaacggccaggctgacggcaacaagctcctggcccctgtggcacttgcctgtggcatcgacggaagtctctacgtgggagattttaattacgtccgaagaatctttccttctggaaacgtcacttctgtcttggaactctcatcgaaccccgctcaccgctattacttggctaccgaccccgtgaccggtgacctgtacgtcagtgatactaacacaaggaggatctaccgtcctaaaagtttaaccggcgctaaggacctgaccaagaatgcggaggtcgtcgcaggaaccggcgagcagtgcctcccattcgatgaagcccgttgcggagacggggggaaggccgttgaagccacactcatgtccccaaagggcatggcagtagacaaaaacggcctcatctacttcgttgatgggaccatgattaggaaagttgatcagaacggcatcatttcgaccctgcttgggagcaatgatctcacaagtgctcgaccacttacgtgtgacacttcgatgcatatttcgcaggtgaggcttgagtggcctactgatctggcaatcaaccccatggataattcaatttacgtgctcgacaacaacgttgtgttacagatcaccgaaaataggcaagtgagaatcgccgcagggcgacccatgcactgtcaggtccccggcgtggagtatccagtgggaaaacatgctgttcagaccactctggaatcagcaactgcaatagctgtgtcctattccggtgttctctatatcactgagaccgacgagaaaaaaattaatcgaatcaggcaggtgacgacggatggcgagatcagtctagtggccggaatcccttccgaatgcgattgcaaaaatgacgccaactgcgactgctatcagagtggggatgggtatgccaaggatgcgaaattgtcagcaccttccagcctcgccgccagtccagatggcacgctttatattgccgacctgggtaatatcagaattcgcgctgtgtccaaaaacaagcctcttctaaatagcatgaatttctacgaggtcgcctcacccacagaccaggagttgtatatcttcgacatcaatggcacgcatcagtacaccgtcagtctggtgacaggcgactacctgtataacttttcttactctaatgataatgatattaccgccgtgaccgattccaatgggaataccctgcggatccggagagatcctaataggatgcccgttagggtggtcagcccagacaatcaagtcatctggttgacgattggaaccaatgggtgtttaaaatccatgacagcccaaggcctggaactcgtgttatttacataccatgggaacagcgggttgctggccactaaaagcgacgaaaccggctggacaacgttcttcgactacgactctgaaggacggctcacaaatgtcacttttccaacaggagtggttaccaatctgcatggggatatggacaaggcgatcaccgtggacatagaaagctcgtcacgggaagaggatgtgtctataaccagtaatctgagcagtattgacagtttttatacgatggtgcaggatcagcttagaaatagctaccagattggttatgacggctccctccgcattatctacgcatctggactcgacagtcactatcaaacggaaccccatgtcctggcaggcactgcgaatcctaccgtggctaagcggaatatgacactgccaggtgagaatggccagaatcttgtcgaatggcggttccggaaagaacaggctcagggcaaggtgaatgtatttggtcgcaagctgcgggtgaacgggcgtaacttgttgagtgttgatttcgacagaactacaaaaacggagaagatttacgatgaccaccgaaagttcttacttagaatagcttacgatacatccggccacccaacactatggctgcccagctccaagctgatggctgtaaacgtgacatattctagcactggacaaatcgccagcatccagaggggtacgactagtgagaaggtggactatgatgggcaagggaggattgttagcagggtattcgcagacgggaaaacatggtcctacacgtacctcgaaaagtctatggtgttactgctgcactcgcagcgccagtacatattcgaatatgatatgtgggatcgcctctctgctatcacaatgccctcagttgctagacataccatgcagactattagatctattggttattataggaacatctacaaccctccggagtctaacgcatcaattatcaccgactataatgaagaaggcctgctgctgcaaaccgccttcttggggacctcccgacgtgtgctgttcaaatacaggagacagactagactgagcgagattttgtacgatagtaccagggtgtccttcacttatgatgagaccgcaggagtgctcaagaccgtgaacttacagtcggatggttttatctgtactattcgatacaggcagataggcccactcatcgatcgccagatctttagatttagcgaggacgggatggtgaacgcaaggttcgactactcctacgacaattcattcagggttacgtctatgcaaggcgtcatcaacgagacacccctcccaattgatctctaccaatttgatgacatttccgggaaggtagagcagtttggaaaattcggggtcatctattacgacatcaaccagatcatatctactgcagtgatgacctatactaaacacttcgacgctcacggaagaatcaaagaaatacagtatgagattttccggtctttgatgtactggatcacaattcaatatgacaacatgggacgcgtgacaaagcgcgaaattaaaatcgggccgttcgccaatactacaaaatatgcttacgaatatgacgtggatggacagcttcaaacagtctacctcaatgagaaaattatgtggcgctacaactatgatttaaacggtaatctccacctgctgaacccttcgaattcggctcggctaacacctctgcgctacgatctacgtgacaggattactcggctgggggacgtgcagtatcgtctcgatgaggatggctttcttagacagcgcgggactgaaatattcgagtatagctccaagggtttgctgactcgcgtctacagcaaggggagcggttggacagtcatttaccgttacgacggcctgggccgccgcgtatcaagcaaaacttctctgggccaacacctgcaattcttctacgcagatctgacctatcccacacgcatcacccacgtctacaaccactcctctagtgagattacgtccctgtactatgacttgcagggacacctatttgcaatggagatctctagcggtgacgagttttacattgcttccgacaacacgggtacacccctggcagtgttctcatcaaatggtctcatgttgaagcagattcaatataccgcctatggagagatctattttgattctaatatcgatttccagttagtgatcggttttcacggtggtctgtacgatccccttaccaagctcatccattttggtgaaagagactatgatatcctggcagggcgctggacaactcccgatatcgagatctggaaaagaattggcaaagatcccgccccattcaatctttacatgttcagaaataataatccggcatctaaaattcatgatgtcaaagactatatcaccgatgtaaacagttggcttgtgacctttggttttcatttacacaacgccattcctgggtttccagttcccaaattcgacctgaccgagcctagctacgaacttgtgaagtctcagcagtgggatgacataccacccatcttcggggtgcagcaacaggtcgccaggcaagctaaggcatttctgagtctcggcaaaatggcagaagtgcaggtctctcgtagaagagccggaggtgcccagtcttggctttggtttgcaacggtaaagtctctgattggcaagggagtgatgctcgcagtaagtcagggacgtgttcagaccaacgttttaaacatcgccaacgaagattgcattaaagtggccgcagtgcttaataacgccttctacctcgaaaatctgcacttcacaatcgagggcaaagatacccattactttattaagaccaccacacctgaatccgacctcgggaccctgaggcttacatctggccgtaaggcactggagaacggcattaacgtcaccgtctcccagagcaccacagtggtgaacggaaggacccgacggttcgcggacgtggagatgcagttcggagctctcgcacttcacgtgagatacggtatgacactggatgaggaaaaggcacggatcctcgagcaggctcgtcagcgcgcactggctagagcctgggcacgtgagcagcaaagagtccgcgatggagaagagggcgctcgcctttggaccgaaggagaaaagcgccagctcctttccgccgggaaagtccaggggtacgatggctactacgtgttgtccgtggagcaatatcccgaacttgctgacagcgccaataatattcagtttctgaggcagtccgagatcggcagacggtag

SEQ ID NO: 36663 - DNA, 513 bp, Artificial Sequence
  derived and/or modified sequence
atggacgtgaaggagcggcggccctactgcagcctgaccaagagcagaagagaaaaagagcgacgatacactaatagctcagccgataacgaagagtgccgagtccctacccaaaaaagctacagcagttccgagacgcttaaggcctttgaccatgacagttcaagactgctgtacggtaaccgggtgaaggacctggtccaccgggaggccgacgagtttacccggcagggccagaactttacactgagacaattaggcgtttgcgaacccgccacacggcgtggcttggcattctgtgccgagatgggcttgccacaccgtggttactccatttctgccgggagcgatgccgatactgagaatgaagccgtgatgagtccagaacacgctatgcggctgtggggtcgaggagtcaaatccggcagatcttcctgtctcagcagccgtagtaatagcgcactgactctgacggacacggagcatgagaacaaaagtgatagtgagaattag

SEQ ID NO: 36664 - DNA, 8099 bp, Artificial Sequence
  derived and/or modified sequence
atggatgtgaaggagcgtcggccatattgcagtctgaccaagtcacggagggaaaaggaacgcaggtataccaactctagtgctgataacgaagagtgccgcgttccaacccagaaatcatactcgtcaagtgaaacattgaaggcctttgaccacgactcctctcgccttctatatggcaaccgtgtcaaggacctggtacatcgcgaggctgacgagtttacaaggcaaggccagaattttaccctgcggcagttgggcgtgtgcgagccggctacacggagaggactggctttttgtgccgagatgggtctcccccaccgcggttactctatttccgccggatcagacgcagacacagagaacgaagcagttatgagtcctgagcatgccatgcggttgtggggccgaggggtcaagagcgggagaagtagttgcctctcttcaaggtcaaattccgccctaactctcacggacaccgagcacgaaaacaagtcagatagcgaaaatgagcagccggcatccaaccagggtcagtccactcttcagcccctgcctcccagccacaaacagcatagcgctcagcaccatccctctataacgtccctgaaccgaaacagcttaactaatcgtagaaaccagagccccgcaccacccgctgccttgccagccgaacttcagacgaccccagaaagcgtgcagctacaagacagctgggtccttggatcgaatgtacccctcgaaagtagacattttctgttcaagacaggtactgggacaacccccctgttcagtactgcgacgccaggatacacaatggcctccggctcagtgtatagtccccctaccagaccactgccacgtaatactctttctaggtcagcattcaagttcaagaagtcctcaaagtactgttcatggaagtgcaccgcactctgcgctgtaggcgtgtctgtccttctggccatcctcctcagttattttattgcgatgcacctcttcggacttaactggcaattacagcaaacggagaacgatacatttgagaatggtaaggtgaactctgacacaatgcctaccaatacagtctcccttccttctggcgataacgggaagctggggggatttactcaggagaataacactatcgattccggcgagttggacatcgggagaagagctatccaggaaatccctccaggtatcttctggcggtcgcaactgtttatcgaccagccccagtttctgaaattcaatatctctctgcagaaggatgccctgatcggcgtgtatggcaggaagggcttgcctccttcccacacgcagtatgactttgtcgaattactggacggttctcgattaattgctcgcgagcagaggtcgctcctggaaacagagcgcgcaggacgccaggccaggtccgtctccctccacgaggccggattcatacaatatttggacagcggcatttggcatttggccttttacaatgatggtaaaaacgcagagcaggtgagtttcaatacaatcgtcattgagtccgtggtggaatgtccgcgaaattgccacgggaacggcgaatgtgtcagtggcacatgccactgctttcccggatttctgggccctgattgctcacgcgctgcttgccccgtgctctgcagcggaaacggacaatattccaaggggaggtgcctttgcttctcaggctggaaagggacagagtgcgacgtgcccaccacccagtgcatcgaccctcaatgtggcggaaggggcatctgcattatgggttcatgcgcatgcaacagcggctacaaaggggagagttgcgaggaggcagactgcattgatcctgggtgctctaaccatggagtctgcatccacggcgagtgccactgttccccaggctggggaggctccaattgtgagatcctgaaaactatgtgcccagaccagtgctcgggccatgggacttacctgcaagaaagcggctcttgcacttgtgaccccaactggacggggcctgattgctcaaacgagatctgctcagtagattgcggcagccacggggtctgcatgggtggaacctgtcggtgtgaggaggggtggaccggtccggcttgtaatcagagggcctgccacccacggtgtgcagaacacggcacctgcaaggatgggaaatgtgaatgctcccaggggtggaacggagaacactgcacaatcgaaggttgtcccggtctctgcaattctaacggtcgctgcacgctcgatcagaacggctggcactgtgtctgccagcctggatggcggggagctggttgcgatgtggccatggagacactttgcacggacagcaaggataacgagggggatggcctcatcgactgtatggacccagactgttgtctccagagctcatgccaaaaccagccctactgccgcggattgcctgacccgcaagacatcataagtcaaagcctccagtctcccagtcaacaagcggcaaagtccttctatgatcgaatttctttcctaataggatccgatagcacgcacgtgattcccggtgagtcccctttcaacaaatccctggcctcagttatccgcggacaagtccttaccgcagacggaacgcctctgattggagtgaacgtatccttcttccattatcccgagtacggctacaccattacaaggcaggacgggatgttcgatttagtagcgaatggcggagcctctttgaccctggtgttcgagcgtagtccattccttacacagtaccatacagtgtggatcccttggaacgtgttctatgtgatggacaccctcgtgatgaagaaagaggagaatgatatccctagttgcgatttgtccggattcgtgagacccaaccccatcattgtatccagccctcttagcacattttttcggtcttcgcctgaggacagcccaataatccccgaaacccaggtgcttcacgaggaaactacgattccgggaaccgatctcaaactgtcatatctctcgtcccgggctgctggatataaaagcgtcctcaaaataacgatgacacagagtatcattccattcaacctcatgaaagtccacctaatggtcgctgtggtgggccgtttgttccagaagtggtttccagccagtccaaatctcgcctacaccttcatatgggacaagactgatgcttacaaccagaaagtgtatggtttgtcagaagcagtggtgtcagtgggctacgagtacgagagttgtctagacctgactctgtgggagaagaggacagctatattgcagggatatgagctggacgcctctaacatggggggatggacactcgacaagcatcacgtcctcgacgtgcaaaacgggatcctgtacaaaggaaacggcgagaatcagttcataagccagcaaccacccgttgtaagctctatcatgggaaatggtaggcggcgaagcatatcgtgcccaagctgtaacggtcaggcagatgggaacaaactgttggcccctgtcgccctagcttgtgggattgacgggtcactgtatgtgggcgactttaactacgttcggagaatctttccctctggaaatgtgactagcgtgctcgagttatctagtaatccagctcacagatactacttggccaccgacccagtgactggcgatctgtatgtgagcgataccaatacgcgacggatataccggcctaaaagcctgactggcgctaaagatcttacaaaaaatgctgaggttgtagccggaactggtgaacagtgcttaccgtttgacgaggctcgttgtggtgatggcggaaaagcagtggaagctacactcatgtccccaaagggaatggccgtggataaaaacggtttgatatacttcgtcgacgggacgatgatcagaaaggtggaccagaacgggattatctccacacttttaggatcaaatgacctgacctcagccaggccactgacctgtgacaccagcatgcacatctctcaggtccggcttgaatggcccacagacctggccatcaaccccatggacaatagcatatatgtcctggataacaatgtggtcctgcagatcactgaaaatcgacaggtgcgcattgcagctggtcggcctatgcactgtcaggttccgggtgtcgaataccctgttgggaagcatgctgtgcagactactctggaatctgctactgcgatcgcagtctcttacagcggagtgctgtatatcaccgaaaccgacgagaagaaaatcaaccgcatacgacaggttactacagatggcgaaatctctctagttgccggaatcccgagtgaatgcgactgtaagaatgacgcaaattgcgattgctatcagagtggggatggttatgcgaaagatgcaaagctgagtgcgccttcgagccttgctgcatcaccagacggcacgttatatatcgccgacctggggaatatccggattcgagccgtatccaagaataaacccctcctcaattcaatgaatttttacgaagtcgccagtccaacggaccaggaactgtatatctttgatatcaacggcacacaccaatacaccgtcagtctggtgaccggcgactacttgtacaacttctcctattctaatgataacgatatcaccgccgtaaccgactccaacggcaacacactaaggatccgccgtgacccaaataggatgccggtccgtgtggtgtctcccgacaatcaggtgatttggctgactatcgggaccaatggttgtttgaagagcatgactgctcaagggcttgagctcgtgctgttcacctaccacgggaattctggtctgctcgctactaagagtgatgaaacgggttggaccacattcttcgactacgattccgaagggaggctcacaaacgttacctttcctaccggcgtggttaccaacctccatggtgacatggataaagccattaccgtggatatcgagagcagcagcagagaggaggatgtgagtatcacgagtaatctcagctcaatcgatagcttctatacaatggtgcaggatcagctacgaaactcctatcaaatcggctatgacggaagccttcgtattatctacgcctcagggcttgactcacactaccagacggaaccacatgtcctggccggaactgcgaaccctacagtggccaagcggaacatgacgctccccggtgagaatggtcagaatttagtcgaatggcggttcaggaaggaacaagctcaggggaaggttaatgtctttggccgaaagctgagggtgaatgggaggaacctgttgagcgtggatttcgataggacaacaaaaactgaaaagatctacgacgatcaccgtaaattcttactccgaatcgcctatgataccagcggacatcctaccctctggctgccctcctccaaattgatggccgttaacgtgacctactcgagcaccgggcagatcgcttcgattcagcggggaactactagcgagaaggtcgactacgatggtcagggcaggatcgtgagccgggtctttgcagacggtaaaacgtggagctatacttatttggagaaaagcatggtgctccttttgcattcacaaaggcaatatatattcgagtatgacatgtgggatagactgtctgccatcactatgccgtccgtggctcgacatactatgcagactatccgatccattggatattacagaaatatctataaccctcctgaaagcaacgcttctattatcacagattataatgaagaggggcttcttttacagacagccttcctcggcacctccaggagggtactatttaaataccgtcgtcagactcgcctgtcagagattctatatgactctactagagtctcctttacttacgacgaaacagctggggtgctaaagacagtcaatctgcaatccgatggcttcatctgtactattcggtataggcagattggccctctgattgacaggcagattttcaggttctcagaggatggcatggtcaacgcccgttttgactactcctatgacaacagctttagagtcacaagcatgcaaggtgtcattaacgagacaccgctgcccattgacttgtaccagtttgatgatatatctgggaaagtagagcagttcggcaaatttggggtcatttactacgatatcaaccagatcatctcaacggccgtcatgacttacacaaaacatttcgacgcacacgggagaatcaaggagatccagtacgagatcttcaggtctctcatgtactggattactatccagtacgacaatatgggcagagtgacaaagagagagattaagattggaccctttgcaaatactactaagtatgcttacgagtacgatgtggatgggcagctgcagaccgtatatctgaacgaaaagataatgtggcggtataactacgatttgaacggcaacctgcacctgcttaatccgagcaactctgccagattaacccctttgaggtatgacctccgcgaccgcatcacgagattaggtgatgtccagtacagactggacgaggatgggttcttgagacagagaggtactgaaattttcgaatatagctctaagggcctgctgacccgcgtgtattcaaagggatccggctggaccgtgatctacagatacgacggcttggggaggcgcgtgtcctccaagacttccctggggcagcatctgcagttcttctacgcagacttgacataccccacaagaatcacgcatgtgtacaaccactcatctagcgagatcactagcctctactacgacctccagggacacctgtttgctatggaaatcagctccggcgacgagttctatatcgcttccgataatactggcacgcctctggccgttttttctagcaatggtttgatgcttaagcaaattcagtatactgcatacggtgagatttatttcgattcaaacatagattttcagctggtcatcggtttccatggcggactttacgatccccttacgaagctgattcacttcggcgagagagactacgacatccttgcgggtcgctggactaccccggatattgaaatctggaagaggatcgggaaagaccccgctccattcaatctctatatgtttagaaataacaacccggcaagtaagatccatgacgtcaaggattatatcacggatgtcaactcatggctcgttactttcggattccatctgcacaacgccatccccggattcccggtgcccaagtttgacctcaccgaacccagctacgaattagtgaagtctcagcagtgggacgacatcccccctattttcggggtgcagcagcaggttgcgcgacaggccaaggctttcctgtctttggggaaaatggctgaggttcaagtcagccggagaagggcagggggtgcccagtcttggctatggtttgcgactgtcaagagcctaatcggaaagggcgtgatgctcgctgtgtctcaaggccgagtgcaaaccaacgttttgaatattgcaaatgaggactgtattaaggttgcggctgtccttaataacgccttctacctggaaaacctccactttactatcgagggtaaggatacccactacttcatcaaaaccacaacccccgaaagcgacttggggacactgagattgactagcggaaggaaagcccttgagaatgggatcaacgtcactgtctcacagtcaactactgtggtcaatggtcggactcgaagatttgccgatgtggagatgcagttcggtgctttagcactgcacgtcagatatgggatgactcttgatgaggaaaaggctcggattctggagcaagcaagacaacgggctcttgccagagcctgggctcgtgaacagcaaagggtccgtgacggagaggagggagctcggctttggacagagggtgaaaagcggcagctcctgtctgcagggaaggtgcagggctacgatggctattatgtgttgtcagtggagcagtatcctgagctggccgattcagccaataatattcagtttctgagacagtcagaaatcggcaggagata

SEQ ID NO: 36665 - DNA, 8099 bp, Artificial Sequence
  derived and/or modified sequence
atggacgtgaaggagcggaggccttactgcagtttgaccaaatcacgccgagaaaaagaacgacggtatacaaattcctccgctgacaatgaggaatgccgggtccctacgcagaagtcgtacagcagttcggagacccttaaggcctttgaccacgattccagtcgtctcctctacggcaatagggtcaaagaccttgttcaccgcgaggcagatgaatttacaaggcagggccagaatttcacactccggcagctgggggtatgtgagcccgcaactcggaggggattagctttctgcgcggaaatgggacttccgcatagggggtacagcataagcgccggaagcgacgcagacacagaaaatgaagctgtgatgtcacctgagcacgcaatgagactctggggtagaggtgtcaaaagtgggcgaagctcatgtttgagtagtaggtcaaatagtgctttgactcttacagatacagaacacgagaacaagtcagactcagagaacgagcagccagcaagtaaccaggggcagagcacgctgcaacccctcccccctagtcacaagcagcactccgcccagcaccatccgagcataactagcctgaataggaatagtctgacaaatcgccgtaaccagtcacctgccccacctgccgctttgccagccgagctccaaactaccccagagtctgtacagttgcaggactcctgggttctcggctccaacgttcccctggagtcacgtcattttttgttcaaaaccggaaccgggacgactcccttattttcaaccgcaacacccggatacaccatggcctctggaagtgtctactcaccacctaccagacccctgcctcggaacacattaagtcgctcagcatttaagttcaaaaagagcagcaagtattgctcctggaagtgtacagccctctgtgccgtgggcgtgagcgtcttgctcgctatcttgttaagctatttcatcgctatgcacctctttggcctcaactggcaactacagcagaccgagaatgatactttcgaaaacgggaaggtgaacagcgatactatgcccactaacacagtgtctcttccttctggtgacaacggaaagttggggggattcacccaggagaacaatacaatcgactcaggcgaactcgatatcggccgaagggctatacaagaaatccctcccggaatcttttggaggtcccaactctttatcgatcagcctcagtttttgaagttcaacatctcattgcaaaaagacgcactcataggtgtctacggaagaaagggactgccacctagtcatacccagtatgatttcgtagagctgctcgatgggagtagactgattgcccgtgaacagcgctcactgttggaaacagagcgcgcaggcagacaggctagatccgtgagcctgcacgaagcaggatttatacagtacctcgatagcggaatatggcatctggctttttacaacgacgggaagaatgccgagcaggtgagtttcaatacaatcgtgattgaaagtgtcgtcgaatgccctaggaattgccacggcaacggcgaatgcgtgtctggaacgtgtcattgctttccagggttcctgggaccggactgttctagagctgcatgtccagtgctctgttcaggcaatggacagtacagcaaaggaagatgcttgtgtttctctggttggaaagggactgagtgtgatgtgcccacaacacaatgcattgaccctcaatgcggtggtaggggaatttgtattatggggtcatgcgcctgcaattccgggtataagggagagagctgcgaggaagccgattgcattgaccccggatgctccaaccacggagtgtgcatccacggggagtgtcactgctcccctggctggggcggaagcaactgcgaaatcctgaaaacaatgtgccccgaccagtgttccgggcacggcacatatctgcaggagagcgggagctgcacatgtgatcctaactggactggacctgactgttctaatgaaatttgctccgttgactgcggcagtcatggtgtgtgtatgggcggaacatgtagatgtgaagagggttggactggcccagcgtgcaatcagagggcctgtcaccccagatgcgctgagcatggaacctgtaaggacgggaaatgcgaatgttcccagggatggaatggagaacattgtacaatcgagggttgcccgggattgtgcaattccaacgggaggtgtacactggaccagaacggttggcattgcgtctgtcaacctggatggcgcggtgctggttgcgacgtggcgatggaaaccctgtgcaccgactctaaagataatgaaggggatgggcttatcgattgcatggatccagactgctgtctgcaatcttcatgccagaatcagccctattgtagggggttgccggaccctcaagatatcatctcccagtctctgcagtcacccagccagcaagctgccaagtcgttctacgacagaattagttttttgatcggaagcgactccacccacgtaatccccggagaatcccctttcaacaaaagcctggcttccgttatccgcggacaggtgctcaccgcagacggtactcccctcattggggttaacgtatcattcttccactacccagagtatggctacacaattactcggcaggatggaatgtttgatctcgtggcgaatggtggggctagcctcactctagtgttcgaacgaagtcccttcttaactcaataccatacagtatggatcccatggaatgtgttttatgtgatggataccttagtcatgaaaaaagaagagaacgatataccttcatgtgatttatcaggatttgtgaggcctaatcctattattgtgtctagccctctgtctacgttttttagatcgagccctgaggactctccaatcataccagagactcaagtgctccacgaggagaccacaataccaggtacagacctcaaactgtcctatctcagcagcagagccgcaggctataagtctgtgctgaaaatcactatgacgcagagcattatcccatttaatctaatgaaggtgcacctaatggtagccgtcgtcggaagactttttcagaagtggttccccgcttccccgaatcttgcatacacgtttatttgggataagacggatgcttataaccagaaagtttatgggctctccgaggctgtggtttctgtgggttatgagtacgagtcatgcctcgatctcacactttgggagaaacgcactgcaatcctacaggggtatgaattggatgcttctaatatgggcggatggacactggataagcaccacgttctggacgttcaaaacggcatcttatataaagggaatggagaaaaccaatttatttctcagcaacccccagttgtatcctccataatgggaaatggtcgcaggcgaagcatcagttgcccttcctgcaatggccaagcggatggcaacaaactcctagcccctgtagcattggcatgtgggattgacggcagcttatatgtaggggatttcaactacgtgcggagaatattcccctccgggaacgttacatccgtgcttgaactgagcagcaatcccgctcacaggtactatctggcaacagatccagtcactggggacctttacgtaagcgatactaatactagaaggatctaccggccaaaaagcctgactggcgctaaggacctgaccaagaatgcagaagttgtcgccggtacaggtgaacagtgcctgccatttgacgaggcaaggtgtggagacggcggaaaggcagtagaagccacacttatgtcacccaaaggcatggccgtggataaaaatggcctcatttacttcgttgacggtactatgataagaaaggttgaccagaacggaataatttcaactctgctggggagcaatgacctgacctctgctaggcctctgacctgcgacacaagcatgcacatcagccaggttagactcgagtggcccaccgatcttgccatcaatccaatggacaactctatatatgtgcttgacaataacgtggtgcttcagatcaccgagaatcgacaggtgagaattgcagcgggtcggcctatgcactgtcaggttccaggcgtggagtacccagtgggaaaacatgctgtgcagaccactctggagtcagccaccgccattgcagttagttatagcggggtgctctacattacagagacagacgaaaagaagatcaacaggattcggcaggtgacaaccgacggggaaatctcactggtcgcaggaatcccaagcgaatgcgattgcaagaacgacgccaactgtgattgctatcagtccggtgacggctacgctaaggatgcgaagctgtcagccccaagtagtttggcggctagccccgatgggacactttacatagctgatctaggcaatatcagaattagggccgtgtccaagaataaaccccttctgaattccatgaatttctacgaagtggcctctcccactgaccaggagctttatatctttgacatcaacggtacccaccagtacaccgtatcactggtcactggcgattacttgtacaacttttcatactctaacgataacgatattaccgcagtcaccgacagcaacggaaacacattaaggattcgcagagatccaaatcgaatgcctgtgagggtagtgtctcccgataatcaagtgatatggctcaccattggcaccaacggctgcctgaagagtatgacagcacagggacttgagcttgttctcttcacataccacggaaactccgggttgctggcgacaaagagcgacgaaaccggttggacgacctttttcgattacgactctgaaggtcggctcaccaacgttaccttccccacgggggtcgtgacaaatctgcacggtgacatggataaggccatcacagttgacattgaatcatccagtcgcgaggaggacgttagtatcacttccaacctgagttcaatcgatagtttttatacaatggtgcaggaccagctccggaattcttaccaaataggctacgatggcagtctcagaattatttatgcctccgggctagattcccactaccagacggagccccatgtgctcgcgggaaccgccaatcccaccgtagccaaacggaacatgaccctgccaggcgagaacggtcagaatctggtcgagtggcgattcagaaaggagcaagcccaggggaaagttaatgtgttcggcagaaaacttcgggtgaacggccgaaacctgctctctgtggactttgacagaaccactaagacagagaaaatctatgacgatcacagaaaattcctgctgcgaattgcctatgataccagtgggcaccctaccctctggctgccctcctccaagttaatggctgttaatgtgacttacagttccactggacaaatagctagcatacaacgtggaacaactagcgagaaggtggattatgatggtcagggcaggatcgtgtctcgagtctttgcggatggcaagacatggagttatacttatctagaaaagtccatggtgctcctgttgcactcccagagacaatatatctttgagtatgacatgtgggacagactctccgctataaccatgcctagcgtggcgagacacacaatgcagacaattcgcagcatcggatactatagaaacatttataacccccctgagtccaatgctagtattattactgactacaatgaggagggcctgctcttgcagacagctttcctgggcactagtcgcagggttctttttaaataccgaaggcaaacaaggttaagcgaaattctgtacgactccacgagagtgagtttcacttacgacgaaactgctggagtgctgaagaccgtcaacctgcagtcggatggcttcatatgtacaattcggtacaggcagatcggtccactgatagaccggcagatcttccgcttttccgaggacgggatggttaacgcacgctttgattactcttacgataatagcttccgcgtaacttcgatgcagggcgtaattaatgagacccctctaccgatagatctgtatcagtttgatgatatatccggcaaagtggagcaattcgggaaatttggcgttatctattacgacatcaatcaaatcatcagcaccgcggtgatgacttacaccaagcatttcgacgctcacggcaggattaaggagatccagtatgagatcttccgttctctcatgtactggatcacaatccagtacgataacatgggcagggttacaaaacgtgaaatcaaaattggacctttcgctaatactacaaagtacgcatatgagtacgatgtggatggccagctacagaccgtctatctgaacgaaaagatcatgtggcggtacaactacgacctcaacggcaacctgcacttgctgaatccatcgaactccgcgaggctcaccccccttaggtatgacctgcgcgaccggattacgcggctgggggatgtgcagtaccgtctggacgaggacggattcctgagacagaggggaacggaaatattcgagtatagctcaaaggggctactcacccgcgtatactctaagggcagtgggtggaccgtgatctaccggtacgacggattaggcagacgggtgagcagcaagaccagtctgggtcagcaccttcagttcttttatgcagatctcacctatcccacaagaatcacacatgtatacaatcattcctcctctgaaataacttcactatattatgatcttcaagggcatctgtttgctatggagatcagtagcggcgatgaattctatattgccagcgacaacacaggtacccctctggcagttttcagctctaacggcctgatgctgaaacagatacaatataccgcctatggggagatttacttcgactcaaacattgacttccagctcgtaatcggcttccacggcggactctacgaccccctgactaaactgattcatttcggggagcgcgattacgatattctagctggtagatggactacccctgatatcgaaatttggaaaaggattggcaaggatccagcaccctttaatctatacatgtttaggaacaataaccctgcttcaaagattcacgatgttaaagactacatcaccgatgtgaactcgtggcttgtcactttcggttttcatctgcacaatgctatccccggttttcccgtgcctaaatttgacctgaccgagcccagttacgaactcgtcaagtcccaacagtgggacgatatcccgcctatcttcggagtgcagcagcaggtcgcgaggcaggccaaggccttcctgagcctgggcaaaatggccgaggtccaggtgagccggagacgtgctggcggtgctcagtcttggctttggtttgcgacagtcaaatccctcataggaaagggggtcatgctggccgtcagtcaaggacgggtgcagactaacgtgctaaatatcgccaacgaggactgtatcaaggtcgccgctgtcctgaataatgccttctacctcgagaacctgcactttactatcgaaggcaaggacacgcactacttcatcaagacaacaaccccagaatccgacctaggcacactgagacttacgagtggaagaaaggcactcgaaaacggcatcaacgtgacggttagccagagtacaactgtggtcaatggtagaactaggaggtttgcggatgtcgagatgcaatttggagctctagccctgcatgtgcgctatggaatgacgctggacgaggagaaagccaggatcctagagcaagccaggcaaagggccttagcacgtgcctgggctagggaacagcaacgggtaagagatggagaggagggcgctcggttgtggacggaaggggagaagcggcagctgctcagtgcgggtaaagtccagggttacgatggttactatgtgttgtccgtagagcagtacccagaactggcagattcagctaataacatccagttcctgcggcagtccgaaataggacgcaggta

SEQ ID NO: 36666 - DNA, 513 bp, Artificial Sequence
  derived and/or modified sequence
atggacgttaaagagcgccgtccctactgttccctgaccaaaagcaggcgggaaaaagaaagaagatacacaaacagtagcgcagacaacgaggagtgtcgcgtacctactcaaaagtcctacagctctagcgagaccttaaaagccttcgatcatgattcctctcgcctactctacggcaatagggtgaaggatcttgtccatcgggaggccgatgagtttactaggcagggacaaaactttacgctcaggcagctgggagtctgcgaacctgcgacacgtcggggacttgctttttgtgcagagatgggcctgccacacagaggctactccatctcagccggttcagacgccgataccgaaaacgaagccgtgatgtctcccgagcatgctatgaggctctggggcaggggagtcaagagcggaaggtcttcttgtctgtcttcgcggtccaattctgctctgacgttgactgacactgagcatgagaacaagtctgattctgaaaattag

SEQ ID NO: 36667 - protein, 1687 aa, Artificial Sequence
  derived and/or modified sequence
MELSCSEAPLYGQMMIYAKFDKNVYLPEDAEFYFTYDGSHQRHVMIAERIEDNVLQSSVPGHGLQETVTVSVCLCSEGYSPVTMGSGSVTYVDNMACRLARLLVTQANRLTACSHQTLLTPFALTAGALPALDEELVLALTHLELPLEWTVLGSSSLEVSSHRESLLHLAMRWGLAKLSQFFLCLPGGVQALALPNEEGATPLDLALREGHSKLVEDVTNFQGRWSPSFSRVQLSEEASLHYIHSSETLTLTLNHTAEHLLEADIKLFRKYFWDRAFLVKAFEPEARPEERTAMPSSGAETEEEIKNSVSSRSAAEKEDIKRVKSLVVQHNEHEDQHSLDLDRSFDILKKSKPPSTLLAAGRLSDMLNGGDEVYANCMVIDQVGDLDISYINIEGITATTSPESRGCTLWPQSSKHTLPTETSPSVYPLSENVEGTAHTEAQQSFMSPSSSCASNLNLSFGWHGFEKEQSHLKKRSSSLDALDADSEGEGHSEPSHICYTPGSQSSSRTGIPSGDELDSFETNTEPDFNISRAESLPLSSNLQSKESLLSGVRSRSYSCSSPKISLGKTRLVRELTVCSSSEEQRAYSLSEPPRENRIQEEEWDKYIIPAKSESEKYKVSRTFSFLMNRMTSPRNKSKTKSKDAKDKEKLNRHQFAPGTFSGVLQCLVCDKTLLGKESLQCSNCNANVHKGCKDAAPACTKKFQEKYNKNKPQTILGNSSFRDIPQPGLSLHPSSSVPVGLPTGRRETVGQVHPLSRSVPGTTLESFRRSATSLESESDHNSCRSRSHSDELLQSMGSSPSTESFIMEDVVDSSLWSDLSSDAQEFEAESWSLVVDPSFCNRQEKDVIKRQDVIFELMQTEMHHIQTLFIMSEIFRKGMKEELQLDHSTVDKIFPCLDELLEIHRHFFYSMKERRQESCAGSDRNFVIDRIGDILVQQFSEENASKMKKIYGEFCCHHKEAVNLFKELQQNKKFQNFIKLRNSNLLARRRGIPECILLVTQRITKYPVLVERILQYTKERTEEHKDLRKALCLIKDMIATVDLKVNEYEKNQKWLEILNKIENKTYTKLKNGHVFRKQALMSEERTLLYDGLVYWKTATGRFKDILALLLTDVLLFLQEKDQKYIFAAVDQKPSVISLQKLIAREVANEERGMFLISASSAGPEMYEIHTNSKEERNNWMRRIQQAVESCPEEKGGRTSESDEDKRKAEARVAKIQQCQEILTNQDQQICAYLEEKLHIYAELGELSGFEDVHLEPHLLIKPDPGEPPQAASLLAAALKEALVTGGREGRGCSDVDPGIQGVVTDLAVSDAGEKVECRNFPGSSQSEIIQAIQNLTRLLYSLQAALTIQDSHIEIHRLVLQQQEGLSLGHSILRGGPLQDQKSRDADRQHEELANVHQLQHQLQQEQRRWLRRCEQQQRAQATRESWLQERERECQSQEELLLRSRGELDLQLQEYQHSLERLREGQRLVEREQARMRAQQSLLGHWKHGRQRSLPAVLLPGGPEVMELNRSESLCHENSFFINEALVQMSFNTFNKLNPSVIHQDATYPTTQSHSDLVRTSEHQVDLKVDPSQPSNVSHKLWTAAGSGHQILPFHESSKDSCKNGSSMTKCSCTLTSPPGLWTGTTSTLKDLDTSHTESPTPHDSNSHRPQLQAFITEAKLNLPTRTMTRQDGETGDGAKENIVYL

SEQ ID NO: 36668 - protein, 1651 aa, Artificial Sequence
  derived and/or modified sequence
MELSCSEAPLYGQMMIYAKFDKNVYLPEDAEFYFTYDGSHQRHVMIAERIEDNVLQSSVPGHGLQETVTVSVCLCSEGYSPVTMGSGSVTYVDNMACRLARLLVTQANRLTACSHQTLLTPFALTAGALPALDEELVLALTHLELPLEWTVLGSSSLEVSSHRESLLHLAMRWGLAKLSQFFLCLPGGVQALALPNEEGATPLDLALREGHSKLVEDVTNFQGRWSPSFSRVQLSEEASLHYIHSSETLTLTLNHTAEHLLEADIKLFRKYFWDRAFLVKAFEPEARPEERTAMPSSGAETEEEIKNSVSSRSAAEKEDIKRVKSLVVQHNEHEDQHSLDLDRSFDILKKSKPPSTLLAAGRLSDMLNGGDEVYANCMVIDQVGDLDISYINIEGITATTSPESRGCTLWPQSSKHTLPTETSPSVYPLSENVEGTAHTEAQQSFMSPSSSCASNLNLSFGWHGFEKEQSHLKKRSSSLDALDADSEGEGHSEPSHICYTPGSQSSSRTGIPSGDELDSFETNTEPDFNISRAESLPLSSNLQSKESLLSGVRSRSYSCSSPKISLGKTRLVRELTVCSSSEEQRAYSLSEPPRENRIQEEEWDKYIIPAKSESEKYKVSRTFSFLMNRMTSPRNKSKTKSKDAKDKEKLNRHQFAPGTFSGVLQCLVCDKTLLGKESLQCSNCNANVHKGCKDAAPACTKKFQEKYNKNKPQTILGNSSFRDIPQPGLSLHPSSSVPVGLPTGRRETVGQVHPLSRSVPGTTLESFRRSATSLESESDHNSCRSRSHSDELLQSMGSSPSTESFIMEDVVDSSLWSDLSSDAQEFEAESWSLVVDPSFCNRQEKDVIKRQDVIFELMQTEMHHIQTLFIMSEIFRKGMKEELQLDHSTVDKIFPCLDELLEIHRHFFYSMKERRQESCAGSDRNFVIDRIGDILVQQFSEENASKMKKIYGEFCCHHKEAVNLFKELQQNKKFQNFIKLRNSNLLARRRGIPECILLVTQRITKYPVLVERILQYTKERTEEHKDLRKALCLIKDMIATVDLKVNEYEKNQKWLEILNKIENKTYTKLKNGHVFRKQALMSEERTLLYDGLVYWKTATGRFKDILALLLTDVLLFLQEKDQKYIFAAVDQKPSVISLQKLIAREVANEERGMFLISASSAGPEMYEIHTNSKEERNNWMRRIQQAVESCPEEKGGRTSESDEDKRKAEARVAKIQQCQEILTNQDQQICAYLEEKLHIYAELGELSGFEDVHLEPHLLIKPDPGEPPQAASLLAAALKEAESLQVAVKASQMGAVSQSCEDSCGDSVLADTLSSHDVPGSPTASLVTGGREGRGCSDVDPGIQGVVTDLAVSDAGEKVECRNFPGSSQSEIIQAIQNLTRLLYSLQAALTIQDSHIEIHRLVLQQQEGLSLGHSILRGGPLQDQKSRDADRQHEELANVHQLQHQLQQEQRRWLRRCEQQQRAQATRESWLQERERECQSQEELLLRSRGELDLQLQEYQHSLERLREGQRLVEREQARMRAQQSLLGHWKHGRQRSLPAVLLPGGPEVMELNRSESLCHENSFFINEALVQMSFNTFNKLNPSVIHQDATYPTTQSHSDLVRTSEHQVDLKVDPSQPSNVSHKLWTAAGSGHQILPFHESSKDSCKNGN

SEQ ID NO: 36669 - protein, 1731 aa, Artificial Sequence
  derived and/or modified sequence
MELSCSEAPLYGQMMIYAKFDKNVYLPEDAEFYFTYDGSHQRHVMIAERIEDNVLQSSVPGHGLQETVTVSVCLCSEGYSPVTMGSGSVTYVDNMACRLARLLVTQANRLTACSHQTLLTPFALTAGALPALDEELVLALTHLELPLEWTVLGSSSLEVSSHRESLLHLAMRWGLAKLSQFFLCLPGGVQALALPNEEGATPLDLALREGHSKLVEDVTNFQGRWSPSFSRVQLSEEASLHYIHSSETLTLTLNHTAEHLLEADIKLFRKYFWDRAFLVKAFEPEARPEERTAMPSSGAETEEEIKNSVSSRSAAEKEDIKRVKSLVVQHNEHEDQHSLDLDRSFDILKKSKPPSTLLAAGRLSDMLNGGDEVYANCMVIDQVGDLDISYINIEGITATTSPESRGCTLWPQSSKHTLPTETSPSVYPLSENVEGTAHTEAQQSFMSPSSSCASNLNLSFGWHGFEKEQSHLKKRSSSLDALDADSEGEGHSEPSHICYTPGSQSSSRTGIPSGDELDSFETNTEPDFNISRAESLPLSSNLQSKESLLSGVRSRSYSCSSPKISLGKTRLVRELTVCSSSEEQRAYSLSEPPRENRIQEEEWDKYIIPAKSESEKYKVSRTFSFLMNRMTSPRNKSKTKSKDAKDKEKLNRHQFAPGTFSGVLQCLVCDKTLLGKESLQCSNCNANVHKGCKDAAPACTKKFQEKYNKNKPQTILGNSSFRDIPQPGLSLHPSSSVPVGLPTGRRETVGQVHPLSRSVPGTTLESFRRSATSLESESDHNSCRSRSHSDELLQSMGSSPSTESFIMEDVVDSSLWSDLSSDAQEFEAESWSLVVDPSFCNRQEKDVIKRQDVIFELMQTEMHHIQTLFIMSEIFRKGMKEELQLDHSTVDKIFPCLDELLEIHRHFFYSMKERRQESCAGSDRNFVIDRIGDILVQQFSEENASKMKKIYGEFCCHHKEAVNLFKELQQNKKFQNFIKLRNSNLLARRRGIPECILLVTQRITKYPVLVERILQYTKERTEEHKDLRKALCLIKDMIATVDLKVNEYEKNQKWLEILNKIENKTYTKLKNGHVFRKQALMSEERTLLYDGLVYWKTATGRFKDILALLLTDVLLFLQEKDQKYIFAAVDQKPSVISLQKLIAREVANEERGMFLISASSAGPEMYEIHTNSKEERNNWMRRIQQAVESCPEEKGGRTSESDEDKRKAEARVAKIQQCQEILTNQDQQICAYLEEKLHIYAELGELSGFEDVHLEPHLLIKPDPGEPPQAASLLAAALKEAESLQVAVKASQMGAVSQSCEDSCGDSVLADTLSSHDVPGSPTASLVTGGREGRGCSDVDPGIQGVVTDLAVSDAGEKVECRNFPGSSQSEIIQAIQNLTRLLYSLQAALTIQDSHIEIHRLVLQQQEGLSLGHSILRGGPLQDQKSRDADRQHEELANVHQLQHQLQQEQRRWLRRCEQQQRAQATRESWLQERERECQSQEELLLRSRGELDLQLQEYQHSLERLREGQRLVEREQARMRAQQSLLGHWKHGRQRSLPAVLLPGGPEVMELNRSESLCHENSFFINEALVQMSFNTFNKLNPSVIHQDATYPTTQSHSDLVRTSEHQVDLKVDPSQPSNVSHKLWTAAGSGHQILPFHESSKDSCKNGSSMTKCSCTLTSPPGLWTGTTSTLKDLDTSHTESPTPHDSNSHRPQLQAFITEAKLNLPTRTMTRQDGETGDGAKENIVYL

SEQ ID NO: 36670 - DNA, 5064 bp, Artificial Sequence
  derived and/or modified sequence
atggagctgagctgcagcgaggcccccctgtacggccagatgatgatctacgccaagttcgacaagaacgtgtacctgcccgaggacgccgagttctacttcacctacgacggcagccaccagagacacgtgatgatcgccgagagaatcgaggacaacgtgctgcagagcagcgtgcccggccacggcctgcaggagaccgtgaccgtgagcgtgtgcctgtgcagcgagggctacagccccgtgaccatgggcagcggcagcgtgacctacgtggacaacatggcctgcagactggccagactgctggtgacccaggccaacagactgaccgcctgcagccaccagaccctgctgacccccttcgccctgaccgccggcgccctgcccgccctggacgaggagctggtgctggccctgacccacctggagctgcccctggagtggaccgtgctgggcagcagcagcctggaggtgagcagccacagagagagcctgctgcacctggccatgagatggggcctggccaagctgagccagttcttcctgtgcctgcccggcggcgtgcaggccctggccctgcccaacgaggagggcgccacccccctggacctggccctgagagagggccacagcaagctggtggaggacgtgaccaacttccagggcagatggagccccagcttcagcagagtgcagctgagcgaggaggccagcctgcactacatccacagcagcgagaccctgaccctgaccctgaaccacaccgccgagcacctgctggaggccgacatcaagctgttcagaaagtacttctgggacagagccttcctggtgaaggccttcgagcccgaggccagacccgaggagagaaccgccatgcccagcagcggcgccgagaccgaggaggagatcaagaacagcgtgagcagcagaagcgccgccgagaaggaggacatcaagagagtgaagagcctggtggtgcagcacaacgagcacgaggaccagcacagcctggacctggacagaagcttcgacatcctgaagaagagcaagccccccagcaccctgctggccgccggcagactgagcgacatgctgaacggcggcgacgaggtgtacgccaactgcatggtgatcgaccaggtgggcgacctggacatcagctacatcaacatcgagggcatcaccgccaccaccagccccgagagcagaggctgcaccctgtggccccagagcagcaagcacaccctgcccaccgagaccagccccagcgtgtaccccctgagcgagaacgtggagggcaccgcccacaccgaggcccagcagagcttcatgagccccagcagcagctgcgccagcaacctgaacctgagcttcggctggcacggcttcgagaaggagcagagccacctgaagaagagaagcagcagcctggacgccctggacgccgacagcgagggcgagggccacagcgagcccagccacatctgctacacccccggcagccagagcagcagcagaaccggcatccccagcggcgacgagctggacagcttcgagaccaacaccgagcccgacttcaacatcagcagagccgagagcctgcccctgagcagcaacctgcagagcaaggagagcctgctgagcggcgtgagaagcagaagctacagctgcagcagccccaagatcagcctgggcaagaccagactggtgagagagctgaccgtgtgcagcagcagcgaggagcagagagcctacagcctgagcgagccccccagagagaacagaatccaggaggaggagtgggacaagtacatcatccccgccaagagcgagagcgagaagtacaaggtgagcagaaccttcagcttcctgatgaacagaatgaccagccccagaaacaagagcaagaccaagagcaaggacgccaaggacaaggagaagctgaacagacaccagttcgcccccggcaccttcagcggcgtgctgcagtgcctggtgtgcgacaagaccctgctgggcaaggagagcctgcagtgcagcaactgcaacgccaacgtgcacaagggctgcaaggacgccgcccccgcctgcaccaagaagttccaggagaagtacaacaagaacaagccccagaccatcctgggcaacagcagcttcagagacatcccccagcccggcctgagcctgcaccccagcagcagcgtgcccgtgggcctgcccaccggcagaagagagaccgtgggccaggtgcaccccctgagcagaagcgtgcccggcaccaccctggagagcttcagaagaagcgccaccagcctggagagcgagagcgaccacaacagctgcagaagcagaagccacagcgacgagctgctgcagagcatgggcagcagccccagcaccgagagcttcatcatggaggacgtggtggacagcagcctgtggagcgacctgagcagcgacgcccaggagttcgaggccgagagctggagcctggtggtggaccccagcttctgcaacagacaggagaaggacgtgatcaagagacaggacgtgatcttcgagctgatgcagaccgagatgcaccacatccagaccctgttcatcatgagcgagatcttcagaaagggcatgaaggaggagctgcagctggaccacagcaccgtggacaagatcttcccctgcctggacgagctgctggagatccacagacacttcttctacagcatgaaggagagaagacaggagagctgcgccggcagcgacagaaacttcgtgatcgacagaatcggcgacatcctggtgcagcagttcagcgaggagaacgccagcaagatgaagaagatctacggcgagttctgctgccaccacaaggaggccgtgaacctgttcaaggagctgcagcagaacaagaagttccagaacttcatcaagctgagaaacagcaacctgctggccagaagaagaggcatccccgagtgcatcctgctggtgacccagagaatcaccaagtaccccgtgctggtggagagaatcctgcagtacaccaaggagagaaccgaggagcacaaggacctgagaaaggccctgtgcctgatcaaggacatgatcgccaccgtggacctgaaggtgaacgagtacgagaagaaccagaagtggctggagatcctgaacaagatcgagaacaagacctacaccaagctgaagaacggccacgtgttcagaaagcaggccctgatgagcgaggagagaaccctgctgtacgacggcctggtgtactggaagaccgccaccggcagattcaaggacatcctggccctgctgctgaccgacgtgctgctgttcctgcaggagaaggaccagaagtacatcttcgccgccgtggaccagaagcccagcgtgatcagcctgcagaagctgatcgccagagaggtggccaacgaggagagaggcatgttcctgatcagcgccagcagcgccggccccgagatgtacgagatccacaccaacagcaaggaggagagaaacaactggatgagaagaatccagcaggccgtggagagctgccccgaggagaagggcggcagaaccagcgagagcgacgaggacaagagaaaggccgaggccagagtggccaagatccagcagtgccaggagatcctgaccaaccaggaccagcagatctgcgcctacctggaggagaagctgcacatctacgccgagctgggcgagctgagcggcttcgaggacgtgcacctggagccccacctgctgatcaagcccgaccccggcgagcccccccaggccgccagcctgctggccgccgccctgaaggaggccctggtgaccggcggcagagagggcagaggctgcagcgacgtggaccccggcatccagggcgtggtgaccgacctggccgtgagcgacgccggcgagaaggtggagtgcagaaacttccccggcagcagccagagcgagatcatccaggccatccagaacctgaccagactgctgtacagcctgcaggccgccctgaccatccaggacagccacatcgagatccacagactggtgctgcagcagcaggagggcctgagcctgggccacagcatcctgagaggcggccccctgcaggaccagaagagcagagacgccgacagacagcacgaggagctggccaacgtgcaccagctgcagcaccagctgcagcaggagcagagaagatggctgagaagatgcgagcagcagcagagagcccaggccaccagagagagctggctgcaggagagagagagagagtgccagagccaggaggagctgctgctgagaagcagaggcgagctggacctgcagctgcaggagtaccagcacagcctggagagactgagagagggccagagactggtggagagagagcaggccagaatgagagcccagcagagcctgctgggccactggaagcacggcagacagagaagcctgcccgccgtgctgctgcccggcggccccgaggtgatggagctgaacagaagcgagagcctgtgccacgagaacagcttcttcatcaacgaggccctggtgcagatgagcttcaacaccttcaacaagctgaaccccagcgtgatccaccaggacgccacctaccccaccacccagagccacagcgacctggtgagaaccagcgagcaccaggtggacctgaaggtggaccccagccagcccagcaacgtgagccacaagctgtggaccgccgccggcagcggccaccagatcctgcccttccacgagagcagcaaggacagctgcaagaacggcagcagcatgaccaagtgcagctgcaccctgaccagcccccccggcctgtggaccggcaccaccagcaccctgaaggacctggacaccagccacaccgagagccccaccccccacgacagcaacagccacagaccccagctgcaggccttcatcaccgaggccaagctgaacctgcccaccagaaccatgaccagacaggacggcgagaccggcgacggcgccaaggagaacatcgtgtacctgtag

SEQ ID NO: 36671 - DNA, 4956 bp, Artificial Sequence
  derived and/or modified sequence
atggagctgagctgcagcgaggcccccctgtacggccagatgatgatctacgccaagttcgacaagaacgtgtacctgcccgaggacgccgagttctacttcacctacgacggcagccaccagagacacgtgatgatcgccgagagaatcgaggacaacgtgctgcagagcagcgtgcccggccacggcctgcaggagaccgtgaccgtgagcgtgtgcctgtgcagcgagggctacagccccgtgaccatgggcagcggcagcgtgacctacgtggacaacatggcctgcagactggccagactgctggtgacccaggccaacagactgaccgcctgcagccaccagaccctgctgacccccttcgccctgaccgccggcgccctgcccgccctggacgaggagctggtgctggccctgacccacctggagctgcccctggagtggaccgtgctgggcagcagcagcctggaggtgagcagccacagagagagcctgctgcacctggccatgagatggggcctggccaagctgagccagttcttcctgtgcctgcccggcggcgtgcaggccctggccctgcccaacgaggagggcgccacccccctggacctggccctgagagagggccacagcaagctggtggaggacgtgaccaacttccagggcagatggagccccagcttcagcagagtgcagctgagcgaggaggccagcctgcactacatccacagcagcgagaccctgaccctgaccctgaaccacaccgccgagcacctgctggaggccgacatcaagctgttcagaaagtacttctgggacagagccttcctggtgaaggccttcgagcccgaggccagacccgaggagagaaccgccatgcccagcagcggcgccgagaccgaggaggagatcaagaacagcgtgagcagcagaagcgccgccgagaaggaggacatcaagagagtgaagagcctggtggtgcagcacaacgagcacgaggaccagcacagcctggacctggacagaagcttcgacatcctgaagaagagcaagccccccagcaccctgctggccgccggcagactgagcgacatgctgaacggcggcgacgaggtgtacgccaactgcatggtgatcgaccaggtgggcgacctggacatcagctacatcaacatcgagggcatcaccgccaccaccagccccgagagcagaggctgcaccctgtggccccagagcagcaagcacaccctgcccaccgagaccagccccagcgtgtaccccctgagcgagaacgtggagggcaccgcccacaccgaggcccagcagagcttcatgagccccagcagcagctgcgccagcaacctgaacctgagcttcggctggcacggcttcgagaaggagcagagccacctgaagaagagaagcagcagcctggacgccctggacgccgacagcgagggcgagggccacagcgagcccagccacatctgctacacccccggcagccagagcagcagcagaaccggcatccccagcggcgacgagctggacagcttcgagaccaacaccgagcccgacttcaacatcagcagagccgagagcctgcccctgagcagcaacctgcagagcaaggagagcctgctgagcggcgtgagaagcagaagctacagctgcagcagccccaagatcagcctgggcaagaccagactggtgagagagctgaccgtgtgcagcagcagcgaggagcagagagcctacagcctgagcgagccccccagagagaacagaatccaggaggaggagtgggacaagtacatcatccccgccaagagcgagagcgagaagtacaaggtgagcagaaccttcagcttcctgatgaacagaatgaccagccccagaaacaagagcaagaccaagagcaaggacgccaaggacaaggagaagctgaacagacaccagttcgcccccggcaccttcagcggcgtgctgcagtgcctggtgtgcgacaagaccctgctgggcaaggagagcctgcagtgcagcaactgcaacgccaacgtgcacaagggctgcaaggacgccgcccccgcctgcaccaagaagttccaggagaagtacaacaagaacaagccccagaccatcctgggcaacagcagcttcagagacatcccccagcccggcctgagcctgcaccccagcagcagcgtgcccgtgggcctgcccaccggcagaagagagaccgtgggccaggtgcaccccctgagcagaagcgtgcccggcaccaccctggagagcttcagaagaagcgccaccagcctggagagcgagagcgaccacaacagctgcagaagcagaagccacagcgacgagctgctgcagagcatgggcagcagccccagcaccgagagcttcatcatggaggacgtggtggacagcagcctgtggagcgacctgagcagcgacgcccaggagttcgaggccgagagctggagcctggtggtggaccccagcttctgcaacagacaggagaaggacgtgatcaagagacaggacgtgatcttcgagctgatgcagaccgagatgcaccacatccagaccctgttcatcatgagcgagatcttcagaaagggcatgaaggaggagctgcagctggaccacagcaccgtggacaagatcttcccctgcctggacgagctgctggagatccacagacacttcttctacagcatgaaggagagaagacaggagagctgcgccggcagcgacagaaacttcgtgatcgacagaatcggcgacatcctggtgcagcagttcagcgaggagaacgccagcaagatgaagaagatctacggcgagttctgctgccaccacaaggaggccgtgaacctgttcaaggagctgcagcagaacaagaagttccagaacttcatcaagctgagaaacagcaacctgctggccagaagaagaggcatccccgagtgcatcctgctggtgacccagagaatcaccaagtaccccgtgctggtggagagaatcctgcagtacaccaaggagagaaccgaggagcacaaggacctgagaaaggccctgtgcctgatcaaggacatgatcgccaccgtggacctgaaggtgaacgagtacgagaagaaccagaagtggctggagatcctgaacaagatcgagaacaagacctacaccaagctgaagaacggccacgtgttcagaaagcaggccctgatgagcgaggagagaaccctgctgtacgacggcctggtgtactggaagaccgccaccggcagattcaaggacatcctggccctgctgctgaccgacgtgctgctgttcctgcaggagaaggaccagaagtacatcttcgccgccgtggaccagaagcccagcgtgatcagcctgcagaagctgatcgccagagaggtggccaacgaggagagaggcatgttcctgatcagcgccagcagcgccggccccgagatgtacgagatccacaccaacagcaaggaggagagaaacaactggatgagaagaatccagcaggccgtggagagctgccccgaggagaagggcggcagaaccagcgagagcgacgaggacaagagaaaggccgaggccagagtggccaagatccagcagtgccaggagatcctgaccaaccaggaccagcagatctgcgcctacctggaggagaagctgcacatctacgccgagctgggcgagctgagcggcttcgaggacgtgcacctggagccccacctgctgatcaagcccgaccccggcgagcccccccaggccgccagcctgctggccgccgccctgaaggaggccgagagcctgcaggtggccgtgaaggccagccagatgggcgccgtgagccagagctgcgaggacagctgcggcgacagcgtgctggccgacaccctgagcagccacgacgtgcccggcagccccaccgccagcctggtgaccggcggcagagagggcagaggctgcagcgacgtggaccccggcatccagggcgtggtgaccgacctggccgtgagcgacgccggcgagaaggtggagtgcagaaacttccccggcagcagccagagcgagatcatccaggccatccagaacctgaccagactgctgtacagcctgcaggccgccctgaccatccaggacagccacatcgagatccacagactggtgctgcagcagcaggagggcctgagcctgggccacagcatcctgagaggcggccccctgcaggaccagaagagcagagacgccgacagacagcacgaggagctggccaacgtgcaccagctgcagcaccagctgcagcaggagcagagaagatggctgagaagatgcgagcagcagcagagagcccaggccaccagagagagctggctgcaggagagagagagagagtgccagagccaggaggagctgctgctgagaagcagaggcgagctggacctgcagctgcaggagtaccagcacagcctggagagactgagagagggccagagactggtggagagagagcaggccagaatgagagcccagcagagcctgctgggccactggaagcacggcagacagagaagcctgcccgccgtgctgctgcccggcggccccgaggtgatggagctgaacagaagcgagagcctgtgccacgagaacagcttcttcatcaacgaggccctggtgcagatgagcttcaacaccttcaacaagctgaaccccagcgtgatccaccaggacgccacctaccccaccacccagagccacagcgacctggtgagaaccagcgagcaccaggtggacctgaaggtggaccccagccagcccagcaacgtgagccacaagctgtggaccgccgccggcagcggccaccagatcctgcccttccacgagagcagcaaggacagctgcaagaacggcaactag

SEQ ID NO: 36672 - DNA, 252 bp, Artificial Sequence
  derived and/or modified sequence
atggagctgagctgcagcgaggcccccctgtacggccagatgatgatctacgccaagttcgacaagaacgtgtacctgcccgaggacgccgagttctacttcacctacgacggcagccaccagagacacgtgatgatcgccgagagaatcgaggacaacgtgctgcagagcagcgtgcccggccacggcctgcaggagaccgtgaccgtgagcgtgtgcctgtgcagcgagggctacagccccgtgacctag

SEQ ID NO: 36673 - DNA, 5196 bp, Artificial Sequence
  derived and/or modified sequence
atggagctgagctgcagcgaggcccccctgtacggccagatgatgatctacgccaagttcgacaagaacgtgtacctgcccgaggacgccgagttctacttcacctacgacggcagccaccagagacacgtgatgatcgccgagagaatcgaggacaacgtgctgcagagcagcgtgcccggccacggcctgcaggagaccgtgaccgtgagcgtgtgcctgtgcagcgagggctacagccccgtgaccatgggcagcggcagcgtgacctacgtggacaacatggcctgcagactggccagactgctggtgacccaggccaacagactgaccgcctgcagccaccagaccctgctgacccccttcgccctgaccgccggcgccctgcccgccctggacgaggagctggtgctggccctgacccacctggagctgcccctggagtggaccgtgctgggcagcagcagcctggaggtgagcagccacagagagagcctgctgcacctggccatgagatggggcctggccaagctgagccagttcttcctgtgcctgcccggcggcgtgcaggccctggccctgcccaacgaggagggcgccacccccctggacctggccctgagagagggccacagcaagctggtggaggacgtgaccaacttccagggcagatggagccccagcttcagcagagtgcagctgagcgaggaggccagcctgcactacatccacagcagcgagaccctgaccctgaccctgaaccacaccgccgagcacctgctggaggccgacatcaagctgttcagaaagtacttctgggacagagccttcctggtgaaggccttcgagcccgaggccagacccgaggagagaaccgccatgcccagcagcggcgccgagaccgaggaggagatcaagaacagcgtgagcagcagaagcgccgccgagaaggaggacatcaagagagtgaagagcctggtggtgcagcacaacgagcacgaggaccagcacagcctggacctggacagaagcttcgacatcctgaagaagagcaagccccccagcaccctgctggccgccggcagactgagcgacatgctgaacggcggcgacgaggtgtacgccaactgcatggtgatcgaccaggtgggcgacctggacatcagctacatcaacatcgagggcatcaccgccaccaccagccccgagagcagaggctgcaccctgtggccccagagcagcaagcacaccctgcccaccgagaccagccccagcgtgtaccccctgagcgagaacgtggagggcaccgcccacaccgaggcccagcagagcttcatgagccccagcagcagctgcgccagcaacctgaacctgagcttcggctggcacggcttcgagaaggagcagagccacctgaagaagagaagcagcagcctggacgccctggacgccgacagcgagggcgagggccacagcgagcccagccacatctgctacacccccggcagccagagcagcagcagaaccggcatccccagcggcgacgagctggacagcttcgagaccaacaccgagcccgacttcaacatcagcagagccgagagcctgcccctgagcagcaacctgcagagcaaggagagcctgctgagcggcgtgagaagcagaagctacagctgcagcagccccaagatcagcctgggcaagaccagactggtgagagagctgaccgtgtgcagcagcagcgaggagcagagagcctacagcctgagcgagccccccagagagaacagaatccaggaggaggagtgggacaagtacatcatccccgccaagagcgagagcgagaagtacaaggtgagcagaaccttcagcttcctgatgaacagaatgaccagccccagaaacaagagcaagaccaagagcaaggacgccaaggacaaggagaagctgaacagacaccagttcgcccccggcaccttcagcggcgtgctgcagtgcctggtgtgcgacaagaccctgctgggcaaggagagcctgcagtgcagcaactgcaacgccaacgtgcacaagggctgcaaggacgccgcccccgcctgcaccaagaagttccaggagaagtacaacaagaacaagccccagaccatcctgggcaacagcagcttcagagacatcccccagcccggcctgagcctgcaccccagcagcagcgtgcccgtgggcctgcccaccggcagaagagagaccgtgggccaggtgcaccccctgagcagaagcgtgcccggcaccaccctggagagcttcagaagaagcgccaccagcctggagagcgagagcgaccacaacagctgcagaagcagaagccacagcgacgagctgctgcagagcatgggcagcagccccagcaccgagagcttcatcatggaggacgtggtggacagcagcctgtggagcgacctgagcagcgacgcccaggagttcgaggccgagagctggagcctggtggtggaccccagcttctgcaacagacaggagaaggacgtgatcaagagacaggacgtgatcttcgagctgatgcagaccgagatgcaccacatccagaccctgttcatcatgagcgagatcttcagaaagggcatgaaggaggagctgcagctggaccacagcaccgtggacaagatcttcccctgcctggacgagctgctggagatccacagacacttcttctacagcatgaaggagagaagacaggagagctgcgccggcagcgacagaaacttcgtgatcgacagaatcggcgacatcctggtgcagcagttcagcgaggagaacgccagcaagatgaagaagatctacggcgagttctgctgccaccacaaggaggccgtgaacctgttcaaggagctgcagcagaacaagaagttccagaacttcatcaagctgagaaacagcaacctgctggccagaagaagaggcatccccgagtgcatcctgctggtgacccagagaatcaccaagtaccccgtgctggtggagagaatcctgcagtacaccaaggagagaaccgaggagcacaaggacctgagaaaggccctgtgcctgatcaaggacatgatcgccaccgtggacctgaaggtgaacgagtacgagaagaaccagaagtggctggagatcctgaacaagatcgagaacaagacctacaccaagctgaagaacggccacgtgttcagaaagcaggccctgatgagcgaggagagaaccctgctgtacgacggcctggtgtactggaagaccgccaccggcagattcaaggacatcctggccctgctgctgaccgacgtgctgctgttcctgcaggagaaggaccagaagtacatcttcgccgccgtggaccagaagcccagcgtgatcagcctgcagaagctgatcgccagagaggtggccaacgaggagagaggcatgttcctgatcagcgccagcagcgccggccccgagatgtacgagatccacaccaacagcaaggaggagagaaacaactggatgagaagaatccagcaggccgtggagagctgccccgaggagaagggcggcagaaccagcgagagcgacgaggacaagagaaaggccgaggccagagtggccaagatccagcagtgccaggagatcctgaccaaccaggaccagcagatctgcgcctacctggaggagaagctgcacatctacgccgagctgggcgagctgagcggcttcgaggacgtgcacctggagccccacctgctgatcaagcccgaccccggcgagcccccccaggccgccagcctgctggccgccgccctgaaggaggccgagagcctgcaggtggccgtgaaggccagccagatgggcgccgtgagccagagctgcgaggacagctgcggcgacagcgtgctggccgacaccctgagcagccacgacgtgcccggcagccccaccgccagcctggtgaccggcggcagagagggcagaggctgcagcgacgtggaccccggcatccagggcgtggtgaccgacctggccgtgagcgacgccggcgagaaggtggagtgcagaaacttccccggcagcagccagagcgagatcatccaggccatccagaacctgaccagactgctgtacagcctgcaggccgccctgaccatccaggacagccacatcgagatccacagactggtgctgcagcagcaggagggcctgagcctgggccacagcatcctgagaggcggccccctgcaggaccagaagagcagagacgccgacagacagcacgaggagctggccaacgtgcaccagctgcagcaccagctgcagcaggagcagagaagatggctgagaagatgcgagcagcagcagagagcccaggccaccagagagagctggctgcaggagagagagagagagtgccagagccaggaggagctgctgctgagaagcagaggcgagctggacctgcagctgcaggagtaccagcacagcctggagagactgagagagggccagagactggtggagagagagcaggccagaatgagagcccagcagagcctgctgggccactggaagcacggcagacagagaagcctgcccgccgtgctgctgcccggcggccccgaggtgatggagctgaacagaagcgagagcctgtgccacgagaacagcttcttcatcaacgaggccctggtgcagatgagcttcaacaccttcaacaagctgaaccccagcgtgatccaccaggacgccacctaccccaccacccagagccacagcgacctggtgagaaccagcgagcaccaggtggacctgaaggtggaccccagccagcccagcaacgtgagccacaagctgtggaccgccgccggcagcggccaccagatcctgcccttccacgagagcagcaaggacagctgcaagaacggcagcagcatgaccaagtgcagctgcaccctgaccagcccccccggcctgtggaccggcaccaccagcaccctgaaggacctggacaccagccacaccgagagccccaccccccacgacagcaacagccacagaccccagctgcaggccttcatcaccgaggccaagctgaacctgcccaccagaaccatgaccagacaggacggcgagaccggcgacggcgccaaggagaacatcgtgtacctgtag

SEQ ID NO: 36674 - DNA, 5064 bp, Artificial Sequence
  derived and/or modified sequence
atggagctttcttgttctgaagcaccactgtacggccaaatgatgatctacgccaagttcgataagaatgtgtacctcccagaagacgctgagttctactttacctacgatgggtctcaccagaggcacgtgatgattgcggagagaatcgaagacaacgtccttcagtcctcggtgcctgggcacggactgcaagagacagtgacagtgtctgtctgtctttgctccgagggatattcgcctgtcaccatgggtagtggctcagtcacttacgtggacaatatggcgtgcagattagctaggctgctagtgacccaagctaaccggctgaccgcatgcagtcaccagactttactgacaccgttcgctctcacagctggggccctcccagctctcgatgaagagctcgtgctggctctgacccacctcgaactccctcttgagtggacagtacttggctcctctagtcttgaagtgagctcacatagggagagcttattgcaccttgcaatgcggtggggactggcaaaactgtctcagttcttcctgtgcctccctgggggagttcaagcattggccttgcccaacgaggaaggagccactccgcttgaccttgcattgcgcgaggggcatagtaaactggtagaggacgtgaccaactttcagggacgatggtcaccaagcttctccagagtgcaactctcagaggaggcatctttacactacattcactcgtccgaaacactgactctaacccttaatcatacagcagaacacctgctggaggctgacataaagctattccggaagtatttctgggatagagcattcttggtaaaggcctttgaaccggaggcccgccctgaggagaggacggccatgccatcttctggtgctgagacagaagaggagatcaaaaactctgtatccagccggtcggcagcagagaaggaagatataaaacgagtaaaatccctagtagtgcagcataatgagcatgaggaccagcactccctggatctagaccgatcattcgacattctgaaaaagtccaaacccccttctaccctgctcgcagctggccgactgtcggacatgctaaacggaggcgatgaggtctatgctaattgcatggtaatcgaccaagtcggagatctggacatctcctatattaatattgaaggtatcacagctacaacttcccctgagagtcgcgggtgcactctatggccccaatcaagcaaacatacattacccacagaaacctcaccctcagtttatcccctgtctgagaatgttgaaggcaccgcccacactgaagcacagcaatcgttcatgagtccttcatcctcgtgcgcgtctaacctgaacttgagttttggctggcatgggtttgagaaagaacaatctcacttaaaaaaacgctcttcatctcttgatgcgctcgatgcagactccgagggagaaggacattccgagcctagccacatctgttatacgcccggaagccagtcaagttccagaactggcattccatccggagatgaactggactcctttgaaacaaatacagagcccgattttaacatcagtagggcagaaagtctcccactttctagcaacctccaatctaaggaaagtctgctgagtggagtgcggtcccgctcctactcatgctctagtcccaagattagcttgggcaagacccggcttgtccgggagctgacagtctgtagctcttccgaagagcagagggcctactctctgtccgaaccaccgcgagaaaacagaatacaggaagaggagtgggataaatacattattcccgccaaatcggagtccgaaaaatacaaagtatcacggaccttctccttcctgatgaaccggatgactagtcctcggaacaaatctaagacgaagtctaaggacgccaaggacaaagagaaattgaataggcaccaatttgctcccgggacatttagcggagtgctccaatgcctggtttgcgacaagactctactcggcaaagagtcgttacagtgtagcaactgcaatgccaacgtccacaagggatgtaaagatgccgctccagcttgcactaagaagttccaagagaaatataacaaaaataagccccagactatcctcgggaattcctcattccgggacattccacagcctggcctatcgctccacccatcatcctctgttcctgtgggccttccaaccggccgccgagagactgtgggacaggtccaccctctgagcagaagcgtgcctgggactactttggagagcttccgtcgctctgcgacctctctcgagtccgagagtgaccacaacagctgccggagtaggtcgcactcagatgagctgcttcagtccatgggtagcagtcccagcacagagtcattcatcatggaggacgtggtcgactctagcttgtggtccgacctctcatccgacgcacaggaatttgaagccgaaagctggtccttggtggttgacccaagcttctgcaaccggcaggagaaggatgttattaaacgccaggacgtcattttcgaactgatgcagacagaaatgcatcatatccagactctgttcataatgagtgagattttccgtaagggcatgaaggaggaacttcaactggaccatagtaccgtagataagatctttccatgtcttgatgagctgctggagattcacagacactttttctattctatgaaagagagaaggcaagaatcgtgtgctggtagtgaccgaaatttcgtaatagaccggatcggggatattttagtgcagcagttttctgaggaaaacgcatccaaaatgaagaagatttacggcgaattttgctgccaccacaaggaggcagtcaacctattcaaggagctgcaacaaaataaaaagttccagaatttcatcaagttgcgtaattccaatttgctggcaagacgacgcggcattcctgaatgtattcttcttgtgacacagcggattacaaaatacccagtgcttgtggagaggattctgcagtataccaaagagcgtacggaggaacataaggacctgcggaaggcgctttgtttgatcaaggacatgattgccaccgtcgacctgaaggtcaatgagtacgaaaaaaatcagaagtggctggagattctgaataaaattgagaataagacatacacgaagctcaagaatggccacgtgttccgcaagcaggcgctgatgagtgaggaacggacactgctgtacgatggtctggtctactggaaaacggcaactgggagattcaaggacatacttgccctactgctcacggacgtgttgcttttcctgcaagaaaaggaccagaagtacatttttgctgcggtcgatcagaaaccgagcgtgattagcctgcaaaagctgattgcacgggaggtagccaatgaagagcgcgggatgttcctaatctcggcaagttctgcagggccagagatgtacgagattcacaccaacagcaaggaggaacgcaacaattggatgcggagaatccagcaggcagtggaatcttgtcctgaagaaaagggtggtaggacatccgagtcagacgaggataaaagaaaggccgaggcacgggtggccaagatccaacagtgtcaggagattctgacaaatcaagatcagcagatctgcgcctacctggaggaaaaactgcacatctatgccgaactaggggagcttagcgggtttgaagatgtacatctggagccccaccttctgatcaaacctgatcctggcgaaccaccccaagccgccagcctgttagctgccgctctcaaggaggctttagtcactggcggcagagaggggcgcggatgttcagacgttgaccccgggatccaaggagttgtgacagacctagccgtttccgatgcaggggaaaaagtcgagtgtagaaactttcccgggtcatcacagagcgagatcatccaggccatccaaaacctcacacgcttgttatactcgctgcaggcagccctgacaatccaggacagccacatagaaatccaccgcctggtgctccagcagcaggaagggctgagtttgggacactctattctacggggaggcccacttcaagaccagaaatcacgagatgccgatcgacagcatgaggaactggccaacgtccaccagcttcaacaccaactgcagcaagagcaacgaagatggcttcggaggtgcgaacaacagcagagagctcaggccacccgtgagtcttggttacaggaacgcgagcgcgaatgccagagccaggaagagttgttgttgaggtccagaggcgaactggatctccaactgcaagagtaccagcactcactggaacgcttgcgagagggccagaggctcgtagagagggaacaggccaggatgagggcgcaacaaagtcttcttggccattggaagcacggcaggcagaggtcactcccggctgtgctgctgcccggcggacccgaggtcatggagttgaatcgctcagaaagcctgtgtcacgaaaactcttttttcattaacgaggccctcgtgcagatgtctttcaataccttcaacaagctaaaccctagcgtgatacaccaagacgctacctaccccactactcagagtcatagtgatctggtcaggacctccgaacaccaggtggatctcaaagttgaccccagccagccttctaacgtctctcataagctctggacagccgccgggtcagggcaccagatcctcccgtttcacgaaagtagcaaagacagctgtaaaaatgggagctccatgaccaagtgctcctgtactctcacttctcccccaggcctttggacagggaccacatcaactttgaaggacttggacacttcgcacactgagagccctaccccgcatgacagtaactcccacagaccacaacttcaggccttcataactgaggctaaactgaacctgcccacacggactatgacacgacaggatggcgaaactggtgacggcgctaaggaaaacattgtgtatctctag

SEQ ID NO: 36675 - DNA, 4956 bp, Artificial Sequence
  derived and/or modified sequence
atggaactgtcatgttccgaagctccactttacgggcaaatgatgatatacgcaaagtttgacaaaaacgtgtacctgccggaagacgctgaattttatttcacgtatgacggttcccaccagcgccacgtgatgatagcagagcgtattgaagataatgtactgcagagctcagtccccgggcatggcttacaggagactgtgaccgtctctgtttgtttgtgttctgagggctatagtcccgtgacaatgggctcgggcagcgtaacctacgtcgacaatatggcctgtaggctggcgcggttgctggtgacacaagcgaaccggttgacggcgtgtagtcaccagacacttctcaccccattcgcactaactgccggagctttacctgcactggacgaagagctcgtcctggccctgactcatctcgaactgcctctggagtggacagtactgggctcttcatctctggaggtttcttcacacagagagtctctgctgcacctggctatgcggtggggcctggccaagctttctcaattctttctgtgtcttccagggggcgtccaggccctggctctgccaaatgaagagggagccacacctctggatttagcactaagggaaggacattccaagttggttgaggacgttaccaactttcaggggcgttggtcacctagcttttcacgcgtacagctctccgaggaagcgtccctgcactacatacatagttcagaaactctgacactgactcttaatcatactgcagaacacctcctcgaggccgacattaagctgttccggaaatacttttgggaccgtgcgtttctggtaaaggccttcgagcctgaagcccgcccggaggagagaactgcaatgccttcgtcaggggccgaaacagaggaggaaataaagaactcagtcagcagtaggagcgccgctgaaaaggaggacattaaacgagtgaaaagtctagtggttcagcataacgaacatgaggatcagcattctctggatctggatagaagctttgacatccttaaaaagagtaaacctcccagtaccctgctcgcggcagggcggctgagcgacatgctgaatggcggcgatgaggtttacgccaactgcatggtgatcgaccaggtaggggatttggatatcagttatatcaatatcgaagggatcaccgccacaacctcaccggaaagcaggggatgtactttgtggccccagtctagtaaacacacgctgcccaccgaaaccagcccctcagtgtacccactcagcgagaacgtggaagggacagcgcatactgaagcccaacagtcgtttatgagccccagttcaagttgcgccagcaacctgaacctcagttttgggtggcacgggtttgagaaggagcagagtcacctgaaaaagagaagcagctccttggacgccctggatgcagatagtgaaggggagggacactctgagcctagtcatatatgctatacccctggatctcagtcgtcctctcggaccggaataccttcaggcgatgaactcgattctttcgaaaccaataccgagcctgacttcaatatcagtcgcgccgagagtctgcccctctcatccaacttacaaagtaaagaaagtctgctttctggagtaagaagtcggtcctactcgtgtagctctcccaagatttccttgggcaagacaagattggtccgggagctcacagtgtgctcttccagtgaggagcagagggcttacagtctgtcagaacccccaagagagaaccggattcaggaggaagagtgggacaaatatattatcccagccaagagcgaatccgaaaagtataaggtgtctaggacgttttccttcctaatgaataggatgacatcacctcgaaacaagagtaagaccaagagcaaggatgctaaagacaaggagaagctcaaccgccaccagtttgcccctggaacattcagcggcgttctgcagtgtctcgtgtgcgacaaaactctgctcggcaaggaatcccttcagtgttcaaattgcaacgccaatgtgcataaaggctgcaaagatgctgcacctgcctgcacaaagaaattccaagagaaatacaataaaaataaaccccagaccattttaggcaactcatccttccgcgacatcccacagccagggctgagcctgcatccctcttcctctgttcctgtcggcctgcctacaggccggagggagacagtggggcaggtccatccactctcaagaagtgtgccgggaaccaccctagagagcttcaggaggagcgccacatccttggaaagtgaatccgaccacaattcatgtcgctcgcgctctcatagcgatgaactccttcagtccatggggtcaagtccctccaccgagtcctttatcatggaagatgttgtagatagttccctctggtctgacttgtcctcagacgcccaggagttcgaggctgagtcttggtctcttgtggtggacccttccttttgcaatcggcaggagaaagacgtgattaagcgccaggacgtgatctttgaactgatgcagaccgaaatgcatcacatccagactctgtttatcatgtccgagattttcagaaagggcatgaaggaagagctgcaactggaccactccaccgtcgataagatttttccttgcctcgacgaattgcttgagattcatcgccatttcttctatagtatgaaggaacgaaggcaggagtcctgtgctggaagcgataggaactttgtgatagatcgcataggggacatcttagttcagcagttttccgaagagaatgcttccaagatgaaaaaaatttatggggagttctgctgtcaccataaagaggctgtgaatctgtttaaggagctccagcaaaataagaagttccagaactttattaaattaaggaattctaatcttctcgcaaggcgacgcggaattcccgagtgtattctgttggtaacacagcggattacgaaataccccgtgctcgtggagcgcatactacagtacactaaggagaggactgaggaacacaaagatctaagaaaggcactctgtctgattaaggacatgattgccacggtggacttgaaggtgaatgagtacgagaagaatcagaaatggctggaaattctgaataagattgagaacaaaacctatactaagctgaagaatggtcacgttttccgcaagcaagcgctgatgtccgaggagagaaccttactttacgacggccttgtttactggaagaccgcaacaggaagatttaaagacattctcgcactgcttctaacagatgtcctgctgtttctgcaggagaaagatcagaagtacattttcgccgccgtcgatcaaaagcctagcgtgatttcactgcagaaactaattgcccgggaggtcgctaacgaagagaggggtatgtttctcatttcagcgagctcagccggccccgaaatgtacgaaatccacaccaattcaaaagaagagcgaaacaattggatgcgccgcatccagcaggccgtggagagttgccccgaagaaaaagggggtcgcacgagcgaatccgacgaagacaagaggaaggcagaggcacgtgtggcaaaaatccagcagtgtcaggagatcctcaccaatcaagaccagcagatctgtgcctacttggaggaaaaactgcacatatacgccgagttgggagaactttctggattcgaagatgtacacctggaaccacatttgctgattaagccagatccaggagagcccccacaggccgcctctctgttggcggcagcactcaaggaagcagagagcctccaagtcgcagtcaaagctagccagatgggagctgtttctcaaagttgcgaggactcatgcggcgactctgtcctcgcggacacactgtcttcgcatgacgtgccagggagtcccacggcttcgttggtgacagggggtcgcgaaggtcgtgggtgttccgatgtggatcccggtatccagggagtggttactgacctggctgtgagtgatgccggggaaaaggttgagtgccgtaatttccccggaagctcacagtccgaaattatccaggccatccagaatcttactaggttgttgtactcgcttcaagcagctctcactatccaagatagtcacatagagattcataggctcgtactgcaacaacaggagggattgtcactggggcactcgatcctgcgtggtggaccactgcaggaccagaagagtcgggacgccgatcggcagcatgaggagctagccaacgtccaccaacttcagcaccagctgcaacaggaacagcgcagatggctcaggcggtgtgaacagcagcagcgagcccaagccacccgggagtcatggctgcaagagagagagagagaatgccagtctcaggaggaactgttgctccggtctcggggtgagctcgaccttcaacttcaggagtatcagcatagcctggagcgcctacgcgagggtcagagactggtggaacgtgagcaggcgagaatgcgggctcagcagtctctcctcggccactggaagcacggaaggcaacgctccctcccggccgttttactgcccgggggaccagaggtcatggaactgaatcgctccgaaagcctttgccacgagaactccttcttcatcaacgaagccttggtccagatgtctttcaacacctttaataaactcaatccctcggttatccaccaggatgctacctacccaaccacccaatcccattccgatcttgtgagaacttcagaacaccaggtggatctgaaagtcgatccctcccagccttcaaacgtgtctcataaattatggacagctgctgggtcagggcaccaaatcctccccttccatgaaagttccaaggatagctgcaagaatggtaactag

SEQ ID NO: 36676 - DNA, 252 bp, Artificial Sequence
  derived and/or modified sequence
atggagctcagttgttccgaggctccactatatggacagatgatgatttatgctaaattcgataagaacgtgtacctcccagaagacgcggaattttacttcacttatgacggatcccaccaacgacacgttatgatagccgaacgcatagaagataacgtgcttcagtctagcgtaccaggccacggattacaggaaaccgtaacagtgtcagtctgtctgtgttcagaaggttacagcccggtaacctag

SEQ ID NO: 36677 - DNA, 5196 bp, Artificial Sequence
  derived and/or modified sequence
atggagctgagttgtagtgaagcccctctgtatggccagatgatgatctatgccaagtttgacaaaaacgtgtatctgccggaggacgccgaattctattttacatacgatggcagccaccagcgccatgtcatgattgcggaacgaatagaagacaatgtcctgcagtcttcagtaccaggtcatggtctacaggaaacggtgaccgtcagtgtctgtctgtgttctgaagggtattctccagtcactatgggctcggggagcgtcacgtacgtggataacatggcgtgtcgactcgcccgactcctcgtcacccaggcaaataggctcactgcgtgcagccatcagaccctgctgaccccattcgcactcactgccggcgctttgcctgctctggatgaggagcttgtgctagccctgactcatcttgagctgccattggaatggactgttctcggctctagctcactggaagttagtagccatcgagaaagcttgcttcaccttgccatgaggtggggccttgccaagctcagtcagttcttcttgtgccttccaggcggcgtccaggctctagcattgcccaacgaggagggggcgacccccctggacctggctctgcgcgaggggcattccaagcttgtggaagacgttactaatttccaggggcgatggagtccttcattctcacgtgtgcagttatcagaggaagcgagcctgcattacatccattcctctgaaactttaacactcactctgaaccacactgccgaacatcttctggaagctgatatcaaactttttcggaaatatttctgggatagggcatttttggtgaaggcttttgagcctgaagctcgtccagaggagcggaccgctatgccatcctctggcgctgagacagaggaggagattaaaaatagcgtttcttctcgctccgccgctgagaaagaggacataaagcgcgtgaaaagtctggtagtccagcacaacgaacatgaagaccagcactcactggatttggacaggagctttgacatcttgaagaaatctaaacccccgtcaactcttctggccgctggccgcctgtccgatatgttgaatgggggcgacgaggtgtatgctaactgtatggttatagatcaggtcggagaccttgacatcagctacattaacatcgaaggcattacagcgactaccagcccggagtccagaggctgtacactttggccacaaagctctaagcacactttacccaccgagacctcacccagcgtttacccactttctgagaacgtggaaggtaccgctcatactgaggcgcagcagagtttcatgtcgccaagctcaagttgcgcctccaacctgaacctgtcttttggctggcacggctttgagaaggagcagtcccatctcaagaaaaggtcaagcagcctcgatgccctagacgcagattcagagggagaaggacactccgagcccagccacatctgttacacacccggttcgcagtcatcgtcacggaccggcattccctccggcgatgagctggattcgtttgagacgaacacagagcccgacttcaacatttcccgtgccgaatctcttccactctctagtaacctgcagtctaaagagtcacttttatctggggtccggagtcggagttacagttgctcatccccgaaaatctctctgggtaagacgcggctcgtccgcgagctgactgtttgcagctcctctgaggagcagcgtgcctattctttgtccgaaccgccacgcgagaaccgaatccaagaggaggagtgggacaagtacatcattcctgccaaaagcgagagtgagaaatacaaagtcagtagaacattttcgttcttaatgaacaggatgaccagccccagaaataagagtaaaacaaagtccaaggacgccaaagacaaggaaaagttgaacaggcatcagttcgcacctgggactttcagcggggtcctgcagtgtctggtgtgtgataaaacactgctgggtaaagagtcactgcaatgtagcaattgcaacgcaaatgtacacaaggggtgcaaggatgcggctcccgcttgtaccaagaagtttcaggagaaatacaacaagaataaaccacagacaattctgggaaattcctcctttagagacattccacaacctggacttagtctgcatccgtcttccagcgttccagtgggtttgcccaccggaaggcgagaaacagtggggcaagtgcatcctctgtcacggtccgtgccaggtactacgctggaatcattccgcaggtcagccacatctctggaatctgaatctgaccataacagctgtcggtcgcgcagccacagcgacgaactcttacaatctatgggttcctccccgtcaacagagtcatttattatggaggacgtcgttgactcttctctctggtccgacttgtcaagtgacgcccaggaattcgaagctgaatcttggagcctggttgttgacccttccttttgtaatcggcaggagaaagacgtgatcaagcggcaggatgtgattttcgaacttatgcagaccgagatgcaccacatccagaccctcttcattatgtcggaaatcttccgcaaaggcatgaaggaggaattgcagttagatcacagcaccgtggataagatcttcccctgtctggacgaacttctcgagatacaccgccatttcttttattccatgaaagagaggcggcaggagtcttgtgcgggttcagacaggaattttgtcatcgacagaattggggacatattggttcaacagtttagcgaagagaacgcgagcaagatgaagaaaatatatggtgaattctgttgccaccataaagaagcagtgaatctgttcaaagaactgcagcaaaacaaaaagttccagaattttataaaattacgtaattccaatctcctggcccgcaggaggggaatccctgagtgcatcttgttagtgacccaacgcattacaaagtatcctgtgctcgtagagcgaatattgcagtacactaaagagcgtaccgaggaacacaaagatctgaggaaagccctttgcctgattaaagatatgatcgcgactgtggatctcaaggtcaacgaatatgaaaagaaccagaagtggctagagattctgaataaaatcgagaataagacgtacactaaacttaagaatggacatgttttccggaaacaggcgttgatgagcgaagaacggactctgttgtacgacggactcgtgtattggaagactgctacaggtcgctttaaggatattcttgcattattgctgacagacgttctcctattcttacaggagaaagatcaaaaatacatctttgccgcagtcgaccagaaaccgtctgtgatttcactgcagaaactgattgctagagaagtggccaatgaggagcgcgggatgttcctcatctcggcttcctccgctgggccagaaatgtacgagatccacactaattcaaaagaggaacggaataattggatgcggaggatacaacaggccgtcgagtcttgccccgaggagaaggggggacgtacttctgaaagtgatgaagacaagcggaaggctgaggctagggtcgcgaagatccagcagtgccaagaaatcttgactaaccaggaccagcagatatgcgcttacctcgaagagaagctgcatatctacgctgaactaggcgagctctcggggtttgaagatgtacaccttgagcctcatctgttaatcaagccagaccccggtgagcctcctcaagctgcatccctgcttgcagccgcactaaaggaagcggagagccttcaggtggccgtgaaggcgtcacagatgggcgccgtgtcacagtcctgtgaggatagctgtggcgacagtgtgctagccgacactctcagctcgcacgatgtgccggggagtcctactgcaagcctggtcacaggcggacgcgagggaagggggtgctccgatgtagacccagggatccagggtgtcgtcacagatttagccgtttctgacgcaggggagaaggtggagtgtaggaacttccccggcagttcccagtcagaaattatccaggccattcaaaacctgactagactcctctacagtcttcaggccgctcttacaatccaggactcccatatagaaatccaccgcttggtgctgcagcagcaggaaggactgtctctgggccacagtattctgcggggtggacccctgcaggatcagaagagcagggacgctgatcgccagcacgaagaactcgctaacgtgcatcagctacagcaccagcttcaacaggaacagcgccgctggcttcgccgttgcgagcaacaacagcgtgcccaagccacccgcgaatcatggctgcaggagagggagcgagaatgtcagagtcaggaagagcttctgctccgcagcaggggcgagttggacctgcaactccaagagtatcagcattccctggagcgacttagggaggggcaacggctggtagaacgggagcaggctcggatgcgggcgcagcaatctctcctggggcactggaagcatggccggcagcgctccctgccggccgtcctcctgcctggagggcctgaggtcatggagctaaatcgatccgaatcattatgccacgaaaattcattcttcatcaatgaggcgcttgtgcagatgtcttttaacacctttaataagctgaaccccagcgtcatccaccaggacgcaacctaccccaccactcaatcacacagcgacctggtccgtacaagtgaacaccaggtggatctgaaagtggacccttcacagccatctaacgttagccataaactatggacagccgcagggagcgggcatcagatactcccatttcacgagagtagcaaggactcctgtaagaacggaagctcgatgaccaaatgttcctgtacattgacgagtcctccaggcctatggacgggaactactagcactctgaaagacctcgatacttctcacacagagagccccaccccacacgattcgaatagccacaggcctcagctgcaagcatttatcacggaagccaaactcaatctaccgaccaggaccatgactcgacaagacggagagactggagatggtgcaaaggagaacattgtttatctgtag

SEQ ID NO: 36678 - DNA, 5064 bp, Artificial Sequence
  derived and/or modified sequence
atggagctgagctgcagcgaggcccccctgtatggccagatgatgatctatgccaagtttgacaagaatgtgtacctgcctgaagatgctgagttctacttcacctatgatggcagccaccagagacatgtgatgattgctgagagaattgaagataatgtgctgcagagctctgtgcccggccacggcctgcaggagaccgtgacagtgtctgtgtgcctgtgcagcgagggctacagccctgtgaccatgggcagcggctctgtgacctacgtggacaacatggcctgccgcctggcccggctgctggtgacccaggccaaccggctgacagcctgcagccaccagaccctgctgaccccatttgccctgacagctggggccctgcctgccctggatgaggagctggtgctggccctgacccacctggagctgcccctggagtggacagtgctgggcagcagcagcctggaggtgagcagccaccgggagagcctgctgcacctggccatgcgctggggcctggccaagctgagccagttcttcctgtgcctgcccggcggcgtgcaggccctggccctgcccaatgaggagggcgccacccccctggacctggccctgcgggagggccacagcaagctggtggaggatgtgaccaacttccagggccgctggagccccagcttcagccgggtgcagctgtctgaggaggccagcctgcactacatccacagcagcgagaccctgaccctgaccctgaaccacacagctgagcacctgctggaggccgacatcaagctgttcaggaagtacttctgggaccgggccttcctggtgaaggcctttgagcctgaggcccggcctgaggagaggacagccatgcccagcagtggagctgagacagaggaggagatcaagaacagcgtgagcagccgctctgctgctgagaaggaggacatcaagagggtgaagagcctggtggtgcagcacaatgaacatgaggaccagcacagcctggacctggacaggagctttgacatcctgaagaagagcaagccacccagcaccctgctggccgccggccgcctgagtgacatgctgaatggaggagatgaggtgtatgccaactgcatggtgattgaccaggtgggggacctggacatctcctacatcaacatcgagggcatcacagccaccaccagccctgagagccggggctgcaccctgtggccccagagcagcaagcacaccctgcccacagagaccagccccagcgtgtaccccctgtctgaaaatgtggagggcacagcccacacagaggcccagcagagcttcatgagccccagcagcagctgtgccagcaacctgaacctgagctttggctggcacggctttgagaaggagcagagccacctgaagaagaggagcagcagcctggatgccctggatgctgacagcgagggggagggccacagcgagcccagccacatctgctacaccccaggcagccagagcagcagcaggacaggcatccccagcggagatgagctggacagctttgagaccaacacagagccagacttcaacatcagcagagctgagagcctgcccctgagcagcaacctgcagagcaaggagagcctgctgagcggcgtgcgcagccgcagctacagctgcagcagccccaagatcagcctgggcaagacccggctggtgcgggagctgactgtgtgcagcagcagcgaggagcagagggcctacagcctgtctgagcccccaagagaaaatcgcatccaggaggaggagtgggacaagtacatcatcccagccaagtctgagagcgagaagtacaaggtgtccaggaccttctccttcctgatgaacaggatgaccagccccaggaacaagagcaagaccaagagcaaggatgccaaggacaaggagaagctgaacagacaccagtttgcccctggcaccttctctggagtgctgcagtgcctggtgtgtgacaagaccctgctgggcaaggagagcctgcagtgcagcaactgcaatgccaacgtgcacaagggctgcaaggatgctgccccagcctgcaccaagaagttccaggagaagtacaacaagaacaagccccagaccatcctgggcaacagcagcttccgggacatcccccagcccggcctgagcctgcaccccagcagctctgtgcctgtgggcctgcccactggaagaagagagaccgtgggccaggtgcaccccctgagccgctctgtgcccggcaccaccctggagagcttccgccgcagcgccaccagcctggagagcgagagtgaccacaacagctgccgcagccgcagccacagtgatgagctgctgcagagcatgggcagcagccccagcacagagagcttcatcatggaggatgtggtggacagcagcctgtggagcgacctgagcagtgatgcccaggagtttgaggccgagagctggagcctggtggtggaccccagcttctgcaaccggcaggagaaggatgtgatcaagaggcaggacgtcatctttgagctgatgcagacagagatgcaccacatccagaccctcttcatcatgtctgagatcttcaggaagggcatgaaggaggagctgcagctggaccacagcacagtggacaagatcttcccctgcctggatgagctgctggagatccaccgccacttcttctacagcatgaaggagcggcggcaggagagctgtgccggcagtgacaggaacttcgtcatcgacagaattggagacatcctggtgcagcagttcagcgaggagaatgccagcaagatgaagaagatctatggagagttctgctgccaccacaaggaggccgtgaacctcttcaaggagctgcagcagaacaagaagttccagaacttcatcaagctgaggaacagcaacctgctggccaggagaagaggcatccctgagtgcatcctgctggtgacccagaggatcaccaagtaccctgtgctggtggagcgcatcctgcagtacaccaaggagaggacagaggagcacaaggacctgaggaaggccctgtgcctgatcaaggacatgattgccaccgtggacctgaaggtgaatgaatatgagaagaaccagaagtggctggagatcctgaacaagattgagaacaagacctacaccaagctgaagaatggacatgtgttcaggaagcaggccctgatgtctgaggagaggaccctgctgtatgatggcctggtgtactggaagacagccaccggccgcttcaaggacatcctggccctgctgctgacagatgtgctgctcttcctgcaggagaaggaccagaagtacatctttgctgctgtggaccagaagcccagcgtcatcagcctgcagaagctgattgcccgggaggtggccaatgaggagcggggcatgttcctgatcagcgccagcagcgctggccctgagatgtatgagatccacaccaacagcaaggaggagaggaacaactggatgaggcgcatccagcaggccgtggagagctgcccagaggagaagggcggccgcaccagcgagagtgatgaggacaagaggaaggccgaggcccgggtggccaagatccagcagtgccaggagatcctgaccaaccaggaccagcagatctgtgcctacctggaggagaagctgcacatctatgcagagctgggggagctgagcggctttgaagatgtgcacctggagccccacctgctgatcaagccagaccccggggagcccccccaggccgccagcctgctggccgccgccctgaaggaggccctggtgactggaggccgggagggccggggctgcagtgatgtggaccccggcatccagggcgtggtgacagacctggccgtgtctgatgctggggagaaggtggagtgcaggaacttccctggcagcagccagagcgagatcatccaggccatccagaacctgacccggctgctgtacagcctgcaggccgccctgaccatccaggacagccacatcgagatccaccggctggtgctgcagcagcaggagggcctgagcctgggccacagcatcctgcggggcggccccctgcaggaccagaagagcagagatgctgaccggcagcacgaggagctggccaacgtgcaccagctgcagcaccagctgcagcaggagcagaggcgctggctgcggcgctgtgagcagcagcagagggcccaggccacccgggagagctggctgcaggagcgggagcgggagtgccagagccaggaggagctgctgctgcggagcagaggagagctggacctgcagctgcaggagtaccagcacagcctggagcggctgcgggagggccagaggctggtggagcgggagcaggccaggatgagggcccagcagagcctgctgggccactggaagcacggccggcagaggagcctgcctgctgtgctgctgcccggcggccctgaggtgatggagctgaacagaagtgagagcctgtgccacgagaacagcttcttcatcaatgaggccctggtgcagatgtccttcaacaccttcaacaagctgaaccccagcgtcatccaccaggatgccacctaccccaccacccagagccacagcgacctggtgaggaccagcgagcaccaggtggacctgaaggtggaccccagccagcccagcaatgtgagccacaagctgtggacagctgctggcagcggccaccagatcctgcccttccacgagagcagcaaggacagctgcaagaatggcagctccatgaccaagtgcagctgcaccctgaccagccccccaggcctgtggacaggcaccaccagcaccctgaaggacctggacaccagccacacagagagccccacccctcatgacagcaacagccaccggccccagctgcaggccttcatcacagaggccaagctgaacctgcccaccaggaccatgacccggcaggatggagaaacaggagatggagccaaggagaacatcgtgtacctgtag

SEQ ID NO: 36679 - DNA, 4956 bp, Artificial Sequence
  derived and/or modified sequence
atggagctgagctgcagcgaggcccccctgtatggccagatgatgatctatgccaagtttgacaagaatgtgtacctgcctgaagatgctgagttctacttcacctatgatggcagccaccagagacatgtgatgattgctgagagaattgaagataatgtgctgcagagctctgtgcccggccacggcctgcaggagaccgtgacagtgtctgtgtgcctgtgcagcgagggctacagccctgtgaccatgggcagcggctctgtgacctacgtggacaacatggcctgccgcctggcccggctgctggtgacccaggccaaccggctgacagcctgcagccaccagaccctgctgaccccatttgccctgacagctggggccctgcctgccctggatgaggagctggtgctggccctgacccacctggagctgcccctggagtggacagtgctgggcagcagcagcctggaggtgagcagccaccgggagagcctgctgcacctggccatgcgctggggcctggccaagctgagccagttcttcctgtgcctgcccggcggcgtgcaggccctggccctgcccaatgaggagggcgccacccccctggacctggccctgcgggagggccacagcaagctggtggaggatgtgaccaacttccagggccgctggagccccagcttcagccgggtgcagctgtctgaggaggccagcctgcactacatccacagcagcgagaccctgaccctgaccctgaaccacacagctgagcacctgctggaggccgacatcaagctgttcaggaagtacttctgggaccgggccttcctggtgaaggcctttgagcctgaggcccggcctgaggagaggacagccatgcccagcagtggagctgagacagaggaggagatcaagaacagcgtgagcagccgctctgctgctgagaaggaggacatcaagagggtgaagagcctggtggtgcagcacaatgaacatgaggaccagcacagcctggacctggacaggagctttgacatcctgaagaagagcaagccacccagcaccctgctggccgccggccgcctgagtgacatgctgaatggaggagatgaggtgtatgccaactgcatggtgattgaccaggtgggggacctggacatctcctacatcaacatcgagggcatcacagccaccaccagccctgagagccggggctgcaccctgtggccccagagcagcaagcacaccctgcccacagagaccagccccagcgtgtaccccctgtctgaaaatgtggagggcacagcccacacagaggcccagcagagcttcatgagccccagcagcagctgtgccagcaacctgaacctgagctttggctggcacggctttgagaaggagcagagccacctgaagaagaggagcagcagcctggatgccctggatgctgacagcgagggggagggccacagcgagcccagccacatctgctacaccccaggcagccagagcagcagcaggacaggcatccccagcggagatgagctggacagctttgagaccaacacagagccagacttcaacatcagcagagctgagagcctgcccctgagcagcaacctgcagagcaaggagagcctgctgagcggcgtgcgcagccgcagctacagctgcagcagccccaagatcagcctgggcaagacccggctggtgcgggagctgactgtgtgcagcagcagcgaggagcagagggcctacagcctgtctgagcccccaagagaaaatcgcatccaggaggaggagtgggacaagtacatcatcccagccaagtctgagagcgagaagtacaaggtgtccaggaccttctccttcctgatgaacaggatgaccagccccaggaacaagagcaagaccaagagcaaggatgccaaggacaaggagaagctgaacagacaccagtttgcccctggcaccttctctggagtgctgcagtgcctggtgtgtgacaagaccctgctgggcaaggagagcctgcagtgcagcaactgcaatgccaacgtgcacaagggctgcaaggatgctgccccagcctgcaccaagaagttccaggagaagtacaacaagaacaagccccagaccatcctgggcaacagcagcttccgggacatcccccagcccggcctgagcctgcaccccagcagctctgtgcctgtgggcctgcccactggaagaagagagaccgtgggccaggtgcaccccctgagccgctctgtgcccggcaccaccctggagagcttccgccgcagcgccaccagcctggagagcgagagtgaccacaacagctgccgcagccgcagccacagtgatgagctgctgcagagcatgggcagcagccccagcacagagagcttcatcatggaggatgtggtggacagcagcctgtggagcgacctgagcagtgatgcccaggagtttgaggccgagagctggagcctggtggtggaccccagcttctgcaaccggcaggagaaggatgtgatcaagaggcaggacgtcatctttgagctgatgcagacagagatgcaccacatccagaccctcttcatcatgtctgagatcttcaggaagggcatgaaggaggagctgcagctggaccacagcacagtggacaagatcttcccctgcctggatgagctgctggagatccaccgccacttcttctacagcatgaaggagcggcggcaggagagctgtgccggcagtgacaggaacttcgtcatcgacagaattggagacatcctggtgcagcagttcagcgaggagaatgccagcaagatgaagaagatctatggagagttctgctgccaccacaaggaggccgtgaacctcttcaaggagctgcagcagaacaagaagttccagaacttcatcaagctgaggaacagcaacctgctggccaggagaagaggcatccctgagtgcatcctgctggtgacccagaggatcaccaagtaccctgtgctggtggagcgcatcctgcagtacaccaaggagaggacagaggagcacaaggacctgaggaaggccctgtgcctgatcaaggacatgattgccaccgtggacctgaaggtgaatgaatatgagaagaaccagaagtggctggagatcctgaacaagattgagaacaagacctacaccaagctgaagaatggacatgtgttcaggaagcaggccctgatgtctgaggagaggaccctgctgtatgatggcctggtgtactggaagacagccaccggccgcttcaaggacatcctggccctgctgctgacagatgtgctgctcttcctgcaggagaaggaccagaagtacatctttgctgctgtggaccagaagcccagcgtcatcagcctgcagaagctgattgcccgggaggtggccaatgaggagcggggcatgttcctgatcagcgccagcagcgctggccctgagatgtatgagatccacaccaacagcaaggaggagaggaacaactggatgaggcgcatccagcaggccgtggagagctgcccagaggagaagggcggccgcaccagcgagagtgatgaggacaagaggaaggccgaggcccgggtggccaagatccagcagtgccaggagatcctgaccaaccaggaccagcagatctgtgcctacctggaggagaagctgcacatctatgcagagctgggggagctgagcggctttgaagatgtgcacctggagccccacctgctgatcaagccagaccccggggagcccccccaggccgccagcctgctggccgccgccctgaaggaggccgagagcctgcaggtggccgtgaaggccagccagatgggcgctgtgtcccagagctgtgaggacagctgtggggacagcgtgctggccgacaccctgagcagccatgatgtgcccggcagccccacagccagcctggtgactggaggccgggagggccggggctgcagtgatgtggaccccggcatccagggcgtggtgacagacctggccgtgtctgatgctggggagaaggtggagtgcaggaacttccctggcagcagccagagcgagatcatccaggccatccagaacctgacccggctgctgtacagcctgcaggccgccctgaccatccaggacagccacatcgagatccaccggctggtgctgcagcagcaggagggcctgagcctgggccacagcatcctgcggggcggccccctgcaggaccagaagagcagagatgctgaccggcagcacgaggagctggccaacgtgcaccagctgcagcaccagctgcagcaggagcagaggcgctggctgcggcgctgtgagcagcagcagagggcccaggccacccgggagagctggctgcaggagcgggagcgggagtgccagagccaggaggagctgctgctgcggagcagaggagagctggacctgcagctgcaggagtaccagcacagcctggagcggctgcgggagggccagaggctggtggagcgggagcaggccaggatgagggcccagcagagcctgctgggccactggaagcacggccggcagaggagcctgcctgctgtgctgctgcccggcggccctgaggtgatggagctgaacagaagtgagagcctgtgccacgagaacagcttcttcatcaatgaggccctggtgcagatgtccttcaacaccttcaacaagctgaaccccagcgtcatccaccaggatgccacctaccccaccacccagagccacagcgacctggtgaggaccagcgagcaccaggtggacctgaaggtggaccccagccagcccagcaatgtgagccacaagctgtggacagctgctggcagcggccaccagatcctgcccttccacgagagcagcaaggacagctgcaagaatggaaattag

SEQ ID NO: 36680 - DNA, 252 bp, Artificial Sequence
  derived and/or modified sequence
atggagctgagctgcagcgaggcccccctgtatggccagatgatgatctatgccaagtttgacaagaatgtgtacctgcctgaagatgctgagttctacttcacctatgatggcagccaccagagacatgtgatgattgctgagagaattgaagataatgtgctgcagagctctgtgcccggccacggcctgcaggagaccgtgacagtgtctgtgtgcctgtgcagcgagggctacagccctgtgacctag

SEQ ID NO: 36681 - DNA, 5196 bp, Artificial Sequence
  derived and/or modified sequence
atggagctgagctgcagcgaggcccccctgtatggccagatgatgatctatgccaagtttgacaagaatgtgtacctgcctgaagatgctgagttctacttcacctatgatggcagccaccagagacatgtgatgattgctgagagaattgaagataatgtgctgcagagctctgtgcccggccacggcctgcaggagaccgtgacagtgtctgtgtgcctgtgcagcgagggctacagccctgtgaccatgggcagcggctctgtgacctacgtggacaacatggcctgccgcctggcccggctgctggtgacccaggccaaccggctgacagcctgcagccaccagaccctgctgaccccatttgccctgacagctggggccctgcctgccctggatgaggagctggtgctggccctgacccacctggagctgcccctggagtggacagtgctgggcagcagcagcctggaggtgagcagccaccgggagagcctgctgcacctggccatgcgctggggcctggccaagctgagccagttcttcctgtgcctgcccggcggcgtgcaggccctggccctgcccaatgaggagggcgccacccccctggacctggccctgcgggagggccacagcaagctggtggaggatgtgaccaacttccagggccgctggagccccagcttcagccgggtgcagctgtctgaggaggccagcctgcactacatccacagcagcgagaccctgaccctgaccctgaaccacacagctgagcacctgctggaggccgacatcaagctgttcaggaagtacttctgggaccgggccttcctggtgaaggcctttgagcctgaggcccggcctgaggagaggacagccatgcccagcagtggagctgagacagaggaggagatcaagaacagcgtgagcagccgctctgctgctgagaaggaggacatcaagagggtgaagagcctggtggtgcagcacaatgaacatgaggaccagcacagcctggacctggacaggagctttgacatcctgaagaagagcaagccacccagcaccctgctggccgccggccgcctgagtgacatgctgaatggaggagatgaggtgtatgccaactgcatggtgattgaccaggtgggggacctggacatctcctacatcaacatcgagggcatcacagccaccaccagccctgagagccggggctgcaccctgtggccccagagcagcaagcacaccctgcccacagagaccagccccagcgtgtaccccctgtctgaaaatgtggagggcacagcccacacagaggcccagcagagcttcatgagccccagcagcagctgtgccagcaacctgaacctgagctttggctggcacggctttgagaaggagcagagccacctgaagaagaggagcagcagcctggatgccctggatgctgacagcgagggggagggccacagcgagcccagccacatctgctacaccccaggcagccagagcagcagcaggacaggcatccccagcggagatgagctggacagctttgagaccaacacagagccagacttcaacatcagcagagctgagagcctgcccctgagcagcaacctgcagagcaaggagagcctgctgagcggcgtgcgcagccgcagctacagctgcagcagccccaagatcagcctgggcaagacccggctggtgcgggagctgactgtgtgcagcagcagcgaggagcagagggcctacagcctgtctgagcccccaagagaaaatcgcatccaggaggaggagtgggacaagtacatcatcccagccaagtctgagagcgagaagtacaaggtgtccaggaccttctccttcctgatgaacaggatgaccagccccaggaacaagagcaagaccaagagcaaggatgccaaggacaaggagaagctgaacagacaccagtttgcccctggcaccttctctggagtgctgcagtgcctggtgtgtgacaagaccctgctgggcaaggagagcctgcagtgcagcaactgcaatgccaacgtgcacaagggctgcaaggatgctgccccagcctgcaccaagaagttccaggagaagtacaacaagaacaagccccagaccatcctgggcaacagcagcttccgggacatcccccagcccggcctgagcctgcaccccagcagctctgtgcctgtgggcctgcccactggaagaagagagaccgtgggccaggtgcaccccctgagccgctctgtgcccggcaccaccctggagagcttccgccgcagcgccaccagcctggagagcgagagtgaccacaacagctgccgcagccgcagccacagtgatgagctgctgcagagcatgggcagcagccccagcacagagagcttcatcatggaggatgtggtggacagcagcctgtggagcgacctgagcagtgatgcccaggagtttgaggccgagagctggagcctggtggtggaccccagcttctgcaaccggcaggagaaggatgtgatcaagaggcaggacgtcatctttgagctgatgcagacagagatgcaccacatccagaccctcttcatcatgtctgagatcttcaggaagggcatgaaggaggagctgcagctggaccacagcacagtggacaagatcttcccctgcctggatgagctgctggagatccaccgccacttcttctacagcatgaaggagcggcggcaggagagctgtgccggcagtgacaggaacttcgtcatcgacagaattggagacatcctggtgcagcagttcagcgaggagaatgccagcaagatgaagaagatctatggagagttctgctgccaccacaaggaggccgtgaacctcttcaaggagctgcagcagaacaagaagttccagaacttcatcaagctgaggaacagcaacctgctggccaggagaagaggcatccctgagtgcatcctgctggtgacccagaggatcaccaagtaccctgtgctggtggagcgcatcctgcagtacaccaaggagaggacagaggagcacaaggacctgaggaaggccctgtgcctgatcaaggacatgattgccaccgtggacctgaaggtgaatgaatatgagaagaaccagaagtggctggagatcctgaacaagattgagaacaagacctacaccaagctgaagaatggacatgtgttcaggaagcaggccctgatgtctgaggagaggaccctgctgtatgatggcctggtgtactggaagacagccaccggccgcttcaaggacatcctggccctgctgctgacagatgtgctgctcttcctgcaggagaaggaccagaagtacatctttgctgctgtggaccagaagcccagcgtcatcagcctgcagaagctgattgcccgggaggtggccaatgaggagcggggcatgttcctgatcagcgccagcagcgctggccctgagatgtatgagatccacaccaacagcaaggaggagaggaacaactggatgaggcgcatccagcaggccgtggagagctgcccagaggagaagggcggccgcaccagcgagagtgatgaggacaagaggaaggccgaggcccgggtggccaagatccagcagtgccaggagatcctgaccaaccaggaccagcagatctgtgcctacctggaggagaagctgcacatctatgcagagctgggggagctgagcggctttgaagatgtgcacctggagccccacctgctgatcaagccagaccccggggagcccccccaggccgccagcctgctggccgccgccctgaaggaggccgagagcctgcaggtggccgtgaaggccagccagatgggcgctgtgtcccagagctgtgaggacagctgtggggacagcgtgctggccgacaccctgagcagccatgatgtgcccggcagccccacagccagcctggtgactggaggccgggagggccggggctgcagtgatgtggaccccggcatccagggcgtggtgacagacctggccgtgtctgatgctggggagaaggtggagtgcaggaacttccctggcagcagccagagcgagatcatccaggccatccagaacctgacccggctgctgtacagcctgcaggccgccctgaccatccaggacagccacatcgagatccaccggctggtgctgcagcagcaggagggcctgagcctgggccacagcatcctgcggggcggccccctgcaggaccagaagagcagagatgctgaccggcagcacgaggagctggccaacgtgcaccagctgcagcaccagctgcagcaggagcagaggcgctggctgcggcgctgtgagcagcagcagagggcccaggccacccgggagagctggctgcaggagcgggagcgggagtgccagagccaggaggagctgctgctgcggagcagaggagagctggacctgcagctgcaggagtaccagcacagcctggagcggctgcgggagggccagaggctggtggagcgggagcaggccaggatgagggcccagcagagcctgctgggccactggaagcacggccggcagaggagcctgcctgctgtgctgctgcccggcggccctgaggtgatggagctgaacagaagtgagagcctgtgccacgagaacagcttcttcatcaatgaggccctggtgcagatgtccttcaacaccttcaacaagctgaaccccagcgtcatccaccaggatgccacctaccccaccacccagagccacagcgacctggtgaggaccagcgagcaccaggtggacctgaaggtggaccccagccagcccagcaatgtgagccacaagctgtggacagctgctggcagcggccaccagatcctgcccttccacgagagcagcaaggacagctgcaagaatggcagctccatgaccaagtgcagctgcaccctgaccagccccccaggcctgtggacaggcaccaccagcaccctgaaggacctggacaccagccacacagagagccccacccctcatgacagcaacagccaccggccccagctgcaggccttcatcacagaggccaagctgaacctgcccaccaggaccatgacccggcaggatggagaaacaggagatggagccaaggagaacatcgtgtacctgtag

SEQ ID NO: 36682 - DNA, 5064 bp, Artificial Sequence
  derived and/or modified sequence
atggagctgagctgcagcgaggcccccctgtacggccagatgatgatctacgcgaaattcgacaagaacgtatatcttcctgaggacgccgagttctattttacctatgatggttcacatcagcgccacgtgatgatagcggagagaattgaagacaatgttctgcagagttctgtgccaggacacgggctgcaggagacagtgactgtttccgtctgcttgtgctcagaaggatacagtcctgtgaccatggggagtggctccgtaacttacgtggacaatatggcttgcagactcgcaagactgctcgtgacacaggctaaccgcctaactgcatgctcacatcagactttgctcaccccctttgccctgactgccggagctttacctgctctcgatgaggagttagtcttagcacttacacacctggagctgcctctggagtggacagtgcttggatcttcctcgttagaggtgtcaagccaccgcgaaagtcttttacacctcgctatgagatggggactagccaagctgtcccagttcttcctttgcctgccaggtggggtgcaagctctcgccctgcccaatgaggagggcgcgacacctttggacttggccctgcgtgaaggacacagcaagctagtggaagatgttacaaattttcaggggaggtggtctccaagtttcagccgtgttcagttatcggaggaggccagtttgcattatatccatagctcagaaactctaactctgaccctcaaccacaccgctgaacacctgctggaagcggatattaagctgtttcggaagtatttttgggatagagctttcctcgtgaaagcatttgagcctgaggctcggcccgaggagcgaaccgctatgccaagctctggggctgaaactgaagaggagattaaaaatagcgtgagcagccgctccgcagccgaaaaggaggatatcaaacgggtgaaatcccttgtggtccagcataatgaacacgaggatcagcactcactggatctcgacaggtcctttgacatcttgaagaagtcaaaacctccttcgactctgttggcggcggggcggctgagtgatatgctgaacggcggggatgaagtttacgctaactgcatggttatcgaccaggtcggcgacctggacatctcttacataaacatagaagggatcaccgccaccacaagcccagaatccaggggctgtacactgtggcctcaaagctcaaagcacaccttacctacggagacctctccttcagtgtacccattgtcagagaatgtagaaggaacagcacataccgaggctcaacagtcatttatgtcgccgtccagctcctgcgcgagtaatctcaatttatcctttgggtggcacgggtttgaaaaggaacaatctcacctgaagaagagatcctcctctctagatgctctcgacgcagacagtgaaggcgaaggccactcagagcccagccacatttgctatactccaggctcacagtcatcatctagaaccgggattccttcaggcgacgagctggattctttcgaaacaaacaccgagcccgattttaacatctcccgcgcagagtccctgccgttatcatcaaaccttcaaagtaaggaaagccttctctctggggtgaggtctcgctcttattcttgctcaagtccgaagatttcgctcggtaaaacaaggctagtgcgggaactgaccgtgtgcagcagtagtgaggagcaaagagcctactctctgtctgaaccaccccgtgaaaacagaatccaggaagaggaatgggacaaatacattatcccagccaagtcagagagtgaaaagtacaaggtgtcgcgaacttttagcttcctcatgaatcgaatgacctctcctcgcaacaaaagcaagacaaaatcaaaggatgctaaggataaggaaaagctcaacaggcatcagttcgcccccgggacattttctggcgtcctgcagtgcctcgtatgcgacaagactcttctaggaaaggagagtctccagtgctcaaattgcaatgcaaatgtgcataaggggtgcaaagatgccgcacctgcttgcaccaaaaaatttcaggagaagtacaacaagaataaaccccagacaatccttggcaatagcagctttcgcgacataccgcaaccagggcttagcctccacccttcatcatctgtgcccgttgggctccccactgggaggagggagacagtgggacaagtccacccgctgtcgagatcagtacccggcactaccctggaatctttccgtaggagtgcaacctctttggagagcgaaagtgaccacaactcatgtaggtctaggtctcactctgacgagctgttgcaatctatgggttcctccccctccacagagagcttcatcatggaagatgttgtggactcctcactgtggtctgatttgtcctctgatgcccaggaatttgaggcagagtcctggtctctcgtcgtggaccctagtttctgcaacaggcaggagaaggatgtgatcaaacggcaagacgtcatttttgagctgatgcagactgagatgcaccatatccagacgcttttcatcatgtcggagatattccggaagggtatgaaagaggaactgcagttagatcatagcaccgttgataaaatctttccctgcctggacgagctccttgagatccaccggcatttcttttattctatgaaggagaggaggcaggagtcgtgtgcaggttcagaccgcaacttcgtgattgacaggatcggcgacattttagtccagcagttttcagaggagaatgcttccaaaatgaaaaagatatatggcgaattctgctgccaccataaagaggccgtcaatctgtttaaggagctgcagcagaataagaaattccaaaactttattaaactccggaatagcaatttgcttgcaagaaggaggggcatcccggaatgtatcttgctggtgacccagaggataacaaaataccccgttctggtggaacggatcctgcagtacaccaaggaaagaactgaagagcataaagacctgagaaaggcgctgtgcctaattaaagacatgatcgccacagtggatcttaaggttaatgagtatgagaagaatcaaaaatggttggagattctcaacaagatagaaaataagacttataccaagttaaagaatggccatgtgtttcgcaagcaggcactcatgagtgaagagcgaacacttctttatgacggtcttgtgtattggaagactgctactggccgatttaaggacattttagccctcttgctgaccgacgtactgctgtttctgcaggaaaaagaccagaaatacatcttcgcggctgtggaccagaaaccctccgtaatctctctgcagaagcttattgccagggaggtggcgaatgaggagcgtggcatgttccttataagcgcctcctccgccggacctgagatgtatgagatccacacaaatagtaaggaggaacggaataattggatgagacggattcagcaggccgtagagtcctgtcccgaggagaaaggaggccgcacatctgagtccgatgaggataagcgcaaagccgaggcgagggtcgccaaaatccagcagtgccaggagatactcactaatcaggatcagcagatttgtgcatacctcgaggaaaagttgcatatctatgccgagctaggcgagttgagcggcttcgaggacgtgcatcttgaaccccacttgctgatcaagcctgaccccggtgagcctccgcaggcggcaagcctgctggcggctgctctcaaggaagctctggttactggtggtagagagggcagagggtgcagtgacgtcgacccgggcattcaaggggtggtaacagatctggctgttagcgacgcaggcgaaaaggtggaatgtaggaatttccctgggtctagtcagagcgaaattattcaggcgatccagaatctcactcggttgctttattccctccaggcagccctcactatacaggactctcacatcgagattcaccggttagtgctgcagcagcaggagggcctgagccttggccattcaattctacgcggtggtccattacaagatcagaagagccgcgatgcggatcgacagcacgaagaattggctaacgtccatcaactgcaacaccagctccagcaagaacagcgtcgctggctcagacgctgtgaacagcagcagcgcgcacaggccacccgcgaatcttggcttcaggaaagagagagagaatgccagagccaagaagaactgctgttgcgctcccggggcgaacttgacctgcagctgcaagagtaccagcattccctggaaagattacgagagggccagcggctcgtggaacgggagcaggcgcgcatgcgggcccaacagagcctcctggggcactggaagcatgggagacagcgctccctccctgctgttctcttaccaggaggcccggaagtgatggagctgaaccgttccgagtcgttatgccacgagaattcttttttcattaatgaagcccttgtgcagatgagctttaataccttcaataaacttaacccctcggtgatccaccaggatgccacctacccgacaacacagtcgcatagcgatctcgtacggaccagcgaacaccaggttgaccttaaagtggatccatcacagccttcaaacgtgtcccataagctgtggacagctgctggctcaggtcatcaaattctgcccttccacgagtcctccaaggactcttgtaagaatgggtcatccatgactaagtgctcgtgcactttgacttcaccaccgggcctgtggacaggaactacttcaactctcaaagacttggatacaagccataccgaaagtccaactccacatgactccaatagtcaccggccccagttgcaggcctttattaccgaggcaaagttgaacctccctacaagaaccatgacaaggcaggatggagagactggagatggtgctaaggaaaatatcgtatacctctag

SEQ ID NO: 36683 - DNA, 4956 bp, Artificial Sequence
  derived and/or modified sequence
atggagctgagctgcagcgaggcccccctgtacggccagatgatgatttatgcaaaatttgacaagaatgtatacttgcccgaagacgccgagttctactttacatacgacggcagccaccagagacatgttatgatagcagaacgcatcgaggataatgtgttgcagtctagcgtgcccgggcatggcctgcaagagactgtcacggtgtccgtgtgtctttgcagtgagggctattcaccagtcaccatgggtagcggctctgtgacatacgtggataacatggcatgcagactcgccaggctgcttgttacccaggccaatagactgaccgcctgtagccaccagactctcttaacacctttcgctctgaccgctggagctcttcctgccttagacgaggaactcgtgcttgcactgacacacttggagctacctctcgagtggactgttctcggctcaagcagtctggaagtgtcgtcccatcgcgagtctttgcttcaccttgccatgaggtggggactggcaaagctttcccagtttttcctttgtttgccagggggagtgcaggccctggccctgcccaacgaagaaggcgcaactcccctcgacctggccctgagggaagggcactctaagctggtagaggacgtgaccaactttcagggcagatggagtccgagtttctcccgggtgcaactgtctgaagaggcctccctacattacattcattcttccgaaaccctcacactcacactgaaccacactgctgagcacttactcgaggcggacattaagctgtttcgaaaatatttctgggatagggcgtttctggtgaaggccttcgaaccggaagccagaccggaagagcgaactgccatgccgtcatccggggccgaaaccgaggaagaaatcaagaactccgtctcttctagatctgccgccgaaaaagaagatatcaaacgagtgaagagcctggtggtacagcacaacgaacacgaggatcagcattccttggatttggataggtcttttgatatccttaagaagagcaagcccccttcaaccctgctggccgccgggcggctgtccgatatgttaaacgggggcgatgaagtatacgccaattgcatggtgatcgatcaagtgggagatcttgatatcagctacatcaatatcgagggtatcacagccactacctctcctgaatcacgggggtgcacattatggccacagtcctcaaagcataccctgccaaccgagacttcaccatccgtgtatcctttgtccgagaatgtcgagggaacagcgcacactgaagcgcaacagagctttatgagtccaagtagcagttgtgcttctaatctgaacctttccttcgggtggcacgggtttgagaaagagcagtcacatctgaaaaaacgcagttcatccctcgacgccctggatgccgacagcgaaggggaagggcactctgagcccagccacatttgctatacgcctggaagccaatcttcctcccggacaggaataccttccggagacgagcttgactctttcgagaccaatacagaaccagatttcaacattagtcgagcggagagcttgccactctcgtccaatctccagtccaaggagtctcttttgagtggtgtgagatcccgaagctacagttgctcctcacccaagatttcactgggaaagacacggctcgtgcgtgaactcacggtctgttcaagctccgaggagcagagagcatactctttgagtgaacctcctagagaaaatagaattcaggaggaggaatgggacaagtacattatcccagctaaaagcgaatctgagaagtacaaggtgtcccgaactttcagcttccttatgaatcgtatgacttcgccccgtaacaagtctaaaacaaaatctaaggatgctaaggataaggaaaagctcaatcggcaccaatttgccccaggtacatttagtggcgtattgcagtgtctggtatgcgacaagactcttcttgggaaagagtcgctgcaatgcagcaattgcaacgctaatgtgcacaaaggatgcaaggatgccgccccagcgtgcaccaagaagtttcaggaaaagtacaacaaaaacaaaccgcagacaattctgggcaactccagcttccgcgacatacctcagccaggtctgagtctacacccttcatcatccgtgcctgtgggactgccaacgggacgacgcgaaaccgtagggcaggtccatccgctctcaagatcggtgcctggaaccacactggaatccttccggaggagtgccacatctttggagtcggagtcagaccacaattcatgtaggagccggtcgcactctgacgagctccttcagagtatgggctcctcgccaagcacagagagtttcatcatggaggacgtagttgacagcagcctttggagtgacctctcatctgacgctcaggagttcgaggcagagagctggagcctcgtcgtggacccatcattctgcaaccggcaggaaaaagatgtaataaagagacaggatgtcattttcgaactgatgcagacagagatgcatcatattcaaacactcttcatcatgtctgagatcttcagaaagggcatgaaagaagagcttcaacttgaccacagtaccgtcgataaaattttcccctgcctggatgaactgttggagatccatagacacttcttctactccatgaaagagagacgccaggagtcttgcgccggatcggaccgtaatttcgtcattgatagaatcggcgatattttggtccagcagttttcagaggagaatgctagtaagatgaagaaaatatacggcgaattttgctgccatcacaaggaagcagttaatctgttcaaagagctgcaacagaacaagaaattccagaacttcattaagttacgcaacagcaacctcttggcacgacgcaggggcatcccagaatgcattttgcttgtgacacagcgcattacgaaatatccagttcttgtcgagagaatcctccagtacacgaaggaacgcactgaagagcataaggaccttcggaaggcgctgtgcctcatcaaagatatgatcgcaaccgtggatctgaaagtgaatgaatatgagaagaaccagaaatggctggaaatcctgaacaaaattgagaacaaaacttacactaagctcaaaaatggacatgttttccgcaagcaggctctcatgtctgaagaaaggaccctgctgtatgatggccttgtgtactggaaaaccgcaaccggaagatttaaggacattctggctttgctactgactgatgtgctactctttttacaggaaaaggaccagaaatacattttcgccgcagtggatcagaaaccatctgtgatttccctgcagaaactgattgccagagaagtggcaaacgaggagcgcggaatgttccttatctccgcttctagcgccggtcctgaaatgtacgagatccatacaaattctaaagaagagcgtaacaattggatgcgtcggattcagcaggccgtggaatcttgcccagaggagaaaggtggtcggaccagcgagtccgatgaggacaaaagaaaagctgaagccagagtggccaaaatacagcagtgccaggagatactgacgaaccaggatcagcagatttgcgcttacctcgaagaaaaactccacatttacgcagagcttggcgagctttctggcttcgaagatgtacatctggagccccatctgctgatcaaacccgacccgggagaaccgccacaggcggcctctttactcgcggccgccctgaaggaggccgaatcacttcaggtggctgtaaaggcctcccaaatgggggccgtctcgcagagttgcgaagatagctgtggagattcagtgctggctgatactttgtcttctcacgatgttcctgggagccccaccgcctccctggtgaccggtggacgcgaaggtagggggtgtagcgacgtggacccaggtatccagggcgtggtgaccgacttggcggtgtcagatgctggcgaaaaggtggagtgcaggaactttccaggatcttcacagtctgaaattatccaggctattcagaatctcactcggctgctctactcattacaagctgccctgacaatccaagacagccacattgagattcaccgcttggtcctgcaacaacaggaaggtttgagcctgggacattctatcctcaggggtgggcccctgcaggatcagaagtccagagacgctgaccggcagcacgaagagctggcaaatgtccaccagctgcagcaccaactccagcaggagcagaggaggtggctgcgacggtgtgagcagcagcaaagggctcaggcgacccgcgaatcgtggctgcaagagagagagcgggaatgtcaatctcaggaagagctgctgctccgaagcaggggggagttagatctgcaacttcaagaatatcagcacagtttggaacgtctccgggaggggcagcgattagtagagcgggagcaggccagaatgcgcgcgcaacagtccctcttgggacactggaagcatgggaggcaacgctcccttccggccgtgttgctcccagggggcccagaagtgatggagctgaatagatcagagtctctatgtcacgagaactccttttttataaatgaggccctagttcagatgtcattcaatacattcaataagctcaaccccagcgtgatccaccaggacgctacctaccctacaacacaaagccactccgatctcgtgcgcacaagcgagcatcaggtggacctgaaagtggatcccagtcagccttctaatgtatcgcacaaactgtggacagctgccggaagcggacatcagatactgccttttcatgagagctctaaggattcatgtaagaacgggaactag

SEQ ID NO: 36684 - DNA, 252 bp, Artificial Sequence
  derived and/or modified sequence
atggagctgagctgcagcgaggcccccctgtacggccagatgatgatatacgccaagtttgacaagaacgtgtaccttccagaagatgctgagttctatttcacttatgatggctcacaccaacggcacgttatgattgctgaacgtattgaggacaacgtcctgcagtcatctgtgcctgggcatggcttgcaggagaccgtgacagtaagcgtctgtttatgcagcgagggttactcccccgtcacctag

SEQ ID NO: 36685 - DNA, 5196 bp, Artificial Sequence
  derived and/or modified sequence
atggagctgagctgcagcgaggcccccctgtacggccagatgatgatctacgccaagttcgacaagaacgtatatctgccagaagatgcagagttttattttacctacgacgggtcccatcagaggcacgtgatgatcgccgagagaatcgaggacaacgtgctccagtccagcgtccccggacatgggttgcaagaaactgttacggtctcagtgtgcttgtgtagtgagggctatagtccagttacaatgggttctgggtccgtgacttatgtggataacatggcctgtcgcttagcccgtctactcgtgacccaggccaacaggcttaccgcctgtagtcatcaaacattgctaactcctttcgccctcaccgcaggtgcgctccctgctctggacgaggaactagttcttgccctgactcatttggagctacctctcgaatggacagttttagggagctccagcctagaagttagctcccacagagagagtctgcttcaccttgctatgagatggggtctggctaagctatcccagttttttctctgcctcccgggaggtgttcaggcactcgctcttcccaacgaagagggtgccacccccctggacctagcgctgagagaggggcactccaaactcgttgaagatgtcacaaacttccagggcagatggtcaccctcctttagccgtgttcagcttagcgaggaagcttccttgcattacattcattcctctgaaacgttgacacttacacttaatcacaccgctgagcacctcctggaagctgacataaaactgttcagaaaatatttttgggaccgtgcattcctggtgaaagcgtttgaacccgaagctcggccagaagaacgcactgccatgccatcttccggggctgagaccgaggaggagatcaaaaacagtgtgagttctcgatcagcggccgagaaagaagacataaaaagggtgaaaagtttagtggtgcagcataacgagcatgaggatcagcacagtctagacctcgataggagcttcgacatcctcaaaaaatctaagccaccctccacgctcctggccgctggtcggctctccgacatgttaaacgggggggacgaggtttacgctaactgtatggttatcgatcaagtgggggatttggatatttcttatataaatattgaaggaattacggcgacgacctccccggaaagtagagggtgtactttgtggcctcagtctagcaaacacactctgcccacagagacctccccctccgtttatccactgtctgagaatgttgagggcacagctcacacggaagcccagcagagctttatgtctccatcgtcaagctgtgcttctaatttaaacctgtctttcggctggcatgggtttgaaaaagagcagagtcacttgaagaaaaggtcgagttctctggacgcgctggatgcggacagcgagggtgagggacatagcgagccgtcccatatctgctacactcctggtagtcagagttcctccagaactggcataccttccggcgatgagctggattcattcgagacgaacaccgagcccgattttaacattagcagagcagagagtctgccactctcctccaacttgcaatctaaagaaagtctcctctccggcgtccggtcacggtcttactcttgtagctctccaaagatttctctgggtaaaacaaggctggtgagagaacttaccgtgtgctctagttccgaggagcagcgcgcgtacagtctatctgagccaccgagagagaatcggatacaggaggaggagtgggacaagtatattatccccgccaagtcagagtctgagaaatacaaagtgtctagaacgtttagcttcctgatgaacagaatgaccagccctaggaacaagtctaaaacaaagagcaaggacgccaaagataaggaaaagctgaataggcaccagtttgctccaggcacttttagtggcgtccttcagtgccttgtctgcgataagacgttgctcggcaaggagtccctgcaatgtagcaactgcaacgcaaatgtgcacaaaggctgtaaagacgcagcaccagcctgcactaaaaagtttcaggaaaagtacaacaagaataagccgcagaccatccttgggaactccagtttccgagacatccctcagccgggcctctccttgcacccgtcctcctcagtgccggtggggctgccaactggtcgaagagagaccgttggccaggtccaccccttaagccgaagtgtcccagggaccacgctagagtcttttagaaggagcgccaccagcctagagagcgagagcgatcacaactcatgccggtcgcgcagtcattccgacgagctcctgcagagcatgggatcgagcccttccaccgagagcttcataatggaggatgttgtggattcttctctgtggtcagacctgtcctcagacgctcaggagtttgaagccgagtcttggagcttagtagtggacccgtcattctgtaaccgccaagagaaagatgtaataaaacgccaggatgtgattttcgaactaatgcagacggagatgcaccacatacagactctgtttattatgtcagagatttttcgtaagggcatgaaggaagaactgcaactagaccattcgacggtggacaaaatcttcccatgtctcgatgagctgttggagattcataggcatttcttttactctatgaaagagcgacggcaggaaagctgcgctggatcagaccgtaacttcgtgatcgaccggattggcgatatcctggtgcagcagttctctgaagaaaatgctagtaaaatgaagaagatttatggagaattctgctgccaccacaaagaggccgtgaaccttttcaaagagcttcagcagaataaaaagttccagaacttcatcaagctgagaaacagcaacctccttgcacggcggagaggtattccggagtgtatcttgctggtcacacagaggataaccaagtaccctgttttagtggaacggattttgcagtatacaaaggagcgcactgaggagcacaaagacctgaggaaagccttatgtctcattaaggatatgatcgcaacagtggacctgaaggtgaacgaatatgagaaaaatcaaaagtggctagagatactgaataagattgagaataagacatacaccaaactgaaaaacggccacgtatttaggaagcaggcactgatgtccgaagagcgaactctcctttacgacggtcttgtttattggaaaactgccacgggtagattcaaagatatcctggctctgctgctgacagacgtcttgctgttcttacaagaaaaagatcaaaagtacatttttgcagctgtggaccagaagcctagcgtgatttccttgcagaagcttatcgccagagaagtagccaacgaggagagaggcatgttcctgatcagtgcttcctctgccggccccgaaatgtacgagattcacaccaatagtaaggaagagcgtaataattggatgaggcgaatccaacaagcagtggaatcttgtcctgaggagaagggcggccgcacatcagagtcggatgaggacaaacgcaaggctgaggctagagtcgccaaaattcagcaatgccaggagatcctgaccaaccaggatcagcaaatttgtgcttatctggaagaaaagctccatatctacgctgaactcggggagctctccggttttgaggacgtacacttggagccccatctgctgattaaacctgacccgggtgagcccccccaggctgcctcattgcttgccgcagccctaaaggaggccgagtctctccaagtcgccgtcaaagccagtcagatgggcgccgtatcacagtcttgcgaggactcctgtggtgatagtgtgctagccgatacacttagtagccatgacgtgcctggcagcccgaccgcttcgctggttaccggcgggagagagggtcgggggtgctcagacgtggacccgggcatccagggtgtggttacagacctggctgtcagcgatgctggtgagaaagtcgagtgtaggaattttcccgggtcctcccagtcagagattatacaggctatccaaaatctaactagacttctctatagtctccaggctgccctgaccatccaggatagccacatcgagattcacaggctggtccttcagcagcaggaaggcctgagcctggggcacagtattctcaggggagggcctttgcaggaccaaaagtctagagatgcggatcgacagcacgaagaattagctaacgtccatcagttgcagcaccagcttcaacaagaacagaggcggtggttaagaagatgcgaacagcaacaacgggcccaggcaacaagggaaagctggctccaagagcgggaaagggagtgtcagagtcaagaagagttgctgctgcgctcaagaggagaactcgatttacagctccaggaataccagcacagtctcgagcgattgagagaaggccaaaggctggtagaacgggagcaggcccgcatgagggctcagcagagcctgctggggcactggaaacatgggcggcagcggtcactgcccgcagtgttgttaccaggtggccctgaggtcatggaacttaatagaagcgaatccctgtgccatgagaactctttttttatcaacgaagcactagtccagatgtccttcaatacgtttaataagttgaacccatccgtcatacaccaggatgcgacctaccctacaacacagtcacactctgacctggtgcggacctcagagcaccaggtggatcttaaggtcgacccgagccagccctctaacgtgtctcacaaactttggactgctgccggctccgggcaccagattttgccattccatgagtctagtaaggactcctgtaaaaatggaagtagcatgactaaatgctcatgtacgctcacctcaccccctggattgtggaccgggaccactagcaccctgaaggacttagatacttcccataccgaatcaccaacccctcacgactccaattcccatcgaccccagctgcaggccttcatcaccgaggctaagctcaacctgcctacacgcactatgacccgtcaagatggggagaccggggacggtgccaaagagaacatcgtgtacctctag

SEQ ID NO: 36686 - DNA, 5064 bp, Artificial Sequence
  derived and/or modified sequence
atggaattatcttgctctgaggcacctctatacgggcagatgatgatttacgcaaaattcgacaaaaatgtatatctgcctgaagacgcagaattttactttacttacgacggctcacatcagcgacatgtcatgatagcagaaaggattgaagataacgtcctgcagagctccgttccgggacacggactgcaagaaacagtcactgtctctgtgtgcctgtgtagtgaggggtactccccagttaccatggggtccggcagtgtgacatatgtcgataatatggcttgcaggctagctagactgcttgtgacccaggcaaataggctgactgcctgctcccatcagacacttttgacccctttcgctcttacggctggagccttgccagccctcgacgaggagctggtcctggcacttacccacctggaattgcctctggagtggaccgttttgggttcgagcagcctggaagtgtcatcccacagagaaagcttactgcatctcgccatgagatggggcttggccaagttatctcagttttttctttgtctgccgggtggggtccaggccttagctctaccgaacgaggagggggctacacccctggacctggctctgcgggaaggacactccaagctggtggaagacgtcaccaatttccagggcagatggtcaccatccttcagccgcgtgcagcttagcgaagaggcctccctgcactatattcacagcagtgaaacactgactcttactctcaatcacacggctgagcacctgctggaggccgacattaagttgttcagaaaatatttttgggatagggccttcctcgtcaaagcatttgaaccagaggctcgacccgaggaacgtactgcaatgccatcatccggcgcagaaactgaggaggagatcaaaaactcggtgagttctaggtccgctgcagagaaggaggacatcaaaagggtaaagtcactcgttgtgcaacacaacgagcacgaagaccaacactctcttgacctggataggagttttgatattctgaagaagtccaagcccccaagcaccctgttggctgcagggcgtctgtcagacatgctaaatggaggcgatgaggtatacgccaactgtatggttattgaccaggtgggagacctggatatctcatacatcaacattgagggaattacggccaccaccagccctgaatcacggggatgtacactatggcctcagtcctctaaacacaccctgcctacagagacttcgccctccgtgtaccccctgagcgaaaacgtcgagggaacagctcatacagaggcccagcagtcctttatgtctccctccagctcgtgcgcatctaacttgaatctcagttttgggtggcatgggtttgagaaagaacaatcccacctgaagaaacgttctagcagcctggatgccctggatgccgactctgaaggggagggccactctgagccctcccacatctgctatacacccggatctcagagctctagtcgtaccgggatccccagcggggacgaactggattccttcgagacgaatacggaaccagacttcaatatctctcgggcagaatctctgccgctctcctcaaatttgcagagcaaagaatctctcctctccggtgtccgatcaagatcctattcatgctcaagcccaaagataagccttggcaagacgcgactcgtgagggagcttaccgtctgtagttcttctgaggaacagcgtgcttatagtttatcagagccccctagagaaaaccgcattcaggaggaagagtgggacaagtacatcatacccgctaaaagcgaatctgagaagtacaaggtatcacgtactttttcctttctgatgaacagaatgaccagtcccaggaacaagtctaagacaaagagtaaggacgctaaagataaggaaaagctgaatagacatcagttcgccccaggtacatttagtggggttctgcagtgcttagtgtgtgacaagaccttgttgggaaaggagtccctacaatgttctaattgcaacgccaatgtgcacaaaggatgcaaggatgccgctccagcctgcacaaagaaattccaggaaaaatacaacaagaataaaccccagacaatcctggggaacagctcatttagggatatcccgcagcccggacttagcctgcaccctagcagctctgtgcctgtggggttgccaacggggaggagggagaccgtggggcaggtccatccgttatctaggagtgttccaggcacgacgctcgagagcttccgtcgtagcgccacctccttagaaagtgagtctgaccacaacagctgcagaagcagatcccatagcgatgagcttctgcagagcatgggcagcagcccctctaccgagtcatttattatggaggacgtggtggactcgtccctctggtccgacctgagtagtgacgcccaggagtttgaggcggaatcatggtcccttgtggtggatcctagcttctgcaacaggcaagagaaggacgttattaagaggcaggatgttatctttgagctgatgcagacggagatgcaccacatccagaccctcttcattatgtctgagatattcagaaaaggcatgaaagaagagctgcaactggatcacagcaccgtggacaaaatctttccttgcctggacgagctgctggagattcaccggcactttttctactcgatgaaggagagaaggcaggaatcatgtgcagggtctgatagaaatttcgtgatagacaggatcggtgatattctcgtgcagcagttctccgaagagaatgccagtaagatgaagaaaatctacggtgagttttgttgtcatcataaagaagcggtgaacctgtttaaggaacttcagcaaaacaagaaattccagaacttcatcaaacttcggaattccaacctattggccaggcggaggggaatccccgagtgtatcctgctagttacccagcgcatcacgaagtaccctgtgctcgtcgaaaggatccttcagtataccaaagaaaggacagaagaacacaaggacttgcgtaaggccctgtgcttaatcaaagacatgatcgcgactgtggatttaaaggttaacgagtacgagaagaaccagaaatggctggagatcctgaataaaatagagaataagacctacactaagttgaaaaatggtcatgtgtttcgaaaacaggccctgatgtctgaggaaagaacgctgctgtacgacggactcgtgtactggaagacggctaccggtagattcaaggatattctggccctcctgctgaccgacgtacttctgtttctgcaggaaaaagatcagaagtatattttcgctgccgtggatcagaagccctctgtcatcagtctacagaagctgatcgctcgtgaggtggctaatgaagaacgcggtatgtttttaattagtgcatcaagtgccggaccagagatgtatgagattcacactaatagtaaagaagaaagaaataattggatgagaaggatccagcaggccgtggaatcttgccctgaggaaaaaggcggtaggacctccgagtccgacgaagataaacgtaaggccgaagcgagagtggctaaaatacaacagtgccaggaaatactaaccaaccaagaccagcagatttgcgcttacctcgaggaaaagctgcacatttatgcagagctgggagagctgagcgggtttgaggatgtgcacctcgaacctcacctgttaataaagcccgaccctggcgagccccctcaagccgcttctcttttggcagccgctttgaaggaggctctggtgacggggggacgcgaggggagaggctgctccgatgttgatcctggaattcagggagtggtgacagatctggctgtgtctgatgcaggggagaaggtggagtgccgcaactttccaggctcaagccagagtgaaatcattcaggcgattcagaatctgacacgccttctctacagcctccaggcagctttgacaatccaggacagccacatagaaattcaccgactcgtgcttcagcagcaggagggcctcagcctcgggcatagcatcctgagaggcggaccgttacaagaccagaaaagccgggacgcagataggcaacatgaagagctggcgaacgtgcaccaattacaacaccagctgcagcaggagcaaagacggtggctgaggcgctgtgagcagcagcaacgggctcaggcaacacgtgagagttggcttcaggagcgtgagagagagtgtcagtcccaggaggagctactgctgagaagccgaggcgaactggacttgcaactccaggagtaccaacacagtctcgaaaggttgcgcgagggacagaggttagtcgaacgagagcaagccaggatgcgggcacaacagtccctgctcggccattggaagcacgggagacagcgttcccttccagctgtcctgctgcctggcggtcccgaagtgatggaactcaaccgcagtgaatctctgtgtcacgagaattctttttttatcaacgaagctttggttcagatgtcctttaacacctttaacaagctcaacccctctgtaatccaccaagatgccacttaccccaccacccagtctcactctgatctggtccggactagtgaacatcaagtggacctgaaggttgatccatcccagcccagcaacgtttcacataagctgtggacggctgccggaagcggacaccagattctgcccttccatgagagcagtaaagattcatgtaaaaatggaagttctatgacaaagtgttcttgcactttgacctccccacccggtctatggacggggactacttcaaccctgaaggatctcgatacctcacataccgagtcccctactccccacgatagcaatagccaccgtccacagctgcaagcattcattacagaagccaagctgaatctacctacacgcaccatgacaaggcaggatggcgaaacgggcgacggcgctaaagagaacatcgtctacttgtat

SEQ ID NO: 36687 - DNA, 4956 bp, Artificial Sequence
  derived and/or modified sequence
atggaactgtcttgcagtgaggcccctctgtacggccagatgatgatctacgcgaagttcgacaaaaacgtgtacttgcctgaagatgccgagttttacttcacttacgatggaagccatcagagacatgtcatgattgctgaaaggatagaggataacgtgttacaaagcagcgttcccggacacggactccaagaaaccgtgaccgtcagtgtgtgtctatgttccgaaggctattcgccagttaccatgggaagcgggtctgtgacctacgtggataacatggcatgccgcttggcgcgtctgttagttacccaggcaaatagattaaccgcatgcagtcaccagacactgctaactccctttgccctaacggcaggagcgcttccggcactagatgaagagctggttctggctctcactcacctcgagttaccgctggagtggacagttctgggctcgtctagtctggaagtgagtagccaccgtgaatcactgctgcacctggccatgaggtggggtttagctaagctcagtcagtttttcctgtgtctcccagggggagtccaggcccttgcgctccccaatgaggagggcgcaactccactggatctcgctctccgggagggacactcaaaacttgtggaggacgtgaccaattttcaaggcaggtggtctcccagcttttcaagggtgcagctgagtgaggaagccagtctgcactacattcatagctcagaaactttgactctcaccctaaatcacacagcggaacacttgctggaggcagatatcaagctgtttcgcaaatatttctgggacagggcatttctggtgaaagcgtttgaaccagaagcacgtccagaagaaaggaccgccatgccgtcaagtggggcagagactgaagaggagataaagaacagtgtgtcctcacgttctgccgcagagaaggaagatatcaaacgggttaagtctttggtcgtccaacataatgaacacgaagatcagcatagtcttgacttagaccggtctttcgatattctgaaaaagtcaaagcccccatccacattactggccgcagggagactttccgatatgcttaacggtggagatgaagtctatgctaattgtatggtcatagaccaggtgggcgatctggatatatcttacattaacatcgaaggaatcacagccactactagtcccgaatcccgaggctgcacactttggcctcagtcctccaaacatacacttccaactgagacgagccccagtgtctatccattgtccgagaatgtggaaggcaccgcccacaccgaggcccagcagagctttatgagtcctagttcctcatgcgcgagtaatctgaacctgagctttggctggcacggatttgaaaaggaacaaagccacttaaaaaaacgcagctccagcttggatgctctggatgcggacagtgaaggcgaaggccattcagaaccttcgcacatctgctatactccgggttctcagtcctcttctcgcacaggaatccctagtggtgacgagcttgatagctttgagactaacaccgaacctgactttaatatttcgagggcagaaagtttgccactcagcagtaacctacaaagcaaggaatcgctgctgagtggcgtgcggtcccggtcctactcctgctcctcccctaagatatcattgggtaagacccgacttgttagggaattgacagtgtgctcttcttctgaagagcagcgcgcttattccctgtctgaaccacctagagaaaaccgcattcaggaagaagaatgggataaatacatcatccctgctaaatcggaatccgagaagtataaagtgagcaggaccttctcattcctgatgaaccgcatgacaagcccaaggaataagagcaagacaaagagcaaagacgctaaagataaggaaaagctcaataggcaccaattcgcgccagggaccttcagcggggtactacagtgtctggtgtgcgataagacactgctgggaaaagaatctttgcagtgtagtaactgcaatgctaacgtccataaaggttgtaaagatgcagccccagcttgcacgaaaaaattccaggagaagtataataagaataaaccacaaaccatcctgggaaactcaagttttcgggacataccccagcctggcttgtccctgcatccctcctcaagcgtgccagtcgggcttcccactggcagacgagagacagtggggcaggtccaccccctctccaggtctgttccaggaactaccttagagtcgttcaggcgctccgcaacgagtttggagtctgaaagcgatcataactcctgccggtccagatctcacagtgatgagctgctgcagtccatgggcagcagtcctagcaccgagtctttcatcatggaagatgtcgttgactccagcctttggagtgatctatccagcgatgcgcaggagttcgaagccgagagttggtcactggtcgtggacccaagcttttgcaacagacaggagaaggacgtaatcaaacggcaagatgtcatcttcgaattgatgcagacagagatgcatcacattcagacactctttatcatgagcgagatattcagaaaggggatgaaagaagaactccagcttgatcactccaccgtggacaaaatatttccttgcctcgacgagctgttggaaatccaccgccactttttttactctatgaaagagagaagacaggagtcatgcgcaggtagtgaccggaactttgtgattgataggatcggggatatcctggtacaacagttcagtgaggaaaacgcttcaaaaatgaagaagatctatggcgagttctgctgtcaccacaaagaagccgtcaatctgtttaaagagctgcagcagaacaaaaagtttcagaactttatcaaactgcggaattccaatctgcttgctaggcggaggggaatccccgagtgcatcttgttggtcacacaacgcattacaaagtatccagtgcttgtggaaagaatcctacagtacactaaagaacggactgaagaacataaagacttaagaaaagcactgtgcctaattaaggacatgattgctacagtcgacctgaaagtgaatgaatatgaaaagaaccaaaagtggctggagattctgaacaagattgaaaacaaaacatacaccaagctgaagaatggccatgttttcaggaaacaagcgctcatgtccgaggaacggactttactgtacgatggcctggtgtactggaagaccgccaccggtcgttttaaggatatcctagcactgttgttgactgatgtgctcctattccttcaggagaaagaccagaaatacatttttgcggcagtggatcaaaagccaagtgtgatctcactgcagaaattgattgctagggaagtcgcaaatgaggaaaggggaatgttcttaatcagcgcttctagcgccggtcccgaaatgtatgaaatccacactaactctaaggaagagaggaataattggatgcgtaggattcaacaggcagtcgaatcctgccctgaagagaaaggtggacggacctctgagtcagacgaggataagcgcaaggctgaggccagagtggctaaaattcagcagtgtcaggagatcctcacaaaccaagatcagcaaatttgtgcctatcttgaggagaagctgcatatatatgccgaactgggggagctatctggctttgaggatgttcatctggagcctcatttgctcatcaagcccgatcccggtgaacccccacaagctgccagcctgctggctgccgctctcaaagaagctgagagcctccaggttgctgtgaaggcctcacagatgggggcagtcagtcagtcatgtgaggacagctgcggcgattccgtcctagccgacacgctgagtagccacgacgtgccgggaagccctactgcgagtttggtcactgggggacgggagggtcgcggatgctccgatgtggatcccggaattcagggggtggtgacagatctagcagtcagcgatgctggtgaaaaggtggagtgcagaaactttccaggtagcagtcagagcgagattatccaggccattcagaacctgacaaggctgctctattctcttcaggccgctctgaccatccaagacagtcacatcgagattcacagactggtgctccagcagcaggaaggacttagtcttggccactcaatccttaggggcggaccactgcaggaccagaagagccgtgacgcagaccgccagcacgaagagctggctaacgtgcatcagctgcagcaccagctccagcaagaacaaagacgatggctccgtaggtgtgagcagcaacagagagcccaggcgactcgcgaatcctggctgcaggaacgggagagagagtgccaatctcaagaggagctgctacttcgcagccgtggcgaattggacctccagctgcaggaataccaacacagcctcgagcgtctgcgtgaggggcagaggctggttgagcgggagcaggcgagaatgagagctcagcagagtctgctgggacattggaaacatggaaggcagcgatctttacccgctgtcttgctgccaggtggccctgaggtaatggagctgaacaggagtgagtccttgtgtcacgaaaactcattctttattaacgaagcactggtgcagatgagctttaacacgtttaacaaactgaatccctccgtgatccaccaggacgctacctatccaacaactcaatcccattcagaccttgtgcgaacatccgagcaccaggtggatctcaaggtggacccctcccagccaagtaatgtgtcccacaaactgtggacggccgcaggaagtgggcaccaaattctgccctttcacgaatccagcaaggacagttgtaagaacgggaattag

SEQ ID NO: 36688 - DNA, 252 bp, Artificial Sequence
  derived and/or modified sequence
atggagctgtcttgctcagaagccccattgtacggtcagatgatgatatacgccaaattcgataagaacgtctatctgccagaagacgccgaattttatttcacatacgatgggtcccatcaacgacacgtgatgattgcagagcggatcgaagacaatgtacttcagtctagtgtccccggacacggcctgcaggagacagtgaccgtttctgtctgtctttgcagcgaagggtactcaccagttacctag

SEQ ID NO: 36689 - DNA, 5195 bp, Artificial Sequence
  derived and/or modified sequence
atggagctgtcttgctctgaggcccctctctacggccagatgatgatttacgctaagttcgacaagaatgtgtacctgcccgaggacgccgaattctatttcacatacgacggatcgcaccagaggcacgtcatgatcgccgaacgtattgaggacaatgtacttcagtcctcagtacctggacacggtctgcaggaaactgtgaccgtaagcgtgtgcctctgttcagagggttattctcccgttactatgggtagtggatcggtgacatacgtcgataacatggcatgtcgccttgcacggcttctggttacgcaagcaaaccgtttgactgcctgctctcatcaaactctcttgaccccttttgcattgactgccggtgcgcttcctgcactcgatgaggagctcgttctagcactgacacacctagagctgccactcgagtggactgtgcttggcagttcctccctggaagtgagtagccatcgggagtcgctcttacacctggccatgcggtggggacttgccaaactctcccagttcttcctttgcctacccggtggggtgcaggctctggccttacccaacgaagagggggctactccactcgacctggcgttgagagaggggcactcgaagcttgtggaagacgtcactaacttccaaggacgttggagcccctcctttagtcgtgtacaactgtcggaagaggcatcactccattatatccattcatctgagacacttaccttaacattgaatcatacagccgaacatttgcttgaagccgatatcaaactatttaggaaatatttctgggatcgagctttcttagtgaaggccttcgaacctgaggctaggcccgaggaacgcacagcaatgccaagttcaggcgctgaaacagaggaagagataaaaaattcagtgtcatcccgctctgccgctgagaaagaagatatcaagagagtgaagtcccttgtcgtgcagcataatgagcacgaggaccagcattcactggacctcgacaggtcctttgatattctgaagaagagcaagcccccatccacactactggcggcagggcgtctgtccgatatgcttaacggaggggacgaagtttacgcgaattgcatggtgatcgatcaggtcggcgatctggacatctcatacattaatatagaggggattaccgctacaacaagtccagaatctagaggttgcacactatggccacagtccagtaagcatactctccctacagaaacttctcctagtgtatacccgctgtctgaaaacgtcgagggtaccgcccacacagaggcacagcagtccttcatgtccccctcgagttcctgcgcctctaatttaaacttaagctttgggtggcacggtttcgaaaaagaacaaagtcaccttaaaaaacggtcatcatccctcgacgccctcgacgctgatagtgaaggcgaagggcattcagagccaagccatatttgctacactccgggttctcagtcgagttctcggaccggtattcccagtggcgatgagctggactcctttgaaacaaataccgaacctgactttaatatatccagggccgagtctctgcccctgtctagtaatctccagagtaaagaatctctgctctctggtgtcagatcccggtcctactcatgtagtagtcccaaaatatccctggggaagactaggctggtgcgcgaattaaccgtctgctcctcctcagaagaacagagggcctactccttgagtgagccaccacgcgagaaccggatccaagaggaggaatgggacaaatatatcattcctgccaaatctgagagcgaaaagtacaaagtgagccgaacctttagcttcctaatgaaccgcatgacgtcccctaggaataagtccaagacgaaaagtaaagatgctaaggacaaggaaaagctgaatcgccaccagttcgcgccaggaacttttagcggtgtgctccaatgcttggtgtgcgataagaccctcttgggaaaagagtccctccagtgctccaactgcaacgcaaacgtgcacaagggatgcaaggatgctgcccctgcctgcaccaagaagttccaggaaaagtataacaagaataaaccacagacgattctcggtaatagcagcttccgtgatattccccaacccggactttcattgcatccgtccagctccgtgccggtgggcctcccaacaggccgtcgcgagacagtggggcaggttcaccctttaagtaggtctgtacccggtactacccttgaaagttttcggaggagcgcgacgtctctagaatccgagtcagaccacaatagctgtcgttcaaggtctcattcagatgaactgctgcagtccatgggcagttcacccagtacagaaagctttattatggaggacgtggtggacagttccttatggagcgatttgagcagcgacgctcaggaattcgaggccgaaagctggtcactcgtggtggacccgtccttctgcaaccggcaggaaaaagatgtgataaagaggcaggatgtgatttttgagctcatgcagactgaaatgcaccatatacagaccctgttcattatgtccgagatcttccggaaggggatgaaagaggagttgcagctcgaccacagtaccgtggataagattttcccatgtctcgacgagctattggagatacaccggcactttttctattccatgaaagaaaggcgccaagaaagttgcgcgggttccgacagaaactttgtcatagatcggatcggagatattctggtgcaacagttttctgaggagaacgcctccaagatgaagaagatctatggggagttctgttgccaccataaagaggcagtcaacttatttaaagaactgcagcagaacaagaagtttcagaattttatcaaactgaggaatagtaacttgctggctcgacgccgtggcattcccgagtgtattctattagttacccagcgcataacaaagtatccggttcttgtagaacggattctgcagtacaccaaggagcgaacggaggagcacaaagatctgcgcaaggctctgtgcctgattaaggatatgatcgcaactgtggatcttaaagtcaatgagtatgagaaaaatcagaaatggttagagattctgaacaagatagagaataagacttacacgaaattgaaaaatgggcatgtcttccgtaagcaagcccttatgagcgaagagcgtactctgctctatgacggtctcgtctattggaagactgccaccgggagattcaaagacatcctagccctgttgctgaccgacgtccttttgttccttcaggaaaaggatcagaaatacatatttgccgctgtggaccagaagccatctgtgatctccctgcaaaaactgattgccagggaggtagcaaatgaggagcgcggaatgtttttgatctcagcatcctccgctggaccggagatgtatgagatccacacaaattcaaaagaggagaggaacaactggatgcgcaggatacagcaggcagtggaaagctgccctgaggaaaagggcggacgcactagtgagtcagatgaggacaagcggaaagctgaggccagagtggccaaaatccagcaatgtcaggagatccttacgaaccaggatcagcagatttgcgcttatcttgaggaaaagctgcacatctacgccgaactgggggaactttccggatttgaagatgtgcaccttgagccccacctccttattaaaccagaccccggagaaccgcctcaggctgcatctttactggcagccgctctcaaggaggctgagtccctgcaggttgccgtgaaagcttcccaaatgggggctgttagccagtcgtgcgaggatagctgtggcgacagcgtgttggccgacacgctcagcagccatgatgtcccaggcagtcctaccgcctctctggtaaccggcggaagagaggggagaggctgttcagacgttgatcccggaatccaaggggttgtgaccgatttagctgtcagtgatgccggtgagaaggtagaatgcagaaactttccaggctccagccaaagcgaaattatacaggccattcagaacctgacacgcctcctatactcacttcaggccgcactgactatacaggactcccatatcgagattcatagactcgttttacagcagcaggagggcttaagcttaggacactctattctgagaggcggtccgcttcaggaccagaaaagcagggacgcagatcgccagcacgaagaactcgctaatgtccatcagttacagcaccagctacagcaggagcagaggcgctggctgagaagatgtgaacagcagcagcgcgctcaggccacacgggaaagttggctgcaggagcgtgaacgcgagtgccaatcccaggaagaactgctgctgcgctccaggggcgagttagatctccaattgcaagagtatcaacatagtttagagcgacttagggagggccagagactcgtcgagcgagagcaggcacgcatgcgcgctcagcagagtctgcttggacactggaagcacggcaggcagcgttctctgccagcggtgttacttcctggcggacccgaggtgatggagcttaatcgtagtgaaagcttatgccatgaaaattcatttttcattaacgaagcccttgtacaaatgtccttcaacacatttaacaagctcaatcccagcgttattcaccaagacgccacatatccgaccacccagtcacatagcgacctggtgcgaacatctgagcaccaggtggacttgaaagtcgatcccagccagcctagtaacgttagtcacaagctctggacagccgctgggagcggtcaccagattctgccttttcacgagtccagcaaagactcatgcaaaaatggatccagtatgactaaatgctcctgtacccttactagcccaccaggactgtggaccggtacaaccagtactcttaaggacctcgacaccagccacacagaatccccaactccacatgattcaaatagccatcgcccacagcttcaagcctttattactgaggccaagctcaacctgccaaccagaactatgactaggcaggatggagagacgggtgacggagccaaagagaacattgtgtacctgta

SEQ ID NO: 36690 - DNA, 6219 bp, Artificial Sequence
  derived and/or modified sequence
aaaccttggcttcagcccggccgccgccaggcgttggcatcgccggggagagccttccggactccgggcggcggctggctgggggcgcgttccgaggcgccctcaggcagggcgcgggggcagagcctcgcctgggttctggaggctgcggggccatcgctccagatgcgaaagccatggagttgagctgcagcgaagcacctctttacgggcagatgatgatctatgcgaagtttgacaaaaatgtgtatcttcctgaagatgctgagttttactttacttatgacggatctcatcagcgacatgtcatgattgcagagcgcatcgaggataacgttctccagtccagcgtcccaggccatgggcttcaggagacggtgacggtatctgtgtgcctctgctcggaaggttactctccggtgaccatgggctctggctcagtgacctacgtggacaacatggcttgcaggctggctcgtctgctggtgacgcaggccaatcgcctcacagcctgcagccaccagaccctgctgaccccatttgccttgacggcaggagcactgcctgccttggatgaggagctcgtgctggctctgacccatctggaattgcctctagagtggactgtgttgggaagttcttcacttgaagtatcttctcacagagaatctcttctacacctggctatgagatggggcctggctaaactttcccagttcttcttgtgtctcccggggggagtccaggccttggctttacccaacgaagagggtgccacaccattagacttagctttacgtgaaggacactccaagctggtggaagacgtcacaaattttcagggcagatggtccccaagcttctcccgagtgcagctcagtgaagaagcctccttgcattacattcactcatcggaaacgctgaccctgaccctgaaccacacagccgagcatttgttggaggcagatattaaactcttccggaaatacttttgggatagagcctttcttgtcaaggcctttgagccagaagccaggccagaggaaagaacagctatgccctccagcggtgcagaaactgaagaagagattaagaattcagtgtccagcagatcagcagctgaaaaggaagatataaagcgtgtcaaaagcctggtggttcaacacaatgaacatgaagaccagcacagcctagatttggatcgctccttcgatatcctaaaaaaatccaagccgccctcgacattgcttgctgcaggccggctttcagacatgctgaatggaggtgatgaagtctacgctaactgtatggtgattgatcaggttggtgatttggatatcagctatattaatatagagggaatcactgccactaccagccctgaatccagaggttgcactctgtggcctcagagcagcaaacacacccttcctacagaaaccagtcccagtgtgtacccacttagtgaaaatgtcgaagggacagcacacactgaagcccagcagtccttcatgtcaccatcaagttcgtgtgcttccaacttgaatctttcttttggttggcatggatttgaaaaggaacaaagtcatctaaagaaaagaagttctagccttgatgccttggacgccgacagtgaaggggaagggcattctgagccatcccacatctgttacactccagggtctcagagctcctcaagaactgggattcctagtggggatgaattggactcttttgagactaacactgaaccggattttaatatctccagggctgaatcccttcctctatcaagtaatctacagtcgaaggaatcactgctttctggagttcgctcacgttcttattcttgctcatcacccaaaatttctttaggaaaaactcgtttggtgcgtgaattaacagtatgcagttcaagtgaagagcaaagagcttacagcttatcggagccaccaagagaaaacagaattcaggaagaagaatgggataaatacatcatacctgccaaatcagagtctgaaaaatataaagtgagtcgaactttcagtttcctcatgaataggatgactagccctcggaataaatcaaagacaaaaagcaaggatgccaaagataaagagaagctgaatcgacatcagtttgccccaggaacattctctggggttctgcagtgtttggtttgtgataaaacactcctggggaaagagtcactgcagtgttctaactgtaatgcaaatgtgcacaaaggttgtaaagatgctgcgcctgcatgcaccaagaaattccaagagaaatataacaagaacaaaccacagaccatccttggaaattcttcatttagagacatcccacagcctggtctctccttgcacccttcttcctccgtgcctgttggattgccgactggaaggagggagactgtgggacaggtccatccattgtccagaagtgttccaggcaccaccttggaaagcttcaggaggtcagccacatccttggagtctgagagtgaccataacagctgcagaagcaggtctcattctgatgagctgctacagtccatgggctcttctccctctacagagtctttcataatggaagatgttgtggattcttctctgtggagtgacctcagcagtgatgcccaggagtttgaagcagaatcttggagtcttgtggtggatccctcattttgtaataggcaggagaaggatgtcatcaaaagacaggatgtcatttttgagctaatgcaaacagagatgcatcacatccagaccctgttcatcatgtctgagatcttcaggaaaggcatgaaagaggagctgcagctggaccacagcaccgtggataaaattttcccctgtttagatgagttgcttgaaatccacaggcatttcttctacagtatgaaggaacgaaggcaggaatcctgtgctggcagcgacaggaattttgtgatcgaccgaattggagatattttggtacaacagttttcagaagaaaatgcaagtaaaatgaagaaaatatatggagaattctgttgccatcataaagaagctgttaacctctttaaagaactccagcagaataaaaagtttcagaattttattaagctccgaaatagtaatcttttggctcgacgccgaggaattccagaatgcattctgttggtcactcagcgtattacaaaataccctgtcttggtggaaaggatattgcagtacacaaaggaaagaactgaggaacataaagacttacgcaaagcgctttgcttaattaaagacatgattgcaacagtggatttaaaagtcaatgaatatgagaaaaaccaaaaatggcttgagatcctaaataagattgaaaacaaaacatacacgaagctcaaaaatggacatgtgtttaggaagcaggcactgatgagtgaagaaaggactctgttatatgatggccttgtttactggaaaactgctacaggtcgtttcaaagatatcctagctctacttctaactgatgtgctgctctttttacaagaaaaagaccagaaatacatctttgcagccgttgatcagaagccatcagttatttcccttcaaaagcttattgctagagaagttgctaatgaggagagaggaatgtttctgatcagtgcttcatctgctggtcctgagatgtatgaaattcacaccaattccaaggaggaacgcaataactggatgagacggatccagcaggctgtagaaagttgtcctgaagaaaaagggggaaggacaagtgaatctgatgaagacaagaggaaagctgaagccagagtggccaaaattcagcaatgtcaagaaatactcactaaccaagaccaacaaatttgtgcgtatttggaggagaagctgcatatctatgctgaacttggagaactgagcggatttgaggacgtccatctagagccccacctccttattaaacctgacccaggcgagcctccccaggcagcctcattactggcagcagcactgaaagaagcattagtcacaggagggagagaaggaagaggctgttcggatgtggatcccgggatccagggtgtggtaaccgacttggccgtctctgatgcaggggagaaggtggaatgtagaaattttccaggttcttcacaatcagagattatacaagccatacagaatttaacccgtctcttatacagccttcaggccgccttgaccattcaggacagccacattgagatccacaggctggttctccagcagcaggagggcctgtctctcggccactctatcctccgaggcggccccttgcaggaccagaagtctcgcgacgcggacaggcagcatgaggagctggccaatgtgcaccagcttcagcaccagctccagcaggagcagcggcgctggctgcgcaggtgtgagcagcagcagcgggcgcaggcgaccagggagagctggctgcaggagcgggagcgggagtgccagtcgcaggaggagctgctgctgcggagccggggcgagctggacctccagctccaggagtaccagcacagcctggagcggctgagggagggccagcgcctggtggagagggagcaggcgaggatgcgggcccagcagagcctgctgggccactggaagcacggccggcagaggagcctgcccgcggtgctccttccgggtggccccgaggtaatggaacttaatcgatctgagagtttatgtcatgaaaactcattcttcatcaatgaagctttagtacaaatgtcatttaacactttcaacaaactgaatccatcagttatccatcaggatgccacttaccctacaactcaatctcattctgacttggtgaggactagtgaacatcaagtagacctcaaggtggacccttctcagccttcgaatgtcagtcacaaactgtggacagccgctggttccggccatcagatacttcctttccatgaaagcagcaaggattcttgtaaaaatggctccagtatgacaaagtgcagttgtacgttgacatctcccccgggactgtggactggaaccacatctactttgaaagatttggacacctcccacactgagtccccaaccccccatgactcaaattcacaccgccctcaactgcaggcgtttataacagaagcaaagctaaatctaccgacaaggacaatgaccagacaagatggggaaactggagatggagccaaagaaaatattgtttacctctaattgtgttgtcatttttccaaacaaaacaaaacactggcacttttgggagaaactttttgtctccattccttatgtatgtgtgattgtctgtgtccaaattgctttaagaataatatttaatatttcctggaagctcatttttttggcatgagtctaattaaattattgaaagccaccctgtttgtataatctttaacttatcaaatctaatttcagatttctggaggagaaactaacttgaataagcaggactattttaaaagttgttttgacgctagagtaaaattccatgtcacattttctacccaatcatctggatttcaagattccttttaagatctcaatgaagcaatttggatttaaagagtggtattcacaaggggtgaactttcacagtcagggcagttgcctcagtgcccacataggcagaggaggatgtgggaaagggtttttctcagctagtttttgtgtgctcatttcttctgggagcattaaaagtggtgatctgttacagtcactattcaactgggcacgtgttgtgattggtcagtcactgagccagggatacagtccggacttgcttagtacctaagcctaatgctggtggggtttcaagacatggttcagcatcatcttttaacaaggcccagaggcccagagcccccatcaagtcattttgatgtaaatagtgaactttgttagagccctcacttctatcaatcagctgtcctgtccctgccagcacctggagcaccaactaccactccctggaaagaacccttccctgcagttttttaaggacaaaactgcccactcctcattaagtttgctgcctggatacacttttccacaaaggaaaactggcatatcctgccttccgagtagtatgggtctctgtgtgagaaaccaggagatattttcatcttgttcggaaatacttgtatgtattttggtgtcaataaatatcttgtacctcatt

SEQ ID NO: 36691 - DNA, 5246 bp, Artificial Sequence
  derived and/or modified sequence
aaaccttggcttcagcccggccgccgccaggcgttggcatcgccggggagagccttccggactccgggcggcggctggctgggggcgcgttccgaggcgccctcaggcagggcgcgggggcagagcctcgcctgggttctggaggctgcggggccatcgctccagatgcgaaagccatggagttgagctgcagcgaagcacctctttacgggcagatgatgatctatgcgaagtttgacaaaaatgtgtatcttcctgaagatgctgagttttactttacttatgacggatctcatcagcgacatgtcatgattgcagagcgcatcgaggataacgttctccagtccagcgtcccaggccatgggcttcaggagacggtgacggtatctgtgtgcctctgctcggaaggttactctccggtgaccatgggctctggctcagtgacctacgtggacaacatggcttgcaggctggctcgtctgctggtgacgcaggccaatcgcctcacagcctgcagccaccagaccctgctgaccccatttgccttgacggcaggagcactgcctgccttggatgaggagctcgtgctggctctgacccatctggaattgcctctagagtggactgtgttgggaagttcttcacttgaagtatcttctcacagagaatctcttctacacctggctatgagatggggcctggctaaactttcccagttcttcttgtgtctcccggggggagtccaggccttggctttacccaacgaagagggtgccacaccattagacttagctttacgtgaaggacactccaagctggtggaagacgtcacaaattttcagggcagatggtccccaagcttctcccgagtgcagctcagtgaagaagcctccttgcattacattcactcatcggaaacgctgaccctgaccctgaaccacacagccgagcatttgttggaggcagatattaaactcttccggaaatacttttgggatagagcctttcttgtcaaggcctttgagccagaagccaggccagaggaaagaacagctatgccctccagcggtgcagaaactgaagaagagattaagaattcagtgtccagcagatcagcagctgaaaaggaagatataaagcgtgtcaaaagcctggtggttcaacacaatgaacatgaagaccagcacagcctagatttggatcgctccttcgatatcctaaaaaaatccaagccgccctcgacattgcttgctgcaggccggctttcagacatgctgaatggaggtgatgaagtctacgctaactgtatggtgattgatcaggttggtgatttggatatcagctatattaatatagagggaatcactgccactaccagccctgaatccagaggttgcactctgtggcctcagagcagcaaacacacccttcctacagaaaccagtcccagtgtgtacccacttagtgaaaatgtcgaagggacagcacacactgaagcccagcagtccttcatgtcaccatcaagttcgtgtgcttccaacttgaatctttcttttggttggcatggatttgaaaaggaacaaagtcatctaaagaaaagaagttctagccttgatgccttggacgccgacagtgaaggggaagggcattctgagccatcccacatctgttacactccagggtctcagagctcctcaagaactgggattcctagtggggatgaattggactcttttgagactaacactgaaccggattttaatatctccagggctgaatcccttcctctatcaagtaatctacagtcgaaggaatcactgctttctggagttcgctcacgttcttattcttgctcatcacccaaaatttctttaggaaaaactcgtttggtgcgtgaattaacagtatgcagttcaagtgaagagcaaagagcttacagcttatcggagccaccaagagaaaacagaattcaggaagaagaatgggataaatacatcatacctgccaaatcagagtctgaaaaatataaagtgagtcgaactttcagtttcctcatgaataggatgactagccctcggaataaatcaaagacaaaaagcaaggatgccaaagataaagagaagctgaatcgacatcagtttgccccaggaacattctctggggttctgcagtgtttggtttgtgataaaacactcctggggaaagagtcactgcagtgttctaactgtaatgcaaatgtgcacaaaggttgtaaagatgctgcgcctgcatgcaccaagaaattccaagagaaatataacaagaacaaaccacagaccatccttggaaattcttcatttagagacatcccacagcctggtctctccttgcacccttcttcctccgtgcctgttggattgccgactggaaggagggagactgtgggacaggtccatccattgtccagaagtgttccaggcaccaccttggaaagcttcaggaggtcagccacatccttggagtctgagagtgaccataacagctgcagaagcaggtctcattctgatgagctgctacagtccatgggctcttctccctctacagagtctttcataatggaagatgttgtggattcttctctgtggagtgacctcagcagtgatgcccaggagtttgaagcagaatcttggagtcttgtggtggatccctcattttgtaataggcaggagaaggatgtcatcaaaagacaggatgtcatttttgagctaatgcaaacagagatgcatcacatccagaccctgttcatcatgtctgagatcttcaggaaaggcatgaaagaggagctgcagctggaccacagcaccgtggataaaattttcccctgtttagatgagttgcttgaaatccacaggcatttcttctacagtatgaaggaacgaaggcaggaatcctgtgctggcagcgacaggaattttgtgatcgaccgaattggagatattttggtacaacagttttcagaagaaaatgcaagtaaaatgaagaaaatatatggagaattctgttgccatcataaagaagctgttaacctctttaaagaactccagcagaataaaaagtttcagaattttattaagctccgaaatagtaatcttttggctcgacgccgaggaattccagaatgcattctgttggtcactcagcgtattacaaaataccctgtcttggtggaaaggatattgcagtacacaaaggaaagaactgaggaacataaagacttacgcaaagcgctttgcttaattaaagacatgattgcaacagtggatttaaaagtcaatgaatatgagaaaaaccaaaaatggcttgagatcctaaataagattgaaaacaaaacatacacgaagctcaaaaatggacatgtgtttaggaagcaggcactgatgagtgaagaaaggactctgttatatgatggccttgtttactggaaaactgctacaggtcgtttcaaagatatcctagctctacttctaactgatgtgctgctctttttacaagaaaaagaccagaaatacatctttgcagccgttgatcagaagccatcagttatttcccttcaaaagcttattgctagagaagttgctaatgaggagagaggaatgtttctgatcagtgcttcatctgctggtcctgagatgtatgaaattcacaccaattccaaggaggaacgcaataactggatgagacggatccagcaggctgtagaaagttgtcctgaagaaaaagggggaaggacaagtgaatctgatgaagacaagaggaaagctgaagccagagtggccaaaattcagcaatgtcaagaaatactcactaaccaagaccaacaaatttgtgcgtatttggaggagaagctgcatatctatgctgaacttggagaactgagcggatttgaggacgtccatctagagccccacctccttattaaacctgacccaggcgagcctccccaggcagcctcattactggcagcagcactgaaagaagctgagagcctacaagttgcagtgaaggcctcacagatgggcgccgtgagtcaatcatgtgaggacagttgtggagactctgtcttggcggacacactcagttctcatgatgtaccaggatcaccgactgcctcattagtcacaggagggagagaaggaagaggctgttcggatgtggatcccgggatccagggtgtggtaaccgacttggccgtctctgatgcaggggagaaggtggaatgtagaaattttccaggttcttcacaatcagagattatacaagccatacagaatttaacccgtctcttatacagccttcaggccgccttgaccattcaggacagccacattgagatccacaggctggttctccagcagcaggagggcctgtctctcggccactctatcctccgaggcggccccttgcaggaccagaagtctcgcgacgcggacaggcagcatgaggagctggccaatgtgcaccagcttcagcaccagctccagcaggagcagcggcgctggctgcgcaggtgtgagcagcagcagcgggcgcaggcgaccagggagagctggctgcaggagcgggagcgggagtgccagtcgcaggaggagctgctgctgcggagccggggcgagctggacctccagctccaggagtaccagcacagcctggagcggctgagggagggccagcgcctggtggagagggagcaggcgaggatgcgggcccagcagagcctgctgggccactggaagcacggccggcagaggagcctgcccgcggtgctccttccgggtggccccgaggtaatggaacttaatcgatctgagagtttatgtcatgaaaactcattcttcatcaatgaagctttagtacaaatgtcatttaacactttcaacaaactgaatccatcagttatccatcaggatgccacttaccctacaactcaatctcattctgacttggtgaggactagtgaacatcaagtagacctcaaggtggacccttctcagccttcgaatgtcagtcacaaactgtggacagccgctggttccggccatcagatacttcctttccatgaaagcagcaaggattcttgtaaaaatggtaattaacactttaaacatcatctgtatagtttgaacaagaagttgtccctctgaatggttggctcttgtgtagagtgaatcaaagtcctccctagcatgggaataaatcggtactgatga

SEQ ID NO: 36692 - DNA, 6351 bp, Artificial Sequence
  derived and/or modified sequence
aaaccttggcttcagcccggccgccgccaggcgttggcatcgccggggagagccttccggactccgggcggcggctggctgggggcgcgttccgaggcgccctcaggcagggcgcgggggcagagcctcgcctgggttctggaggctgcggggccatcgctccagatgcgaaagccatggagttgagctgcagcgaagcacctctttacgggcagatgatgatctatgcgaagtttgacaaaaatgtgtatcttcctgaagatgctgagttttactttacttatgacggatctcatcagcgacatgtcatgattgcagagcgcatcgaggataacgttctccagtccagcgtcccaggccatgggcttcaggagacggtgacggtatctgtgtgcctctgctcggaaggttactctccggtgaccatgggctctggctcagtgacctacgtggacaacatggcttgcaggctggctcgtctgctggtgacgcaggccaatcgcctcacagcctgcagccaccagaccctgctgaccccatttgccttgacggcaggagcactgcctgccttggatgaggagctcgtgctggctctgacccatctggaattgcctctagagtggactgtgttgggaagttcttcacttgaagtatcttctcacagagaatctcttctacacctggctatgagatggggcctggctaaactttcccagttcttcttgtgtctcccggggggagtccaggccttggctttacccaacgaagagggtgccacaccattagacttagctttacgtgaaggacactccaagctggtggaagacgtcacaaattttcagggcagatggtccccaagcttctcccgagtgcagctcagtgaagaagcctccttgcattacattcactcatcggaaacgctgaccctgaccctgaaccacacagccgagcatttgttggaggcagatattaaactcttccggaaatacttttgggatagagcctttcttgtcaaggcctttgagccagaagccaggccagaggaaagaacagctatgccctccagcggtgcagaaactgaagaagagattaagaattcagtgtccagcagatcagcagctgaaaaggaagatataaagcgtgtcaaaagcctggtggttcaacacaatgaacatgaagaccagcacagcctagatttggatcgctccttcgatatcctaaaaaaatccaagccgccctcgacattgcttgctgcaggccggctttcagacatgctgaatggaggtgatgaagtctacgctaactgtatggtgattgatcaggttggtgatttggatatcagctatattaatatagagggaatcactgccactaccagccctgaatccagaggttgcactctgtggcctcagagcagcaaacacacccttcctacagaaaccagtcccagtgtgtacccacttagtgaaaatgtcgaagggacagcacacactgaagcccagcagtccttcatgtcaccatcaagttcgtgtgcttccaacttgaatctttcttttggttggcatggatttgaaaaggaacaaagtcatctaaagaaaagaagttctagccttgatgccttggacgccgacagtgaaggggaagggcattctgagccatcccacatctgttacactccagggtctcagagctcctcaagaactgggattcctagtggggatgaattggactcttttgagactaacactgaaccggattttaatatctccagggctgaatcccttcctctatcaagtaatctacagtcgaaggaatcactgctttctggagttcgctcacgttcttattcttgctcatcacccaaaatttctttaggaaaaactcgtttggtgcgtgaattaacagtatgcagttcaagtgaagagcaaagagcttacagcttatcggagccaccaagagaaaacagaattcaggaagaagaatgggataaatacatcatacctgccaaatcagagtctgaaaaatataaagtgagtcgaactttcagtttcctcatgaataggatgactagccctcggaataaatcaaagacaaaaagcaaggatgccaaagataaagagaagctgaatcgacatcagtttgccccaggaacattctctggggttctgcagtgtttggtttgtgataaaacactcctggggaaagagtcactgcagtgttctaactgtaatgcaaatgtgcacaaaggttgtaaagatgctgcgcctgcatgcaccaagaaattccaagagaaatataacaagaacaaaccacagaccatccttggaaattcttcatttagagacatcccacagcctggtctctccttgcacccttcttcctccgtgcctgttggattgccgactggaaggagggagactgtgggacaggtccatccattgtccagaagtgttccaggcaccaccttggaaagcttcaggaggtcagccacatccttggagtctgagagtgaccataacagctgcagaagcaggtctcattctgatgagctgctacagtccatgggctcttctccctctacagagtctttcataatggaagatgttgtggattcttctctgtggagtgacctcagcagtgatgcccaggagtttgaagcagaatcttggagtcttgtggtggatccctcattttgtaataggcaggagaaggatgtcatcaaaagacaggatgtcatttttgagctaatgcaaacagagatgcatcacatccagaccctgttcatcatgtctgagatcttcaggaaaggcatgaaagaggagctgcagctggaccacagcaccgtggataaaattttcccctgtttagatgagttgcttgaaatccacaggcatttcttctacagtatgaaggaacgaaggcaggaatcctgtgctggcagcgacaggaattttgtgatcgaccgaattggagatattttggtacaacagttttcagaagaaaatgcaagtaaaatgaagaaaatatatggagaattctgttgccatcataaagaagctgttaacctctttaaagaactccagcagaataaaaagtttcagaattttattaagctccgaaatagtaatcttttggctcgacgccgaggaattccagaatgcattctgttggtcactcagcgtattacaaaataccctgtcttggtggaaaggatattgcagtacacaaaggaaagaactgaggaacataaagacttacgcaaagcgctttgcttaattaaagacatgattgcaacagtggatttaaaagtcaatgaatatgagaaaaaccaaaaatggcttgagatcctaaataagattgaaaacaaaacatacacgaagctcaaaaatggacatgtgtttaggaagcaggcactgatgagtgaagaaaggactctgttatatgatggccttgtttactggaaaactgctacaggtcgtttcaaagatatcctagctctacttctaactgatgtgctgctctttttacaagaaaaagaccagaaatacatctttgcagccgttgatcagaagccatcagttatttcccttcaaaagcttattgctagagaagttgctaatgaggagagaggaatgtttctgatcagtgcttcatctgctggtcctgagatgtatgaaattcacaccaattccaaggaggaacgcaataactggatgagacggatccagcaggctgtagaaagttgtcctgaagaaaaagggggaaggacaagtgaatctgatgaagacaagaggaaagctgaagccagagtggccaaaattcagcaatgtcaagaaatactcactaaccaagaccaacaaatttgtgcgtatttggaggagaagctgcatatctatgctgaacttggagaactgagcggatttgaggacgtccatctagagccccacctccttattaaacctgacccaggcgagcctccccaggcagcctcattactggcagcagcactgaaagaagctgagagcctacaagttgcagtgaaggcctcacagatgggcgccgtgagtcaatcatgtgaggacagttgtggagactctgtcttggcggacacactcagttctcatgatgtaccaggatcaccgactgcctcattagtcacaggagggagagaaggaagaggctgttcggatgtggatcccgggatccagggtgtggtaaccgacttggccgtctctgatgcaggggagaaggtggaatgtagaaattttccaggttcttcacaatcagagattatacaagccatacagaatttaacccgtctcttatacagccttcaggccgccttgaccattcaggacagccacattgagatccacaggctggttctccagcagcaggagggcctgtctctcggccactctatcctccgaggcggccccttgcaggaccagaagtctcgcgacgcggacaggcagcatgaggagctggccaatgtgcaccagcttcagcaccagctccagcaggagcagcggcgctggctgcgcaggtgtgagcagcagcagcgggcgcaggcgaccagggagagctggctgcaggagcgggagcgggagtgccagtcgcaggaggagctgctgctgcggagccggggcgagctggacctccagctccaggagtaccagcacagcctggagcggctgagggagggccagcgcctggtggagagggagcaggcgaggatgcgggcccagcagagcctgctgggccactggaagcacggccggcagaggagcctgcccgcggtgctccttccgggtggccccgaggtaatggaacttaatcgatctgagagtttatgtcatgaaaactcattcttcatcaatgaagctttagtacaaatgtcatttaacactttcaacaaactgaatccatcagttatccatcaggatgccacttaccctacaactcaatctcattctgacttggtgaggactagtgaacatcaagtagacctcaaggtggacccttctcagccttcgaatgtcagtcacaaactgtggacagccgctggttccggccatcagatacttcctttccatgaaagcagcaaggattcttgtaaaaatggctccagtatgacaaagtgcagttgtacgttgacatctcccccgggactgtggactggaaccacatctactttgaaagatttggacacctcccacactgagtccccaaccccccatgactcaaattcacaccgccctcaactgcaggcgtttataacagaagcaaagctaaatctaccgacaaggacaatgaccagacaagatggggaaactggagatggagccaaagaaaatattgtttacctctaattgtgttgtcatttttccaaacaaaacaaaacactggcacttttgggagaaactttttgtctccattccttatgtatgtgtgattgtctgtgtccaaattgctttaagaataatatttaatatttcctggaagctcatttttttggcatgagtctaattaaattattgaaagccaccctgtttgtataatctttaacttatcaaatctaatttcagatttctggaggagaaactaacttgaataagcaggactattttaaaagttgttttgacgctagagtaaaattccatgtcacattttctacccaatcatctggatttcaagattccttttaagatctcaatgaagcaatttggatttaaagagtggtattcacaaggggtgaactttcacagtcagggcagttgcctcagtgcccacataggcagaggaggatgtgggaaagggtttttctcagctagtttttgtgtgctcatttcttctgggagcattaaaagtggtgatctgttacagtcactattcaactgggcacgtgttgtgattggtcagtcactgagccagggatacagtccggacttgcttagtacctaagcctaatgctggtggggtttcaagacatggttcagcatcatcttttaacaaggcccagaggcccagagcccccatcaagtcattttgatgtaaatagtgaactttgttagagccctcacttctatcaatcagctgtcctgtccctgccagcacctggagcaccaactaccactccctggaaagaacccttccctgcagttttttaaggacaaaactgcccactcctcattaagtttgctgcctggatacacttttccacaaaggaaaactggcatatcctgccttccgagtagtatgggtctctgtgtgagaaaccaggagatattttcatcttgttcggaaatacttgtatgtattttggtgtcaataaatatcttgtacctcatt

SEQ ID NO: 36693 - protein, 495 aa, Artificial Sequence
  derived and/or modified sequence
MAAEPQPSSLSYRTTGSTYLHPLSELLGIPLDQVNFVVCQLVALFAAFWFRIYLRPGTTSSDVRHAVATIFGIYFVIFCFGWYSVHLFVLVLMCYAIMVTASVSNIHRYSFFVAMGYLTICHISRIYIFHYGILTTDFSGPLMIVTQKITTLAFQVHDGLGRRAEDLSAEQHRLAIKVKPSFLEYLSYLLNFMSVIAGPCNNFKDYIAFIEGKHIHMKLLEVNWKRKGFHSLPEPSPTGAVIHKLGITLVSLLLFLTLTKTFPVTCLVDDWFVHKASFPARLCYLYVVMQASKPKYYFAWTLADAVNNAAGFGFSGVDKNGNFCWDLLSNLNIWKIETATSFKMYLENWNIQTATWLKCVCYQRVPWYPTVLTFILSALWHGVYPGYYFTFLTGILVTLAARAVRNNYRHYFLSSRALKAVYDAGTWAVTQLAVSYTVAPFVMLAVEPTISLYKSMYFYLHIISLLIILFLPMKPQAHTQRRPQTLNSINKRKTD

SEQ ID NO: 36694 - DNA, 1488 bp, Artificial Sequence
  derived and/or modified sequence
atggcggccgagcctcaaccatcgtccctcagttaccggaccactgggagcacatacctgcatcccctctccgagctgctcggaatccctctcgaccaagttaattttgttgtctgccagttagtagccttgtttgcagccttctggttcaggatctacttgcggccgggcacaacgagtagcgacgtgcgccatgctgtggctacaattttcggcatttatttcgtaattttttgtttcgggtggtacagtgtgcatctgttcgtgctggttctcatgtgttatgctataatggtcaccgctagcgtgtctaacattcatcgctattctttttttgtcgcgatggggtacttgacgatttgccatatatcccgcatctacatatttcactacggcatcttgaccacagatttctcggggccgttaatgatcgtgacacaaaagatcaccacattggcctttcaggttcatgatggtctgggcaggcgggctgaagacctatctgcagaacagcacagacttgctataaaggtcaagccatcgtttctggaatatctaagctatttacttaatttcatgtccgtcattgccggcccatgtaacaacttcaaggactacatcgccttcattgaaggcaagcacatccacatgaaattgctggaagtcaattggaaacgcaagggattccacagcctgccagaaccttcacccacgggtgccgtgatccataaactcggcattacactggtgtccttgcttctatttctgacactgaccaagacatttccagtcacttgcctagtcgatgattggttcgtgcataaggccagcttccctgcgagactgtgttatctctatgtcgttatgcaggcttctaagcctaagtattattttgcttggactcttgctgatgcagtcaacaatgcagcgggatttggctttagcggggtggataagaatggaaacttctgttgggaccttctgagtaatctgaatatttggaaaatcgagacagccacctcgttcaaaatgtatttggagaattggaatattcagacagctacttggttgaagtgtgtgtgttaccagcgggtgccttggtaccctaccgttctgacgttcatcctaagcgccctatggcacggagtatacccagggtattattttacctttctgacagggattctggtgaccctagctgctcgtgctgtgagaaacaattaccgccactacttcttaagctccagagccctgaaagctgtgtacgacgctggaacttgggcagtgacacagcttgccgtgagttacacagtggcgccctttgtcatgctagctgtggagcccaccatctccctgtataaatcaatgtatttttacttgcacattatttcactactcataattctgtttctgccaatgaaaccacaggcacatacgcagagacgccctcaaaccctcaactccataaacaaacgaaagacagattag

SEQ ID NO: 36695 - DNA, 1488 bp, Artificial Sequence
  derived and/or modified sequence
atggctgctgagccccagcccagcagcctgagctaccgcaccaccggcagcacctacctgcaccccctgtctgagctgctgggcatccccctggaccaggtgaactttgtggtgtgccagctggtggccctgtttgctgccttctggttccgcatctacctgcggcccggcaccaccagcagtgatgtgagacatgctgtggccaccatcttcggcatctactttgtgatcttctgcttcggctggtacagcgtgcacctgtttgtgctggtgctgatgtgctacgccatcatggtgacagcctctgtgagcaacatccaccgctacagcttctttgtggccatgggctacctgaccatctgccacatcagccgcatctacatcttccactacggcatcctgaccacagacttcagcggccccctgatgattgtgacccagaagatcaccaccctggccttccaggtgcatgatggcctgggccggcgggcagaggacctgtctgctgagcagcaccggctggccatcaaggtgaagcccagcttcctggagtacctgagctacctgctgaacttcatgtctgtgattgctggcccctgcaacaacttcaaggactacatcgccttcatcgagggcaagcacatccacatgaagctgctggaggtgaactggaagaggaagggcttccacagcctgcctgagcccagccccaccggggccgtcatccacaagctgggcatcaccctggtgtccctgctgctcttcctgaccctgaccaagaccttccctgtgacctgcctggtggatgactggtttgtgcacaaggccagcttccctgcccggctgtgctacctgtatgtggtgatgcaggccagcaagcccaagtactactttgcctggaccctggctgatgctgtgaacaatgctgctggcttcggcttctctggagtggacaagaatggaaacttctgctgggacctgctgagcaacctgaacatctggaagattgaaacagccaccagcttcaagatgtacctggagaactggaacatccagacagccacctggctgaagtgtgtgtgctaccagagggtgccctggtaccccaccgtgctgaccttcatcctgagcgccctgtggcatggagtgtacccaggctactacttcaccttcctgaccggcatcctggtgaccctggccgcccgggctgtgaggaacaactaccgccactacttcctgagcagccgggccctgaaggctgtgtatgatgctggcacctgggccgtgacccagctggccgtgtcctacacagtggccccctttgtgatgctggccgtggagcccaccatcagcctgtacaagtccatgtacttctacctgcacatcatcagcctgctgatcatcctcttcctgcccatgaagccccaggcccacacccagaggcggccccagaccctgaacagcatcaacaagaggaagacagactag

SEQ ID NO: 36696 - DNA, 1794 bp, Artificial Sequence
  derived and/or modified sequence
gagagtttgcgccggttcgcattccccggcctcccgttcgctcccccgcgaaccaggcggccgtgcgcctctcggggcaaccacccaagagcacccgggcgggaggacgccgagcagggggtgttgcgggctgggacaggggcagccacctcccgaagatgcaggatggcagcagagccgcagccgtccagcctttcctaccgcaccacgggctccacctacctgcacccgctcagcgagctcctgggcatcccgctggaccaggtgaattttgtggtatgccagcttgttgctctgtttgctgctttctggtttcgcatctacttacgtcctggtacaaccagctctgatgtccggcatgcggttgccaccatttttggcatctattttgtcatcttttgtttcggctggtactctgtgcatctttttgtgctggtgttaatgtgctatgcaatcatggtcactgctagtgtatccaatattcacagatattccttttttgtagcaatgggatatcttacaatatgccacatcagccgaatatacatcttccactatggaattctcactacggatttttctgggcctctgatgattgtcactcagaagatcacaaccttggcattccaggttcatgatggattaggtcgaagagctgaagacctttctgctgaacaacatcgacttgctatcaaagtgaaaccctcttttttggaatacttaagttaccttctcaatttcatgagtgtcatagctggtccttgtaacaatttcaaggactacatagccttcattgaggggaagcatatacacatgaagttgctggaggtgaactggaagcgaaaaggtttccacagcttgccagaaccttctcccacaggagctgtgatacacaagttgggcatcaccttggtgtctctccttttgtttttgacgctaacgaagacctttcctgtcacctgccttgtggatgactggtttgtccataaagcaagctttccggctcgactctgctacttatatgttgtcatgcaagcctcaaagcccaagtattactttgcatggacattagctgatgcagtgaataacgcagctggctttgggttcagcggagtggataagaatgggaatttctgttgggatctgctttcgaacctaaacatctggaaaattgagactgccacaagtttcaaaatgtacttggaaaactggaatattcagacagctacttggctaaagtgtgtgtgctatcagcgggttccatggtaccccacggtgctaaccttcatcctgtctgctttgtggcatggtgtctaccctggatactattttaccttcttaactggaattcttgtcacattagcagctagagcggtcaggaacaactacagacattacttcctttcttcaagagctctcaaggctgtgtatgatgcaggcacctgggccgtcactcagctggctgtctcttacacggtagcaccctttgtgatgttggcagttgaaccgaccatcagcttatacaagtccatgtacttttatttgcacatcataagtctcctgataatactatttctgccaatgaaaccacaagctcatacgcaaaggcggcctcagactctgaactctattaataagagaaaaacagattgatacctccaagagaagcggaacaagcaaaactgcagaacgttcgaaagatgagatgacaaggcttcaagggctcctccggtggcttagaggcgatgtttacatgcatctttattttgttcttttttaaagtgcagggagtat

SEQ ID NO: 36697 - DNA, 1488 bp, Artificial Sequence
  derived and/or modified sequence
atggccgccgagccccagcccagcagcctgagctaccggaccaccgggtcaacctacctgcatcccctgtctgagctgctcggcatccctctggatcaagtgaacttcgttgtgtgccagctggtggctctgtttgcggccttctggttcagaatctatctgagaccagggactacgtccagtgatgttagacacgccgtggcaactattttcggcatttattttgtgatattttgttttggctggtatagcgttcacctatttgtgctggttctcatgtgctatgctattatggtgacagcctccgtgtctaatatccataggtatagcttcttcgttgctatggggtacttaaccatctgtcatatatccaggatttatatcttccactacggcatcctgacaactgatttttccggccccctgatgattgtgacacagaaaattaccaccctcgcattccaggtgcacgacggactgggcaggcgagccgaagatttgagtgctgagcagcaccgactggccattaaagttaaacctagttttcttgagtacctgtcatacctgttgaatttcatgtccgtgattgccggcccgtgtaacaacttcaaggactacatagcattcatagaggggaaacacattcacatgaaactgttagaagtcaattggaagcgaaagggatttcactccttgccagagcccagccccaccggcgcagtgattcacaagttggggattactttggttagccttctcctcttcctcaccctgacaaaaaccttccccgtcacttgccttgtggacgattggtttgtccacaaagcctcatttcccgcccgactgtgctacctttatgtcgtaatgcaagccagcaaaccgaaatattacttcgcttggacccttgccgacgcagtcaataacgcagccggctttggctttagtggcgtcgataagaacgggaacttctgctgggacctactctccaaccttaatatctggaaaattgaaactgcgaccagctttaagatgtacttggagaactggaatatacagacagcaacttggctgaagtgcgtttgttaccaacgcgtgccctggtacccaactgtcctgaccttcatcctttctgccctgtggcatggggtgtatccaggatactatttcacatttctgaccggtattctcgttactctggccgccagggccgtgaggaacaattacaggcattatttcttgtcaagcagggctttaaaggcagtatatgatgccggaacatgggctgtgacgcagctcgccgtatcctacacagttgccccctttgtgatgctggcggtggagccaaccatctctctgtacaagagcatgtacttctatctccatataatcagcctgctgatcattctgtttcttcctatgaagccccaggcccacacacaacggcggccacagaccctcaacagtattaacaagcgcaagacagactag

SEQ ID NO: 36698 - DNA, 1488 bp, Artificial Sequence
  derived and/or modified sequence
atggcagctgagccccagccaagctccctttcctaccggaccaccgggtccacttatttgcatcccctgtctgagctgcttggcattccgcttgaccaggtgaatttcgtcgtgtgccagttggtggcactgtttgctgccttctggttccgaatttatctgagaccgggaacgacatcatctgacgtacggcacgctgtggcgacaatctttgggatatatttcgttattttctgtttcggctggtattccgtgcatctcttcgtcttggtactgatgtgctacgctattatggttaccgctagcgtcagcaacattcaccggtattctttcttcgtggcaatgggctatctgacgatttgccacataagtaggatttatatcttccactatggaatcctgacaactgatttctcagggccactgatgatcgtgactcagaaaatcaccaccttggcgtttcaggtgcatgatgggctgggtaggagggcggaagatttgagcgcagagcagcatcgattagctatcaaggtcaagccttccttcttggaatatttatcctacctgctgaactttatgagcgttattgccggaccttgcaataattttaaagattatattgccttcatcgaggggaaacatatccatatgaaattgcttgaggttaattggaagagaaagggatttcattccctccctgagccttctcccaccggcgctgtgatccataagttgggtattactttagtaagccttctcctgttcctgaccctgaccaagacttttcccgtgacctgcctagtggatgattggtttgttcacaaagcttcttttccagccagattatgttatctttacgtcgtgatgcaggctagtaaacctaaatactatttcgcatggactctggcagacgccgttaataacgctgccggattcggtttctctggcgtagataaaaacggcaacttttgttgggatctattgtcgaatctaaacatctggaaaatagagaccgctactagttttaaaatgtatttagagaactggaatattcagactgctacctggctcaagtgtgtatgctaccagcgagtgccgtggtaccctacagtgttaacctttatcctgagcgccctgtggcatggggtgtatccaggatattacttcaccttccttactgggatccttgtgaccctggcagccagagccgtgaggaacaactatagacattacttcctgagctccagggctctgaaggcagtctatgacgccggtacttgggcagtgactcaactggcagtgtcctacacagttgccccttttgtgatgttagcagtagagcccaccatctccctgtacaagtctatgtatttctacttacacatcatttcgttactgataattctgtttctccctatgaagccgcaagcgcacacgcaacgccgtccgcagaccctgaattctattaataagcggaagaccgattag

SEQ ID NO: 36699 - DNA, 1488 bp, Artificial Sequence
  derived and/or modified sequence
atggccgccgagccccagcccagcagcctgagctacagaaccaccggcagcacctacctgcaccccctgagcgagctgctgggcatccccctggaccaggtgaacttcgtggtgtgccagctggtggccctgttcgccgccttctggttcagaatctacctgagacccggcaccaccagcagcgacgtgagacacgccgtggccaccatcttcggcatctacttcgtgatcttctgcttcggctggtacagcgtgcacctgttcgtgctggtgctgatgtgctacgccatcatggtgaccgccagcgtgagcaacatccacagatacagcttcttcgtggccatgggctacctgaccatctgccacatcagcagaatctacatcttccactacggcatcctgaccaccgacttcagcggccccctgatgatcgtgacccagaagatcaccaccctggccttccaggtgcacgacggcctgggcagaagagccgaggacctgagcgccgagcagcacagactggccatcaaggtgaagcccagcttcctggagtacctgagctacctgctgaacttcatgagcgtgatcgccggcccctgcaacaacttcaaggactacatcgccttcatcgagggcaagcacatccacatgaagctgctggaggtgaactggaagagaaagggcttccacagcctgcccgagcccagccccaccggcgccgtgatccacaagctgggcatcaccctggtgagcctgctgctgttcctgaccctgaccaagaccttccccgtgacctgcctggtggacgactggttcgtgcacaaggccagcttccccgccagactgtgctacctgtacgtggtgatgcaggccagcaagcccaagtactacttcgcctggaccctggccgacgccgtgaacaacgccgccggcttcggcttcagcggcgtggacaagaacggcaacttctgctgggacctgctgagcaacctgaacatctggaagatcgagaccgccaccagcttcaagatgtacctggagaactggaacatccagaccgccacctggctgaagtgcgtgtgctaccagagagtgccctggtaccccaccgtgctgaccttcatcctgagcgccctgtggcacggcgtgtaccccggctactacttcaccttcctgaccggcatcctggtgaccctggccgccagagccgtgagaaacaactacagacactacttcctgagcagcagagccctgaaggccgtgtacgacgccggcacctgggccgtgacccagctggccgtgagctacaccgtggcccccttcgtgatgctggccgtggagcccaccatcagcctgtacaagagcatgtacttctacctgcacatcatcagcctgctgatcatcctgttcctgcccatgaagccccaggcccacacccagagaagaccccagaccctgaacagcatcaacaagagaaagaccgactag

SEQ ID NO: 36700 - protein, 845 aa, Artificial Sequence
  derived and/or modified sequence
MRTEAVVNSQGQTDYLTKDSDQDVALKLAQERAEIVAKYDRGREGAEIEPWEDADYLVYKVTDRFGFLHEEELPDHNVAVERQKHLEIERTTKWLKMLKGWEKYKNTEKFHRRIYKGIPLQLRGEVWALLLEIPKMKEETRDLYSKLKHRARGCSPDIRQIDLDVNRTFRDHIMFRDRYGVKQQSLFHVLAAYSIYNTEVGYCQGMSQITALLLMYMNEEDAFWALVKLFSGPKHAMHGFFVQGFPKLLRFQEHHEKILNKFLSKLKQHLDSQEIYTSFYTMKWFFQCFLDRTPFTLNLRIWDIYIFEGERVLTAMSYTILKLHKKHLMKLSMEELVEFFQETLAKDFFFEDDFVIEQLQISMTELKRAKLDLPEPGKEDEYPKKPLGQLPPELQSWGVHHLSNGQRSVGRPSPLASGRRESGAPHRRHEHSPHPQSRTGTPERAQPPRRKSVEEESKKLKDEADFQRKLPSGPQDSSRQYNHAAANQNSNATSNIRKEFVPKWNKPSDVSATERTAKYTMEGKGRAAHPALAVTVPGPAEVRVSNVRPKMKALDAEDGKRGSTASQYDNVPGPELDSGASVEEALERAYSQSPRHALYPPSPRKHAEPSSSPSKVSNKFTFKVQPPSHARYPSQLDGEARGLAHPPSYSNPPVYHGNSPKHFPTANSSFASPQFSPGTQLNPSRRPHGSTLSVSASPEKSYSRPSPLVLPSSRIEVLPVDTGAGGYSGNSGSPKNGKLIIPPVDYLPDNRTWSEVSYTYRPETQGQSWTRDASRGNLPKYSAFQLAPFQDHGLPAVSVDSPVRYKASPAAEDASPSGYPYSGPPPPAYHYRNRDGLSIQESVLL

SEQ ID NO: 36701 - DNA, 2538 bp, Artificial Sequence
  derived and/or modified sequence
atgagaaccgaggccgtggtgaacagccagggccagaccgactacctgaccaaggacagcgaccaggacgtggccctgaagctggcccaggagagagccgagatcgtggccaagtacgacagaggcagagagggcgccgagatcgagccctgggaggacgccgactacctggtgtacaaggtgaccgacagattcggcttcctgcacgaggaggagctgcccgaccacaacgtggccgtggagagacagaagcacctggagatcgagagaaccaccaagtggctgaagatgctgaagggctgggagaagtacaagaacaccgagaagttccacagaagaatctacaagggcatccccctgcagctgagaggcgaggtgtgggccctgctgctggagatccccaagatgaaggaggagaccagagacctgtacagcaagctgaagcacagagccagaggctgcagccccgacatcagacagatcgacctggacgtgaacagaaccttcagagaccacatcatgttcagagacagatacggcgtgaagcagcagagcctgttccacgtgctggccgcctacagcatctacaacaccgaggtgggctactgccagggcatgagccagatcaccgccctgctgctgatgtacatgaacgaggaggacgccttctgggccctggtgaagctgttcagcggccccaagcacgccatgcacggcttcttcgtgcagggcttccccaagctgctgagattccaggagcaccacgagaagatcctgaacaagttcctgagcaagctgaagcagcacctggacagccaggagatctacaccagcttctacaccatgaagtggttcttccagtgcttcctggacagaacccccttcaccctgaacctgagaatctgggacatctacatcttcgagggcgagagagtgctgaccgccatgagctacaccatcctgaagctgcacaagaagcacctgatgaagctgagcatggaggagctggtggagttcttccaggagaccctggccaaggacttcttcttcgaggacgacttcgtgatcgagcagctgcagatcagcatgaccgagctgaagagagccaagctggacctgcccgagcccggcaaggaggacgagtaccccaagaagcccctgggccagctgccccccgagctgcagagctggggcgtgcaccacctgagcaacggccagagaagcgtgggcagacccagccccctggccagcggcagaagagagagcggcgccccccacagaagacacgagcacagcccccacccccagagcagaaccggcacccccgagagagcccagccccccagaagaaagagcgtggaggaggagagcaagaagctgaaggacgaggccgacttccagagaaagctgcccagcggcccccaggacagcagcagacagtacaaccacgccgccgccaaccagaacagcaacgccaccagcaacatcagaaaggagttcgtgcccaagtggaacaagcccagcgacgtgagcgccaccgagagaaccgccaagtacaccatggagggcaagggcagagccgcccaccccgccctggccgtgaccgtgcccggccccgccgaggtgagagtgagcaacgtgagacccaagatgaaggccctggacgccgaggacggcaagagaggcagcaccgccagccagtacgacaacgtgcccggccccgagctggacagcggcgccagcgtggaggaggccctggagagagcctacagccagagccccagacacgccctgtacccccccagccccagaaagcacgccgagcccagcagcagccccagcaaggtgagcaacaagttcaccttcaaggtgcagccccccagccacgccagataccccagccagctggacggcgaggccagaggcctggcccacccccccagctacagcaacccccccgtgtaccacggcaacagccccaagcacttccccaccgccaacagcagcttcgccagcccccagttcagccccggcacccagctgaaccccagcagaagaccccacggcagcaccctgagcgtgagcgccagccccgagaagagctacagcagacccagccccctggtgctgcccagcagcagaatcgaggtgctgcccgtggacaccggcgccggcggctacagcggcaacagcggcagccccaagaacggcaagctgatcatcccccccgtggactacctgcccgacaacagaacctggagcgaggtgagctacacctacagacccgagacccagggccagagctggaccagagacgccagcagaggcaacctgcccaagtacagcgccttccagctggcccccttccaggaccacggcctgcccgccgtgagcgtggacagccccgtgagatacaaggccagccccgccgccgaggacgccagccccagcggctacccctacagcggcccccccccccccgcctaccactacagaaacagagacggcctgagcatccaggagagcgtgctgctgtag

SEQ ID NO: 36702 - DNA, 2538 bp, Artificial Sequence
  derived and/or modified sequence
atgcgtaccgaggccgtcgtgaacagtcaaggacaaaccgattatcttaccaaagactcagatcaggacgtcgccttgaagctggctcaggagagggcagagattgtggctaagtatgaccggggtcgtgagggcgcagaaattgagccgtgggaggatgctgactacctggtttacaaagtgaccgaccgattcggcttcctgcacgaagaagaacttccggatcataatgtggctgttgagagacagaaacaccttgaaattgaacgaacgactaagtggttgaaaatgctaaagggatgggagaaatataagaatactgaaaaattccatcggaggatctacaagggcataccgctgcaactgcgaggggaagtgtgggctcttctgctggaaattcctaagatgaaggaggagaccagagacttatatagcaagctcaaacatagagccagaggatgtagccctgacattagacaaattgacctggatgttaatcggacttttcgagatcacattatgttccgagaccggtacggcgttaagcagcaatccctcttccatgtgctcgcggcgtattccatctataatacagaggtcggctactgtcaaggcatgagtcagatcaccgctctgctgctgatgtacatgaatgaggaggacgcattctgggcgctggtgaaactgttttcagggcctaagcacgctatgcacgggtttttcgtccagggctttcctaaattgctacgctttcaggaacaccacgaaaagattctaaataagttcctaagcaaattgaaacagcacctggattcccaggagatttacaccagcttctacaccatgaagtggttcttccaatgtttcctggaccgaacaccctttactctgaatcttcgtatttgggatatctatatcttcgagggcgagcgtgtgctgaccgcgatgagctatactattctcaagctgcataaaaaacacctcatgaaactctccatggaggagttggtggaattttttcaggagaccctggctaaggacttttttttcgaagacgactttgtgatagaacaattgcagatctctatgactgaacttaaacgggccaagctggatcttcctgagccagggaaagaagacgagtatccgaagaaaccattgggccagctgcctcccgagctccaatcctggggcgtgcaccacttatcaaacggacagcggagcgtgggacgcccctccccgttggcatcagggcggagagaaagcggagctccacacaggaggcatgagcactccccacacccccagtcgcgaactgggactccagagcgggcacagccaccaagacggaaaagtgtggaggaggaatccaaaaaactcaaagatgaagccgactttcagaggaaacttccgtctggtccacaagactccagtcggcagtacaatcatgcagcagccaaccagaacagtaacgccacaagtaatattaggaaggaattcgtgcctaagtggaacaagccttcagacgtgtcagccacggagagaacagccaaatacacaatggagggtaaaggtcgtgccgctcatcctgctttggcagtcaccgtgcctggccccgcggaagtgagggtgtccaatgtaagacctaagatgaaggcgctagatgccgaggacggcaaacgcgggagcacagcttcacagtacgataacgtgccaggacccgaacttgattccggagctagcgtggaagaagcacttgagagagcctactcacagagtccacgacacgctctgtatccccccagcccgagaaagcatgccgagcctagcagctccccttctaaggtgagcaataagtttacttttaaggttcagcccccctctcatgcacggtatccttcccagttagacggagaggctaggggacttgcccacccaccttcttatagcaaccccccagtatatcacggaaacagcccaaagcacttccctactgccaacagctccttcgcttcaccacaattctctcccggaacccagcttaatccgagccgccgcccccacggctctacattgagtgttagcgccagtccagaaaagtcctacagcaggccgagtcctctagtcctgccctccagccgcatcgaagttctgcctgttgacacaggagctggggggtacagtggcaattccggtagtcccaagaatggaaaactgataatccccccagtcgactatctccccgacaataggacctggtccgaagtgagctacacatataggcctgagacacagggtcagtcgtggacccgcgatgctagcagaggcaacctgccaaagtacagcgcgttccagttggctccatttcaggatcatggccttcccgcagtcagcgtcgattctcccgttcgctacaaggcttctccggctgctgaggatgccagtccaagtggctacccctattcaggacctcccccgccagcctaccactaccggaacagagacggcctgagtatacaggagtctgtccttctgtag

SEQ ID NO: 36703 - DNA, 2538 bp, Artificial Sequence
  derived and/or modified sequence
atgaggacagaagctgtggtgaacagccagggccagacagactacctgaccaaggacagcgaccaggatgtggccctgaagctggcccaggagagagctgagatcgtggccaagtatgaccggggccgggagggcgctgagattgagccctgggaggatgctgactacctggtgtacaaggtgacagacagatttggcttcctgcacgaggaggagctgcctgaccacaacgtggccgtggagcggcagaagcacctggagattgaaagaaccaccaagtggctgaagatgctgaagggctgggagaagtacaagaacacagagaagttccaccggcgcatctacaagggcatccccctgcagctgcggggggaggtgtgggccctgctgctggagatccccaagatgaaggaggagacccgggacctgtacagcaagctgaagcaccgggcccggggctgcagcccagacatccggcagattgacctggatgtgaacagaaccttccgggaccacatcatgttccgggacagatatggagtgaagcagcagagcctcttccacgtgctggccgcctacagcatctacaacacagaggtgggctactgccagggcatgagccagatcacagccctgctgctgatgtacatgaatgaggaggatgccttctgggccctggtgaagctgttcagcggccccaagcacgccatgcacggcttctttgtgcagggcttccccaagctgctgcgcttccaggagcaccacgagaagatcctgaacaagttcctgagcaagctgaagcagcacctggacagccaggagatctacaccagcttctacaccatgaagtggttcttccagtgcttcctggacaggacccccttcaccctgaacctgcgcatctgggacatctacatctttgaaggagagcgggtgctgacagccatgagctacaccatcctgaagctgcacaagaagcacctgatgaagctgtccatggaggagctggtggagttcttccaggagaccctggccaaggacttcttctttgaagatgactttgtgattgagcagctgcagatctccatgacagagctgaagagggccaagctggacctgcctgagcccgggaaggaggatgagtaccccaagaagcccctgggccagctgcccccagagctgcagagctggggcgtgcaccacctgagcaatggccagaggtctgtgggccggcccagccccctggccagcggcagaagagagagcggggccccccacagaagacatgagcacagcccccacccccagagcaggacaggcaccccagagcgggcccagccccccaggaggaagtctgtggaggaggagagcaagaagctgaaggatgaggccgacttccagaggaagctgcccagcggcccccaggacagcagccggcagtacaaccacgccgccgccaaccagaacagcaatgccaccagcaacatcaggaaggagtttgtgcccaagtggaacaagcccagtgatgtgtctgccacagagaggacagccaagtacaccatggagggcaagggccgggccgcccacccagccctggccgtgacagtgcccggccctgctgaggtgcgggtgtccaatgtgcggcccaagatgaaggccctggatgctgaagatggcaagaggggcagcacagccagccagtatgacaacgtgcccggccctgagctggacagcggggcctctgtggaggaggccctggagcgggcctacagccagagccccaggcatgccctgtacccacccagccccaggaagcatgctgagcccagcagcagccccagcaaggtgagcaacaagttcaccttcaaggtgcagccccccagccacgcccgctaccccagccagctggatggagaggcccggggcctggcccacccccccagctacagcaacccccctgtgtaccacggcaacagccccaagcacttccccacagccaacagcagctttgccagcccccagttcagccctggcacccagctgaaccccagcagaagaccccacggcagcaccctgtctgtgtctgccagccctgagaagagctacagccggcccagccccctggtgctgcccagcagcagaattgaggtgctgcctgtggacaccggggccggcggctacagcggcaacagcggcagccccaagaatggcaagctgatcatcccccctgtggactacctgcctgacaacagaacctggagcgaggtgtcctacacctacagacctgagacccagggccagagctggaccagagatgccagccggggcaacctgcccaagtacagcgccttccagctggcccccttccaggaccacggcctgcctgctgtgtctgtggacagccctgtgcgctacaaggccagccctgctgctgaagatgccagccccagcggctacccctacagcggccccccacctccagcctaccactacagaaacagagatggcctgagcatccaggagagcgtgctgctgtag

SEQ ID NO: 36704 - DNA, 2538 bp, Artificial Sequence
  derived and/or modified sequence
atgcggaccgaggccgtggtgaacagccagggccagaccgactacctgacaaaggactcagaccaggacgtggcacttaagctcgcacaggagagagctgaaatagtggccaagtacgacaggggtagggagggcgctgaaatagaaccctgggaagacgcagattatctggtttacaaagtcacggaccgcttcgggttcctccatgaggaagagctgccggaccacaacgtggcggtcgaacgccagaagcacctggagattgagagaacaaccaagtggctcaagatgctgaaggggtgggagaaatataagaacaccgaaaagtttcatcgtaggatctacaaaggcattccacttcagcttaggggcgaggtctgggcgctgctattagaaatcccgaagatgaaggaagagactagagatctgtatagcaagctgaagcatagagcaagggggtgttcccctgacatcagacaaatcgaccttgacgtgaacaggacttttcgcgaccacatcatgttcagagacaggtacggagtaaagcagcaatcactgttccacgtcctggcagcctattctatatataatacagaggtgggctactgccaggggatgtcacagatcaccgctctgctacttatgtatatgaacgaagaagatgctttctgggcgctcgtgaagctgttctccgggccaaagcacgccatgcacgggttcttcgtgcagggctttccaaagctgcttcggttccaagagcatcatgaaaagattttaaacaagtttctaagtaaactgaagcaacatctcgatagtcaagaaatctatacctcgttctatacaatgaaatggttcttccagtgctttctggaccgaaccccttttacattgaatcttagaatttgggacatatacatctttgagggcgagcgggttctcaccgctatgtcttataccattctcaagttgcacaaaaagcacttaatgaagctgagcatggaggaacttgtggaattttttcaggaaaccctggcgaaggattttttctttgaagatgattttgtgatcgaacagcttcagatctctatgactgagctgaaacgcgccaaactggacctgcccgaacccgggaaggaggatgagtatcccaagaagccactaggacagctcccacccgagttgcaaagctggggcgttcaccacctgagcaacgggcaaaggtcagttggcagacctagcccacttgcttctggcaggcgggaatcaggggctccgcatcgccggcacgaacacagcccccacccccaatcacggaccgggacacccgagcgtgcccagccaccgcggcgtaaaagcgtggaggaggagtctaaaaaactgaaagatgaagctgactttcaaagaaaactgccctcaggacctcaggattcatctagacagtacaaccatgcggccgcaaatcaaaacagtaatgctacatccaatataaggaaggagtttgtccctaaatggaataaaccttccgatgtttcagctacggaaaggacagctaagtatactatggagggcaaaggacgcgccgcccaccctgctttagcagtgactgtgcccggcccggccgaagttcgggtcagcaacgtcagaccaaaaatgaaggctctcgacgctgaagatggcaagcgtggctctacagcctcgcagtatgataacgtccccggcccagaactcgactctggtgcgagtgtggaagaagcgctcgaacgcgcttacagccaaagccctagacacgcgctttaccccccctcccccagaaagcatgctgagccttccagctccccgagcaaggtttcaaataagttcacattcaaggtccagccacctagccacgcccgctacccctcccaactggatggggaggctcggggactcgcccaccctccaagttattccaacccaccagtgtatcacgggaactcccccaaacactttcctaccgccaatagttcctttgcctcaccacagttttccccaggaacccagttaaatccgagcaggcgaccccacggatccactctcagcgtctcagcgtccccggagaagagttattctcggccaagtccactagtgctcccatccagtcgcattgaggtattgcctgtagatactggggccgggggctattctgggaatagtggcagtcctaagaatggtaagctgattatcccacctgttgactacctgccggataatcgcacttggtccgaagtatcctacacataccggcctgaaacacagggtcagtcatggactcgggatgcaagccggggcaacctgcctaagtactcagccttccagctggcgcccttccaggaccacgggctgcctgccgtatctgttgactctccggtgcgctacaaggcctcacccgccgccgaagatgcctctccgagcggctatccttattccggaccccctccccccgcctatcactaccgcaatcgagatgggttgagcatccaagagagcgtgctgctctag

SEQ ID NO: 36705 - DNA, 2538 bp, Artificial Sequence
  derived and/or modified sequence
atgcggaccgaggccgtggtaaacagtcagggccaaacggattacttaacgaaggattctgatcaggacgtggccctcaaactggcacaggaacgcgctgagatcgttgcgaaatatgaccgtgggcgagaaggggcagagatcgagccatgggaagacgccgattacttggtgtacaaggtgacagacagatttggctttctccacgaggaagagctgcctgaccataatgtggcagtcgaaaggcagaagcacctggaaattgagaggactacaaagtggctgaaaatgctcaaaggttgggagaagtataagaacaccgagaaattccatcggaggatctataaggggatacctctgcagctgaggggagaagtatgggctctactgcttgaaatcccgaaaatgaaagaggagaccagagatctgtattctaaattaaagcaccgggctcgcggttgtagccctgacattaggcagattgatctagacgtcaaccggaccttcagggaccatatcatgttcagggaccggtacggcgtgaaacagcagtctctttttcacgtgctagccgcatactcaatttataatacagaggtgggctattgccaaggcatgtctcagatcacagctctcctcctcatgtacatgaacgaggaagatgcattctgggctctggtcaagctctttagtggcccaaaacatgcaatgcacggctttttcgtgcaaggatttcctaaattgctacgatttcaggagcatcacgagaaaatactcaataagtttctatccaagttgaagcagcaccttgactcccaagagatttacaccagcttctatacaatgaagtggtttttccagtgcttcctggatagaacccccttcaccttgaatctaaggatctgggatatttatatcttcgaaggcgaaagggtgttgactgccatgtcctacactatattaaagctccacaagaaacaccttatgaagttatctatggaggagctggtggagttcttccaagagactcttgccaaagacttctttttcgaggacgacttcgtcattgagcagctgcagatctcgatgaccgagctcaagcgcgcaaagctggacttacccgaaccaggaaaggaggatgagtacccgaagaagcccctgggccagttgccacctgagctccagagttggggcgtgcatcatttatctaacggccagcggtctgtggggcgtccatcccccttggcctcggggaggagagaatcaggcgctccacacagacgccacgagcacagtcctcaccctcagagccggactggtaccccagagcgagcccagcccccaaggcggaagtctgtggaagaagagagcaagaagctcaaggatgaggccgattttcagcggaagctcccctccggcccacaggatagctcccggcagtataatcatgcagctgccaaccagaattctaacgcaacgagtaacatccggaaggagttcgtgcccaagtggaataagccgagtgacgtgagcgcaactgagcggaccgctaagtacacaatggagggtaagggcagggccgcacatcccgctctggctgtaactgtccccggtcccgctgaagtacgcgtgtccaacgtgcgacccaagatgaaagcactggatgctgaggacggtaagaggggaagtacggcatcacagtacgataacgtgccaggtccagaactcgactcaggcgcatccgtcgaggaggcactggagcgggcatacagccaatccccacgacacgccctgtatcctcccagtcccaggaagcatgctgagcccagttctagcccctctaaggtcagcaataaattcacgtttaaagtacagccgccaagccacgctcgctacccctcccagttggatggtgaagccaggggtcttgcccaccccccttcctattctaacccgccagtatatcacggaaattctcccaagcacttccctactgcaaactcttccttcgcatccccacagttctcccctggcacccagttgaacccatcacgacgaccacatggatccacattatccgtctcagcctccccagaaaaatcttactctcgaccaagcccacttgtgctcccgagttccagaatcgaggtgttacccgtggatacaggtgccggaggttatagtggtaatagcgggtcgccaaagaacgggaagttaattattccgccagttgattacctgcctgacaatcggacatggtctgaggtttcttacacttaccgcccagagacacaaggacagtcgtggacacgcgacgcgagccgcggaaacctgcctaagtatagcgcatttcaattagcaccattccaagaccacggtctgcccgcagtgtccgtggatagtcccgttaggtacaaagcttctcccgctgccgaggatgcctctccctcaggttacccttactcgggtcctccccctccagcgtaccattatcgcaatcgcgacggactgagcattcaggaaagcgtcctgctgtag

SEQ ID NO: 36706 - DNA, 4512 bp, Artificial Sequence
  derived and/or modified sequence
actataaaataataatgaaatcttggaatagataagttactctatgaggactgaagctgttgttaattcccaaggccagactgattatctcacaaaggattcagaccaggatgtagcactcaaacttgcccaggagcgagctgaaatagttgctaaatatgacagaggacgagaaggtgcagagattgaaccttgggaagatgctgattaccttgtttacaaagtcacagatagatttggctttttacatgaggaggagctcccagatcataatgtggctgtggaacggcaaaagcacctggaaattgaaagaactaccaaatggctgaaaatgctgaaaggatgggaaaaatacaagaacactgaaaagtttcataggcgaatttacaaaggaataccactccagctcagaggtgaagtctgggccctccttcttgagatccctaaaatgaaagaagaaacaagggacctgtatagtaaattaaaacacagagcacggggctgttcacctgacatcagacaaatagacctggatgtcaaccgcacatttcgggaccacattatgtttagagacagatatggtgttaagcaacaatccttattccatgtgcttgctgcctattctatttataacacggaagtcgggtattgtcaggggatgagccagatcacagctttactcctcatgtatatgaacgaggaagatgccttctgggccctggtcaaactcttctcaggccctaaacatgccatgcatggcttttttgtccaaggttttcctaaactcttgaggtttcaagaacatcatgaaaaaatactgaacaaatttctgtccaagcttaagcaacacttggattctcaagaaatctacacaagtttttacacaatgaaatggttttttcagtgtttccttgatcgtactccctttacactaaacctcagaatatgggatatctacatctttgaaggagaacgagttcttactgctatgtcttacaccatcttaaaattacacaaaaaacatctaatgaaattgtccatggaagaacttgtagaattttttcaggagaccctggcaaaggattttttctttgaagatgattttgtgatagagcaacttcagatttctatgacagaactaaagcgggcaaagttagaccttccagaacctggtaaagaggatgaatatccaaagaagcccttggggcagcttccacctgaacttcagtcttggggcgtccatcacttgagcaacggacagaggagcgtgggccggccgagcccgctggccagcggcaggagggagagcggggcgccccacaggaggcacgagcactccccgcacccccagagcaggaccgggacgcccgagagagcacagccgccaagacggaaatcggtggaggaggagagcaaaaagcttaaagatgaggcagattttcaaagaaaactcccatcgggtccacaggacagttccaggcaatataatcacgcagctgccaaccaaaatagcaacgccacttcaaatatcaggaaggagtttgtgcccaaatggaataaaccgtcagacgtctcagctacagagagaactgccaaatacaccatggaaggcaaaggtcgagcagcgcaccccgcgctcgcagttaccgtcccaggtcctgccgaggtgcgggtgtcaaacgtgcggccaaagatgaaggccctggatgctgaggacgggaagcggggctccactgcatcgcagtacgacaacgtgccaggcccggagctggacagcggcgcttccgtggaggaggcgctggaaagggcttactcccagagcccccggcatgccctttaccctcctagcccgagaaagcacgctgagccaagttctagtccatcaaaagtatccaacaagtttacttttaaagtacagcctccaagtcatgcacgatatccgtcccagctagatggggaagcccgagggctagctcatcccccctcctacagcaatccccccgtttaccacggaaactctcccaaacacttccctactgccaacagcagctttgcttctccacagtttagccctgggactcaactgaatccttccaggagacctcatggttctactctttccgtcagtgcttctccggagaaatcttacagccgcccaagcccccttgtactgccgtctagtcgaatagaagtcctccctgttgacactggtgctgggggatattcgggcaattcagggtcaccaaagaatggaaaattgatcattccaccagtggattacttgccagataacagaacatggtcagaagttagttatacatacagacctgagacgcagggacaatcatggacccgagatgctagccgtggcaatttaccaaaatactcagcctttcaactcgcaccctttcaggaccatggcctccctgcagtttctgtagatagtcccgtgagatataaagcttcaccggccgcagaagatgccagtccatctggatatccatattcagggcccccgcctccagcctaccactacaggaatcgggacgggctttccatccaagagtcagtgttgctgtgagatttgacgtgtacttgctaaagacgagagagaaaccacgtgaaacctacattgctatgttcataattgccaaagcagtatttatactattgtaaacaactcgcacatctctcctgtctgttagtagtaagaatacagggaaatgtcttcagccccacgtagatgctgcttaagatgagcgtttcaattgcatcatcactgacctgttagaatttaacccggaaacatcgcaatagcatttagggatgcacgcacagtggtaatttattactcagttccggttatgtttttctccaaaacctgaacatttttactctgttggctcattctattttgactaatgttacaaagtactgaaaaaactgtagaatagatatttttaaggctatatgtagtgtatgtgtcttttaatagatataggcatctgttcatccacatttgaacacagagctaaagaaacgttttttaaaaaactacttttaatccagatccatggaataatatgtaattcttgttttccttgtcttttagtccagtttttctttttccctctcatatatttgtaacctgggtcctaaactgactgaagagtttgtcctgactttattaattgcagtctcacagaatgctcatcattctccttcagctgttgccattttctttcaatctgaaaattaaagacattggagagaaaggctaaccacttaatggtgcttaaaaatcggggcacttaaaataagtttacggccaaaggtgcagcagtgcttatcacatccacatactaagagattggtcttagtgcgtttgtgccctttgttctggtctgactcttgcgaatctcagagcaggagaagttgcagcttactgatccctcagtgctcacagtactcatgtggggcagccacactaactgcattagcagtgtggttacttctttcttctgcctcgactcacatggcttctccccacgaaggtcccagggtggccatttatacaatccatttctgtcctctttatggaatgtagtcgacggatattgctgcacctcatcaggccattacattgtccatgttaaaattataaaaatgatcctagtttttcataggagtctaggattttgatcttttaaaaaatacagtgtgatttcatgcttttgaacatctttttttcattgaaacaaattcaagttcttggcttaaaaaaaaattagtgatgtctttaaaaaatattctgttacactacagataccaaaacactgacaaagatttaggcactccaagagagtatgacttcgtgtttaattggggagcttgttttcaacattgcttatatttgaatagtagaaaacccgacattgatgtttcttcctgttgcaaggtggggctttaaactttcaaggtacaaaagtatgtcttttaaaatggaagtaacgtttgtttagctagtgaatgtgacaatatattttatgtatataatgagtctaatgtaattttgatcaacttggtaatgatgttattaaatagcaaaacaagtgcagtgtattaaagctaaacactacattgaaacgcaaacaaaattctggtgaaataactgggctgttgatgcaggtcaggtggaagctgagaaataaatgtatataaatatgtagctgaggatattaattcccattatataaccataattctgtgacttgtaataaaccaagctgtacaatttagtttataatagcagtatctgagctgctccaaaatatatatatcaacagtggtaaatactgtagatttttatatatatatatatatatatatatatatatgcaaaaaatatatatatacacacaagcactattttcttatgtcatttatgacattttttatctgtatacttttttgatgtgattgttttttaacatgctaaaagtaataagtata

SEQ ID NO: 36707 - protein, 610 aa, Artificial Sequence
  derived and/or modified sequence
MDSVAFEDVAVNFTQEEWALLGPSQKSLYRNVMQETIRNLDCIEMKWEDQNIGDQCQNAKRNLRSHTCEIKDDSQCGETFGQIPDSIVNKNTPRVNPCDSGECGEVVLGHSSLNCNIRVDTGHKSCEHQEYGEKPYTHKQRGKAISHQHSFQTHERPPTGKKPFDCKECAKTFSSLGNLRRHMAAHHGDGPYKCKLCGKAFVWPSLFHLHERTHTGEKPYECKQCSKAFPFYSSYLRHERIHTGEKAYECKQCSKAFPDYSTYLRHERTHTGEKPYKCTQCGKAFSCYYYTRLHERTHTGEQPYACKQCGKTFYHHTSFRRHMIRHTGDGPHKCKICGKGFDCPSSVRNHETTHTGEKPYECKQCGKVLSHSSSFRSHMITHTGDGPQKCKICGKAFGCPSLFQRHERTHTGEKPYQCKQCGKAFSLAGSLRRHEATHTGVKPYKCQCGKAFSDLSSFQNHETTHTGEKPYECKECGKAFSCFKYLSQHKRTHTVEKPYECKTCRKAFSHFSNLKVHERIHSGEKPYECKECGKAFSWLTCLLRHERIHTGEKPYECLQCGKAFTRSRFLRGHEKTHTGEKLYECKECGKALSSLRSLHRHKRTHWKDTL

SEQ ID NO: 36708 - protein, 469 aa, Artificial Sequence
  derived and/or modified sequence
MKWEDQNIGDQCQNAKRNLRSHTCEIKDDSQCGETFGQIPDSIVNKNTPRVNPCDSGECGEVVLGHSSLNCNIRVDTGHKSCEHQEYGEKPYTHKQRGKAISHQHSFQTHERPPTGKKPFDCKECAKTFSSLGNLRRHMAAHHGDGPYKCKLCGKAFVWPSLFHLHERTHTGEKPYECKQCSKAFPFYSSYLRHERIHTGEKAYECKQCSKAFPDYSTYLRHERTHTGEKPYKCTQCGKAFSCYYYTRLHERTHTGEQPYACKQCGKTFYHHTSFRRHMIRHTGDGPHKCKICGKGFDCPSSVRNHETTHTGEKPYECKQCGKVLSHSSSFRSHMITHTGDGPQKCKICGKAFGCPSLFQRHERTHTGEKPYQCKQCGKAFSLAGSLRRHEATHTGVKPYKCQCGKAFSDLSSFQNHETTHTGEKPYECKECGKAFSCFKYLSQHKRTHTVEKPYECKTCRKAFSHFSN

SEQ ID NO: 36709 - protein, 428 aa, Artificial Sequence
  derived and/or modified sequence
MAAHHGDGPYKCKLCGKAFVWPSLFHLHERTHTGEKPYECKQCSKAFPFYSSYLRHERIHTGEKAYECKQCSKAFPDYSTYLRHERTHTGEKPYKCTQCGKAFSCYYYTRLHERTHTGEQPYACKQCGKTFYHHTSFRRHMIRHTGDGPHKCKICGKGFDCPSSVRNHETTHTGEKPYECKQCGKVLSHSSSFRSHMITHTGDGPQKCKICGKAFGCPSLFQRHERTHTGEKPYQCKQCGKAFSLAGSLRRHEATHTGVKPYKCQCGKAFSDLSSFQNHETTHTGEKPYECKECGKAFSCFKYLSQHKRTHTVEKPYECKTCRKAFSHFSNLKVHERIHSGEKPYECKECGKAFSWLTCLLRHERIHTGEKPYECLQCGKAFTRSRFLRGHEKTHTGEKLYECKECGKALSSLRSLHRHKRTHWKDTL

SEQ ID NO: 36710 - DNA, 1833 bp, Artificial Sequence
  derived and/or modified sequence
atggacagcgtggccttcgaggacgtggccgtgaacttcacccaggaggagtgggccctgctgggccccagccagaagagcctgtacagaaacgtgatgcaggagaccatcagaaacctggactgcatcgagatgaagtgggaggaccagaacatcggcgaccagtgccagaacgccaagagaaacctgagaagccacacctgcgagatcaaggacgacagccagtgcggcgagaccttcggccagatccccgacagcatcgtgaacaagaacacccccagagtgaacccctgcgacagcggcgagtgcggcgaggtggtgctgggccacagcagcctgaactgcaacatcagagtggacaccggccacaagagctgcgagcaccaggagtacggcgagaagccctacacccacaagcagagaggcaaggccatcagccaccagcacagcttccagacccacgagagaccccccaccggcaagaagcccttcgactgcaaggagtgcgccaagaccttcagcagcctgggcaacctgagaagacacatggccgcccaccacggcgacggcccctacaagtgcaagctgtgcggcaaggccttcgtgtggcccagcctgttccacctgcacgagagaacccacaccggcgagaagccctacgagtgcaagcagtgcagcaaggccttccccttctacagcagctacctgagacacgagagaatccacaccggcgagaaggcctacgagtgcaagcagtgcagcaaggccttccccgactacagcacctacctgagacacgagagaacccacaccggcgagaagccctacaagtgcacccagtgcggcaaggccttcagctgctactactacaccagactgcacgagagaacccacaccggcgagcagccctacgcctgcaagcagtgcggcaagaccttctaccaccacaccagcttcagaagacacatgatcagacacaccggcgacggcccccacaagtgcaagatctgcggcaagggcttcgactgccccagcagcgtgagaaaccacgagaccacccacaccggcgagaagccctacgagtgcaagcagtgcggcaaggtgctgagccacagcagcagcttcagaagccacatgatcacccacaccggcgacggcccccagaagtgcaagatctgcggcaaggccttcggctgccccagcctgttccagagacacgagagaacccacaccggcgagaagccctaccagtgcaagcagtgcggcaaggccttcagcctggccggcagcctgagaagacacgaggccacccacaccggcgtgaagccctacaagtgccagtgcggcaaggccttcagcgacctgagcagcttccagaaccacgagaccacccacaccggcgagaagccctacgagtgcaaggagtgcggcaaggccttcagctgcttcaagtacctgagccagcacaagagaacccacaccgtggagaagccctacgagtgcaagacctgcagaaaggccttcagccacttcagcaacctgaaggtgcacgagagaatccacagcggcgagaagccctacgagtgcaaggagtgcggcaaggccttcagctggctgacctgcctgctgagacacgagagaatccacaccggcgagaagccctacgagtgcctgcagtgcggcaaggccttcaccagaagcagattcctgagaggccacgagaagacccacaccggcgagaagctgtacgagtgcaaggagtgcggcaaggccctgagcagcctgagaagcctgcacagacacaagagaacccactggaaggacaccctgtag

SEQ ID NO: 36711 - DNA, 1833 bp, Artificial Sequence
  derived and/or modified sequence
atggacagcgtcgcttttgaggacgttgctgtgaatttcacacaggaggagtgggccctcctgggaccatcccagaaatcactctaccggaatgtaatgcaggagactatccggaatctggactgtattgaaatgaaatgggaagatcagaatataggcgaccagtgtcagaacgccaagcgcaacttacgcagtcacacttgtgagattaaagacgatagtcagtgtggagagacttttggacaaattcctgattcaatcgtgaacaaaaatactcctcgcgtgaacccctgtgactccggcgagtgtggagaggtggtgctcggtcactcatcccttaactgtaatatccgggtggacaccggccataaatcctgtgaacaccaagagtatggcgagaagccctacacacataagcagagggggaaagccatttcccatcagcattcctttcagacccacgaacgccctccgaccggcaagaagcctttcgactgtaaagagtgcgctaaaacgttttcgtcattaggcaacttgcgtagacatatggcagcacatcatggcgatggcccatacaagtgcaaactgtgcggcaaagctttcgtgtggccttcactgtttcacctgcacgaacgcactcacaccggcgaaaaaccctatgaatgtaagcagtgtagcaaggcctttcccttctactccagttacctgcggcatgagcggatccacactggtgaaaaagcctatgaatgtaaacagtgttcaaaagctttccccgactatagtacatacctgagacacgaacggacccacaccggagaaaagccttacaaatgcactcagtgcggcaaggccttttcgtgttactactatactaggctgcacgaaaggactcacacaggagagcaaccttatgcttgtaagcaatgcggcaagaccttttaccatcacacatccttccgacgccacatgatcaggcacaccggagacggacctcataagtgcaaaatatgtggaaagggcttcgactgcccctcgtccgtcagaaaccatgagacaacgcacacgggcgaaaagccgtacgagtgcaaacagtgtgggaaagttctgtctcactcttcaagcttccggagccacatgatcacacatactggggacgggccacagaagtgtaagatatgtgggaaggcgttcgggtgcccttccctttttcagcgacacgagagaacacatactggtgaaaagccatatcagtgcaaacagtgtggcaaagcgttttccctggcaggcagcttacgcaggcacgaggccacgcatacaggtgtcaaaccttataagtgtcagtgcggtaaggcattctccgatctatctagtttccaaaatcacgagacgacacacactggcgagaagccatatgagtgtaaggaatgcgggaaggccttttcatgttttaagtatctatcccagcataagagaactcacacagtagagaagccatacgagtgcaaaacctgtaggaaggcttttagccatttcagtaatcttaaggtgcatgagaggatccattctggcgaaaagccctacgaatgtaaggagtgtggaaaggctttctcatggctgacatgtctgctgcgacacgaacgcattcataccggggagaaaccgtatgaatgcctgcagtgtggcaaagccttcactcgcagcaggttcttgcggggccatgagaagactcacacaggcgagaagttgtacgagtgcaaagagtgtggcaaggctcttagcagtctcaggtccctgcatagacacaagaggacacattggaaagataccctatag

SEQ ID NO: 36712 - DNA, 1833 bp, Artificial Sequence
  derived and/or modified sequence
atggattctgtggcctttgaagatgtggccgtgaacttcacccaggaggagtgggccctgctgggccccagccagaagagcctgtacagaaatgtgatgcaggagaccatccggaacctggactgcatcgagatgaagtgggaggaccagaacatcggggaccagtgccagaatgccaagaggaacctgcggagccacacctgtgagatcaaggatgacagccagtgtggggagaccttcggccagatcccagacagcatcgtgaacaagaacaccccccgggtgaacccctgtgacagcggggagtgtggggaggtggtgctgggccacagcagcctgaactgcaacatccgggtggacaccggccacaagagctgtgagcaccaggagtatggagagaagccctacacccacaagcagaggggcaaggccatcagccaccagcacagcttccagacccatgagcggcccccaacaggcaagaagccctttgactgcaaggaatgtgccaagaccttcagcagcctgggcaacctgcggcggcacatggccgcccaccacggagatggcccctacaagtgcaagctgtgtgggaaggcctttgtgtggcccagcctcttccacctgcacgagaggacccacactggagagaagccctatgagtgcaagcagtgcagcaaggccttccccttctacagcagctacctgcggcatgagcgcatccacactggagagaaggcctatgagtgcaagcagtgcagcaaggccttcccagactacagcacctacctgcggcatgagaggacccacactggagagaagccctacaagtgcacccagtgtgggaaggccttcagctgctactactacacccggctgcacgagaggacccacactggagagcagccctatgcctgcaagcagtgtgggaagaccttctaccaccacaccagcttccgccgccacatgatccgccacactggagatggcccccacaagtgcaagatctgtgggaaaggatttgactgccccagctctgtgaggaaccacgagaccacccacactggagagaagccctatgagtgcaagcagtgtgggaaggtgctgagccacagcagcagcttccgcagccacatgatcacccacactggagatggcccccagaagtgcaagatctgtgggaaggccttcggctgccccagcctcttccagagacatgagaggacccacactggagagaagccctaccagtgcaagcagtgtgggaaggccttcagcctggccggcagcctgcggagacatgaggccacccacactggagtgaagccctacaagtgccagtgtgggaaggccttcagtgacctgagcagcttccagaaccacgagaccacccacactggagagaagccctatgagtgcaaggaatgtgggaaggccttcagctgcttcaagtacctgagccagcacaagaggacccacacagtggagaagccctatgagtgcaagacctgcaggaaggccttcagccacttcagcaacctgaaggtgcatgagcgcatccacagcggggagaagccctatgagtgcaaggaatgtgggaaggccttctcctggctgacctgcctgctgcggcatgagcgcatccacactggagagaagccctatgagtgcctgcagtgtgggaaggccttcaccaggagccgcttcctgcggggccacgagaagacccacactggagagaagctgtatgagtgcaaggaatgtgggaaggccctgagcagcctgcggagcctgcaccgccacaagaggacccactggaaggacaccctgtag

SEQ ID NO: 36713 - DNA, 1833 bp, Artificial Sequence
  derived and/or modified sequence
atggacagcgtggccttcgaggacgtggccgtgaacttcacccaggaagaatgggcgctcctaggtccttcacaaaaatccctgtatcggaatgtgatgcaggaaactattcgcaatctcgattgtatcgagatgaaatgggaggatcaaaatatcggagaccaatgccagaatgcgaagcggaacctccgcagccacacgtgcgaaatcaaggacgacagtcagtgcggcgagacttttggccagatccccgacagcatcgtgaataagaacaccccaagagtgaacccatgcgatagtggcgaatgcggtgaagttgtgctgggccacagcagtctgaactgtaacattagagtcgatacaggacacaaatcgtgcgagcaccaggagtacggcgagaaaccttatactcataaacagcgaggtaaggcaatctcgcaccagcacagcttccagacccacgaaagaccgccgactggcaagaagccattcgattgtaaggaatgcgcgaaaacattttcctcgttggggaacctgagaagacacatggccgcccaccacggggacggcccttataagtgtaaattgtgtggcaaggcgtttgtgtggcctagcttatttcatctccacgagcgcactcataccggcgaaaagccctacgaatgtaaacagtgtagtaaggcattcccattctattctagttacctgcgacatgaacgcatccatacgggagaaaaagcctatgagtgcaaacaatgctccaaagcttttcccgactactctacgtacctcagacatgagcgtacccacacgggtgaaaaaccttacaagtgcacccagtgcgggaaggcttttagttgctattactatactcgactccatgagcgcactcacacaggtgaacagccctacgcgtgcaagcaatgcgggaagaccttttatcaccacacgtcctttcgacgacacatgatcaggcacacaggcgacggcccccataagtgtaaaatttgtggcaagggatttgactgtccaagtagcgtgagaaatcacgaaaccacacacaccggcgaaaaaccgtacgaatgcaagcagtgtgggaaagtcttgagtcactcctcaagcttcaggtctcatatgataacacatactggtgacgggccccaaaaatgcaaaatctgtggaaaagctttcggttgcccctcactctttcaacgccacgaacgtacccacacaggggagaagccatatcagtgcaaacagtgcggtaaagccttttccctggctggtagtctgcgccgtcacgaagccacacacactggggtgaagccatataaatgccagtgtggtaaagcattcagtgacctgagttccttccaaaaccacgagaccacccataccggcgaaaagccttatgagtgtaaagagtgtggaaaagcattctcatgttttaagtacctcagccagcataagagaacccacaccgtggagaagccttatgagtgtaagacttgcagaaaggcctttagccatttcagcaacctgaaggttcatgagcgcatacacagtggggaaaagccttatgaatgtaaagagtgcgggaaggctttttcttggctgacctgccttctgaggcatgaacggatccatacaggagagaaaccatacgagtgcttgcagtgtgggaaggcctttacacgctctcggttcttgcggggtcacgagaaaacccatactggagagaagctgtacgagtgcaaagagtgtggcaaggccttatctagcctgcgctcactgcatcggcacaagagaacccactggaaggacacgctttag

SEQ ID NO: 36714 - DNA, 1833 bp, Artificial Sequence
  derived and/or modified sequence
atggactcagtggctttcgaagatgtagccgttaatttcactcaagaagagtgggccctgctcggcccttcacaaaaatctctgtacaggaatgtgatgcaagaaaccatccgaaacctagactgcattgagatgaaatgggaagatcagaacataggagaccaatgtcaaaatgcaaaaaggaacttacgatcccacacgtgtgagatcaaagatgattcacagtgcggggaaaccttcgggcagatccccgatagcatcgtgaacaagaacacccctagagtgaacccgtgcgattcgggggaatgcggggaggtggttctgggccactcctccctaaactgtaatattcgggtcgatacaggacataagtcttgcgaacatcaggaatacggggagaagccgtatactcacaaacaaagggggaaagccattagccatcagcacagttttcaaacacacgagagaccccctacaggtaagaagccttttgattgcaaagagtgtgcgaagaccttctctagtctcggaaaccttcgacgccacatggcggctcaccatggcgacggcccatataaatgcaagctgtgtggtaaggccttcgtctggccatcactgtttcacctgcacgaaagaacacatactggggagaagccctatgagtgcaaacagtgtagtaaggcgtttccattttactcctcatacctacgccatgagagaatacatacaggagaaaaggcatatgaatgcaaacagtgttctaaagccttccctgactacagcacgtacctccgccacgagaggacacacacgggagagaagccctacaagtgtacccaatgcgggaaagccttcagctgctactattacactaggctgcacgaaaggacccacaccggcgaacagccatatgcctgtaaacagtgtggcaagaccttttaccaccacacctcctttcgcaggcacatgatcaggcacacgggagatggtccgcataagtgtaaaatctgtggaaaaggcttcgactgtccttcaagtgtgaggaaccacgaaacgacccacacaggtgagaagccatatgagtgcaagcagtgcgggaaggttctgagccacagctcttctttcagatcacatatgatcacccacacaggcgatgggccacaaaagtgcaaaatctgcgggaaggcgtttggctgcccaagtcttttccagcggcacgagcgcacacacaccggagaaaaaccataccagtgcaaacaatgtggcaaggccttttcactggcaggaagcttgaggcgccatgaggctacccacactggagtgaagccttacaagtgccagtgtggtaaagccttttcggacctcagttcattccagaaccatgaaactacgcatacaggagaaaagccctacgagtgtaaggaatgcggcaaagccttctcgtgctttaagtatctctctcagcacaagagaactcatactgtcgagaaaccctatgagtgtaaaacttgtcgtaaggccttctcccatttctctaatttgaaggtacatgaaaggattcactctggagagaagccctatgaatgcaaagaatgcggcaaggcattttcatggctcacatgcctcctcaggcacgagagaattcacacgggtgagaaaccatatgagtgcttgcagtgtggaaaagcattcacccggtcgcgcttcttacggggtcatgaaaagacgcacacaggtgaaaagctctatgaatgtaaagagtgtggtaaagccctctcttcactgagatcgctgcataggcacaagcgcacccattggaaagacaccttatag

SEQ ID NO: 36715 - DNA, 2368 bp, Artificial Sequence
  derived and/or modified sequence
aaagagcccgcggagtcttctccacgcccctgcgctctgagtcctggctctggcgctgagagagagacgccctggaaggtctgtatcagcgtctgtcgcgctgggacccacactggcttttaaggaggacacccggacacctggaagctgggaaatggactcagtggcctttgaagatgtggctgtgaacttcacacaagaggagtgggctttgctgggtccatcacagaagagtctctacagaaatgtcatgcaggaaaccattaggaacctggactgtatagaaatgaaatgggaggaccagaacattggagatcagtgccaaaatgccaagagaaatctaagaagtcatacatgtgaaattaaagatgacagtcaatgtggagaaacttttggccagattccagatagtattgtgaacaagaacactcctcgagtaaatccatgtgacagtggtgagtgtggagaagtcgtcttgggtcattcgtctcttaattgcaacatcagagttgacactggacacaaatcatgtgagcatcaggaatatggagagaagccatatacacataaacaacgtgggaaagccatcagtcatcagcactccttccagacacatgaaaggccccccaccggaaagaaacccttcgattgtaaagaatgtgcaaaaacctttagttctcttggaaacctccgaagacacatggcggcacaccatggagatggaccttataaatgtaagttgtgtgggaaagcctttgtttggcccagtttatttcatttgcacgaaagaacacacactggagagaaaccgtatgaatgtaagcagtgttctaaagcctttcctttttacagttcctatctaagacatgaaagaatccacacgggagagaaagcgtatgaatgtaagcagtgttccaaagcctttcctgattacagtacctatctaagacatgagagaactcacaccggagagaaaccctataaatgtacacaatgtgggaaagccttcagctgttactattacactcgactacatgaaaggactcacacgggagaacaaccctatgcatgtaagcaatgtgggaaaacgttttatcatcacacaagctttcgaagacacatgataaggcacactggagacggaccacataaatgtaagatatgtgggaaaggctttgattgtcctagttcagttcgaaatcatgaaactactcacactggagagaaaccctatgaatgtaagcagtgtgggaaagtgttatctcatagctcgagctttcgaagtcacatgataacacacacaggagatggaccccagaaatgcaagatatgtgggaaagcctttggttgtcccagtttatttcaaagacatgaaaggactcacactggagagaaaccctatcaatgtaaacaatgtggtaaagccttcagtcttgccggttcccttcgaagacatgaagcaactcacactggagtgaaaccctataaatgtcagtgtgggaaagcctttagtgatctctcttcctttcaaaatcatgagacaactcacactggagagaagccatatgagtgtaaggaatgtgggaaagcattcagttgtttcaaatacctttctcaacataaaaggacccacacagtagaaaaaccttatgagtgtaaaacatgtagaaaagccttcagtcatttcagtaacttaaaagtccatgaaaggattcactctggagagaagccatatgaatgtaaggaatgtggaaaagcattctcttggctcacttgccttctacgacatgaaagaattcacactggagagaaaccctatgaatgtctacaatgtggtaaagccttcactcgttcccgtttccttcgaggacatgaaaaaactcacactggagagaagctgtatgaatgtaaggaatgtgggaaagcattgagttctctccgttccttgcatagacataaaaggactcactggaaagatactctctaaatgtatggaatgtgggaaaacattcagtactttaatttcagaaacttgaaagaactcactttggagatagaccctatgaatgtaaacatgggataaagccttaagtagtttcaatttttttaaatacagttatcccccaatatattgcaggggattggttccagcaccctctaaatccacagatgccaagtcctttgttatatggcatatttgcatgtaacctatgcatatcttccagtatactgtgtaaatcatctctagatgacttttaatacctcatgcattgtaaaagctatgtaaatagttgtttgattgtattgtttagagaatcatgacaagaaaaatagtctctacatgttcgatgcagacacaaccattgca

SEQ ID NO: 36716 - DNA, 1540 bp, Artificial Sequence
  derived and/or modified sequence
cctgcgctctgagtcctggctctggcgctgagagagagacgccctggaaggtctgtatcagcgtctgtcgcgctgggacccacactggcttttaaggaggacacccggacacctggaagctgggaaatgaaatgaaatgggaggaccagaacattggagatcagtgccaaaatgccaagagaaatctaagaagtcatacatgtgaaattaaagatgacagtcaatgtggagaaacttttggccagattccagatagtattgtgaacaagaacactcctcgagtaaatccatgtgacagtggtgagtgtggagaagtcgtcttgggtcattcgtctcttaattgcaacatcagagttgacactggacacaaatcatgtgagcatcaggaatatggagagaagccatatacacataaacaacgtgggaaagccatcagtcatcagcactccttccagacacatgaaaggccccccaccggaaagaaacccttcgattgtaaagaatgtgcaaaaacctttagttctcttggaaacctccgaagacacatggcggcacaccatggagatggaccttataaatgtaagttgtgtgggaaagcctttgtttggcccagtttatttcatttgcacgaaagaacacacactggagagaaaccgtatgaatgtaagcagtgttctaaagcctttcctttttacagttcctatctaagacatgaaagaatccacacgggagagaaagcgtatgaatgtaagcagtgttccaaagcctttcctgattacagtacctatctaagacatgagagaactcacaccggagagaaaccctataaatgtacacaatgtgggaaagccttcagctgttactattacactcgactacatgaaaggactcacacgggagaacaaccctatgcatgtaagcaatgtgggaaaacgttttatcatcacacaagctttcgaagacacatgataaggcacactggagacggaccacataaatgtaagatatgtgggaaaggctttgattgtcctagttcagttcgaaatcatgaaactactcacactggagagaaaccctatgaatgtaagcagtgtgggaaagtgttatctcatagctcgagctttcgaagtcacatgataacacacacaggagatggaccccagaaatgcaagatatgtgggaaagcctttggttgtcccagtttatttcaaagacatgaaaggactcacactggagagaaaccctatcaatgtaaacaatgtggtaaagccttcagtcttgccggttcccttcgaagacatgaagcaactcacactggagtgaaaccctataaatgtcagtgtgggaaagcctttagtgatctctcttcctttcaaaatcatgagacaactcacactggagagaagccatatgagtgtaaggaatgtgggaaagcattcagttgtttcaaatacctttctcaacataaaaggacccacacagtagaaaaaccttatgagtgtaaaacatgtagaaaagccttcagtcatttcagtaactt

SEQ ID NO: 36717 - protein, 533 aa, Artificial Sequence
  derived and/or modified sequence
MEEKGSKRGLEAAGKAGLATAGPGLLPRKPPGLAAGPAGTYGKAVSPPPSPRASPVAALKAKVIQKLEDVSKPPAYAYPATPSSHPTSPPPASPPPTPGITRKEEAPENVVEKKDLELEKEAPSPFQALFSDIPPRYPFQALPPHYGRPYPFLLQPTAAADADGLAPDVPLPADGPERLALSPEDKPIRLSPSKITEPLREGPEEEPLAEREVKAEVEDMDEGPTELPPLESPLPLPAAEAMATPSPAGGCGGGLLEAQALSATGQSCAEPSECPDFVEGPEPRVDSPGRTEPCTAALDLGVQLTPETLVEAKEEPVEVPVAVPVVEAVPEEGLAQVAPSESQPTLEMSDCDVPAGEGQCPSLEPQEAVPVLGSTCFLEEASSDQFLPSLEDPLAGMNALAAAAELPQARPLPSPGAAGAQALEKLEAAESLVLEQSFLHGITLLSEIAELELERRSPPQGLPPCMGQGSPMPAGLPDCARGPAPTLSGWPRLGEQSRVGLQPGVSVKGTRWRGPGTGPPWSKPSHYRKPQWC

SEQ ID NO: 36718 - protein, 2968 aa, Artificial Sequence
  derived and/or modified sequence
MDGRDFGPQRSVHGPPPPLLSGLAMDSHRVGAATAGRLPASGLPGPLPPGKYMAGLNLHPHPGEAFLGSFVASGMGPSASSHGSPVPLPSDLSFRSPTPSNLPMVQLWAAHAHEGFSHLPSGLYPSYLHLNHLEPPSSGSPLLSQLGQPSIFDTQKGQGPGGDGFYLPTAGAPGSLHSHAPSARTPGGGHSSGAPAKGSSSRDGPAKERAGRGGEPPPLFGKKDPRARGEEASGPRGVVDLTQEARAEGRQDRGPPRLAERLSPFLAESKTKNAALQPSVLTMCNGGAGDVGLPALVAEAGRGGAKEAARQDEGARLLRRTETLLPGPRPCPSPLPPPPAPPKGPPAPPAATPAGVYTVFREQGREHRVVAPTFVPSVEAFDERPGPIQIASQARDARAREREAGRPGVLQAPPGSPRPLDRPEGLREKNSVIRSLKRPPPADAPTVRATRASPDPRAYVPAKELLKPEADPRPCERAPRGPAGPAAQQAAKLFGLEPGRPPPTGPEHKWKPFELGNFAATQMAVLAAQHHHSRAEEEAAVVAASSSKKAYLDPGAVLPRSAATCGRPVADMHSAAHGSGEASAMQSLIKYSGSFARDAVAVRPGGCGKKSPFGGLGTMKPEPAPTSAGASRAQARLPHSGGPAAGGGRQLKRDPERPESAKAFGREGSGAQGEAEVRHPPVGIAVAVARQKDSGGSGRLGPGLVDQERSLSLSNVKGHGRADEDCVDDRARHREERLLGARLDRDQEKLLRESKELADLARLHPTSCAPNGLNPNLMVTGGPALAGSGRWSADPAAHLATHPWLPRSGNASMWLAGHPYGLGPPSLHQGMAPAFPPGLGGSLPSAYQFVRDPQSGQLVVIPSDHLPHFAELMERATVPPLWPALYPPGRSPLHHAQQLQLFSQQHFLRQQEFLYLQQQAAQALELQRSAQLVQERLKAQEHRAEMEEKGSKRGLEAAGKAGLATAGPGLLPRKPPGLAAGPAGTYGKAVSPPPSPRASPVAALKAKVIQKLEDVSKPPAYAYPATPSSHPTSPPPASPPPTPGITRKEEAPENVVEKKDLELEKEAPSPFQALFSDIPPRYPFQALPPHYGRPYPFLLQPTAAADADGLAPDVPLPADGPERLALSPEDKPIRLSPSKITEPLREGPEEEPLAEREVKAEVEDMDEGPTELPPLESPLPLPAAEAMATPSPAGGCGGGLLEAQALSATGQSCAEPSECPDFVEGPEPRVDSPGRTEPCTAALDLGVQLTPETLVEAKEEPVEVPVAVPVVEAVPEEGLAQVAPSESQPTLEMSDCDVPAGEGQCPSLEPQEAVPVLGSTCFLEEASSDQFLPSLEDPLAGMNALAAAAELPQARPLPSPGAAGAQALEKLEAAESLVLEQSFLHGITLLSEIAELELERRSQEMGGAERALVARPSLESLLAAGSHMLREVLDGPVVDPLKNLRLPRELKPNKKYSWMRKKEERMYAMKSSLEDMDALELDFRMRLAEVQRQYKEKQRELVKLQRRRDSEDRREEPHRSLARRGPGRPRKRTHAPSALSPPRKRGKSGHSSGKLSSKSLLTSDDYELGAGIRKRHKGSEEEHDALIGMGKARGRNQTWDEHEASSDFISQLKIKKKKMASDQEQLASKLDKALSLTKQDKLKSPFKFSDSAGGKSKTSGGCGRYLTPYDSLLGKNRKALAKGLGLSLKSSREGKHKRAAKTRKMEVGFKARGQPKSAHSPFASEVSSYSYNTDSEEDEEFLKDEWPAQGPSSSKLTPSLLCSMVAKNSKAAGGPKLTKRGLAAPRTLKPKPATSRKQPFCLLLREAEARSSFSDSSEESFDQDESSEEEDEEEELEEEDEASGGGYRLGARERALSPGLEESGLGLLARFAASALPSPTVGPSLSVVQLEAKQKARKKEERQSLLGTEFEYTDSESEVKVRKRSPAGLLRPKKGLGEPGPSLAAPTPGARGPDPSSPDKAKLAVEKGRKARKLRGPKEPGFEAGPEASDDDLWTRRRSERIFLHDASAAAPAPVSTAPATKTSRCAKGGPLSPRKDAGRAKDRKDPRKKKKGKEAGPGAGLPPPRAPALPSEARAPHASSLTAAKRSKAKAKGKEVKKENRGKGGAVSKLMESMAAEEDFEPNQDSSFSEDEHLPRGGAVERPLTPAPRSCIIDKDELKDGLRVLIPMDDKLLYAGHVQTVHSPDIYRVVVEGERGNRPHIYCLEQLLQEAIIDVRPASTRFLPQGTRIAAYWSQQYRCLYPGTVVRGLLDLEDDGDLITVEFDDGDTGRIPLSHIRLLPPDYKIQCAEPSPALLVPSAKRRSRKTSKDTGEGKDGGTAGSEEPGAKARGRGRKPSAKAKGGRAATLEEGNPTDEVPSTPLALEPSSTPGSKKSPPEPVDKRAKAPKARPAPPQPSPAPPAFTSCPAPEPFAELPAPATSLAPAPLITMPATRPKPKKARAAEESGAKGPRRPGEEAELLVKLDHEGVTSPKSKKAKEALLLREDPGAGGWQEPKSLLSLGSYPPAAGSSEPKAPWPKATDGDLAQEPGPGLTFEDSGNPKSPDKAQAEQDGAEESESSSSSSSGSSSSSSSSSSSGSETEGEEEGDKNGDGGCGTGGRNCSAASSRAASPASSSSSSSSSSSSSSSSSSSSSSSSSSSSSSSSSSSSSSSSSSSSSSSSSSSSSSSSSSTTDEDSSCSSDDEAAPAPTAGPSAQAALPTKATKQAGKARPSAHSPGKKTPAPQPQAPPPQPTQPLQPKAQAGAKSRPKKREGVHLPTTKELAKRQRLPSVENRPKIAAFLPARQLWKWFGKPTQRRGMKGKARKLFYKAIVRGKEMIRIGDCAVFLSAGRPNLPYIGRIQSMWESWGNNMVVRVKWFYHPEETSPGKQFHQGQHWDQKSSRSLPAALRVSSQRKDFMERALYQSSHVDENDVQTVSHKCLVVGLEQYEQMLKTKKYQDSEGLYYLAGTYEPTTGMIFSTDGVPVLC

SEQ ID NO: 36719 - protein, 303 aa, Artificial Sequence
  derived and/or modified sequence
MDGRDFGPQRSVHGPPPPLLSGLAMDSHRVGAATAGRLPASGLPGPLPPGKYMAGLNLHPHPGKCPAPCPSPPVFPGRSTRPGPPVHSRPGLGDSPSVGHGGAGRLGSQGWETPGPGAKAVESVARLGYLFRSVLGPREPKAGVVARATGAIPIPGAPAARAWAGVFKIWARKEQTGPAPRETPLPELESFSWQTLLLALVGPPGFCSQLHHSRRAGSLAVTERRGMREYAGGCGSTVTPALGPWPRGGRDAPFFPGRTAALGTCTPVGGRRPRPSGTPCFPARKRVRRCGRDTETGPSRSRT

SEQ ID NO: 36720 - protein, 2968 aa, Artificial Sequence
  derived and/or modified sequence
MDGRDFGPQRSVHGPPPPLLSGLAMDSHRVGAATAGRLPASGLPGPLPPGKYMAGLNLHPHPGEAFLGSFVASGMGPSASSHGSPVPLPSDLSFRSPTPSNLPMVQLWAAHAHEGFSHLPSGLYPSYLHLNHLEPPSSGSPLLSQLGQPSIFDTQKGQGPGGDGFYLPTAGAPGSLHSHAPSARTPGGGHSSGAPAKGSSSRDGPAKERAGRGGEPPPLFGKKDPRARGEEASGPRGVVDLTQEARAEGRQDRGPPRLAERLSPFLAESKTKNAALQPSVLTMCNGGAGDVGLPALVAEAGRGGAKEAARQDEGARLLRRTETLLPGPRPCPSPLPPPPAPPKGPPAPPAATPAGVYTVFREQGREHRVVAPTFVPSVEAFDERPGPIQIASQARDARAREREAGRPGVLQAPPGSPRPLDRPEGLREKNSVIRSLKRPPPADAPTVRATRASPDPRAYVPAKELLKPEADPRPCERAPRGPAGPAAQQAAKLFGLEPGRPPPTGPEHKWKPFELGNFAATQMAVLAAQHHHSRAEEEAAVVAASSSKKAYLDPGAVLPRSAATCGRPVADMHSAAHGSGEASAMQSLIKYSGSFARDAVAVRPGGCGKKSPFGGLGTMKPEPAPTSAGASRAQARLPHSGGPAAGGGRQLKRDPERPESAKAFGREGSGAQGEAEVRHPPVGIAVAVARQKDSGGSGRLGPGLVDQERSLSLSNVKGHGRADEDCVDDRARHREERLLGARLDRDQEKLLRESKELADLARLHPTSCAPNGLNPNLMVTGGPALAGSGRWSADPAAHLATHPWLPRSGNASMWLAGHPYGLGPPSLHQGMAPAFPPGLGGSLPSAYQFVRDPQSGQLVVIPSDHLPHFAELMERATVPPLWPALYPPGRSPLHHAQQLQLFSQQHFLRQQEFLYLQQQAAQALELQRSAQLVQERLKAQEHRAEMEEKGSKRGLEAAGKAGLATAGPGLLPRKPPGLAAGPAGTYGKAVSPPPSPRASPVAALKAKVIQKLEDVSKPPAYAYPATPSSHPTSPPPASPPPTPGITRKEEAPENVVEKKDLELEKEAPSPFQALFSDIPPRYPFQALPPHYGRPYPFLLQPTAAADADGLAPDVPLPADGPERLALSPEDKPIRLSPSKITEPLREGPEEEPLAEREVKAEVEDMDEGPTELPPLESPLPLPAAEAMATPSPAGGCGGGLLEAQALSATGQSCAEPSECPDFVEGPEPRVDSPGRTEPCTAALDLGVQLTPETLVEAKEEPVEVPVAVPVVEAVPEEGLAQVAPSESQPTLEMSDCDVPAGEGQCPSLEPQEAVPVLGSTCFLEEASSDQFLPSLEDPLAGMNALAAAAELPQARPLPSPGAAGAQALEKLEAAESLVLEQSFLHGITLLSEIAELELERRSQEMGGAERALVARPSLESLLAAGSHMLREVLDGPVVDPLKNLRLPRELKPNKKYSWMRKKEERMYAMKSSLEDMDALELDFRMRLAEVQRQYKEKQRELVKLQRRRDSEDRREEPHRSLARRGPGRPRKRTHAPSALSPPRKRGKSGHSSGKLSSKSLLTSDDYELGAGIRKRHKGSEEEHDALIGMGKARGRNQTWDEHEASSDFISQLKIKKKKMASDQEQLASKLDKALSLTKQDKLKSPFKFSDSAGGKSKTSGGCGRYLTPYDSLLGKNRKALAKGLGLSLKSSREGKHKRAAKTRKMEVGFKARGQPKSAHSPFASEVSSYSYNTDSEEDEEFLKDEWPAQGPSSSKLTPSLLCSMVAKNSKAAGGPKLTKRGLAAPRTLKPKPATSRKQPFCLLLREAEARSSFSDSSEESFDQDESSEEEDEEEELEEEDEASGGGYRLGARERALSPGLEESGLGLLARFAASALPSPTVGPSLSVVQLEAKQKARKKEERQSLLGTEFEYTDSESEVKVRKRSPAGLLRPKKGLGEPGPSLAAPTPGARGPDPSSPDKAKLAVEKGRKARKLRGPKEPGFEAGPEASDDDLWTRRRSERIFLHDASAAAPAPVSTAPATKTSRCAKGGPLSPRKDAGRAKDRKDPRKKKKGKEAGPGAGLPPPRAPALPSEARAPHASSLTAAKRSKAKAKGKEVKKENRGKGGAVSKLMESMAAEEDFEPNQDSSFSEDEHLPRGGAVERPLTPAPRSCIIDKDELKDGLRVLIPMDDKLLYAGHVQTVHSPDIYRVVVEGERGNRPHIYCLEQLLQEAIIDVRPASTRFLPQGTRIAAYWSQQYRCLYPGTVVRGLLDLEDDGDLITVEFDDGDTGRIPLSHIRLLPPDYKIQCAEPSPALLVPSAKRRSRKTSKDTGEGKDGGTAGSEEPGAKARGRGRKPSAKAKGDRAATLEEGNPTDEVPSTPLALEPSSTPGSKKSPPEPVDKRAKAPKARPAPPQPSPAPPAFTSCPAPEPFAELPAPATSLAPAPLITMPATRPKPKKARAAEESGAKGPRRPGEEAELLVKLDHEGVTSPKSKKAKEALLLREDPGAGGWQEPKSLLSLGSYPPAAGSSEPKAPWPKATDGDLAQEPGPGLTFEDSGNPKSPDKAQAEQDGAEESESSSSSSSGSSSSSSSSSSSGSETEGEEEGDKNGDGGCGTGGRNCSAASSRAASPASSSSSSSSSSSSSSSSSSSSSSSSSSSSSSSSSSSSSSSSSSSSSSSSSSSSSSSSSSTTDEDSSCSSDDEAAPAPTAGPSAQAALPTKATKQAGKARPSAHSPGKKTPAPQPQAPPPQPTQPLQPKAQAGAKSRPKKREGVHLPTTKELAKRQRLPSVENRPKIAAFLPARQLWKWFGKPTQRRGMKGKARKLFYKAIVRGKEMIRIGDCAVFLSAGRPNLPYIGRIQSMWESWGNNMVVRVKWFYHPEETSPGKQFHQGQHWDQKSSRSLPAALRVSSQRKDFMERALYQSSHVDENDVQTVSHKCLVVGLEQYEQMLKTKKYQDSEGLYYLAGTYEPTTGMIFSTDGVPVLC

SEQ ID NO: 36721 - DNA, 1240 bp, Artificial Sequence
  derived and/or modified sequence
accgtgcactcgccagacatataccgcgtggtggtggagggtgagcggggcaaccggccccacatctactgtctggagcagttgctgcaggaggcgatcatcgatgtgaggccagcctccactcgcttcttgccacaagggaccaggattgcagcctactggagccagcagtaccgctgtctctacccaggcactgtggtccgagggttactggacctggaggacgatggggacttgatcaccgtggagtttgacgacggagacacgggcaggatccccctctcacatatccgcctcctgccccctgactataagatacagtgtgctgagccgcccccggcccttctggtgccaagtgccaagcgccgcagccggaagaccagcaaagacactggggagggcaaagatggtggcacggctgggtcggaggagccaggagccaaggcccgtgggcgtgggcggaaacccagcgccaaggccaagggtgacagagccgctaccctggaggaggggaacccaacagacgaggtccccagtacccccttagccctggagccgagcagcaccccaggttccaagaagagccccccagagcctgtggacaagcgagccaaggcccccaaggcgcgcccggcaccgccgcagcccagtcccgcaccacccgccttcaccagctgcccagcacccgagtcatttgcagagctgccagctcctgccacctccctggccccagcacccctcatcaccatgcctgccacacgccccaagcccaagaaggcgcgggcagccgaggagtcgggtgccaagggccctcggaggccgggggaggaggccgagctgcttgtcaaactggaccacgagggtgtcacgtcacccaaaagcaagaaggctaaagaggccctgctgctccgggaggatccgggggcggggggctggcaggagcccaagagcctcctgagcctgggcagctatccccccgcggccggcagcagcgagcccaaggcaccctggcccaaggccaccgacggggacctcgcccaggagcccgggccggggctcacgttcgaggactctgggaaccccaagagcccagacaaggtccaggctgagcaggacggggccgaagagtccgagagcagcagcagcagcagtagtggcagcagtagcagcagcagcagcagcagcagcagcggctcggagacagaaggggaggaggaaggcgacaagaacggggacgggg

SEQ ID NO: 36722 - DNA, 8907 bp, Artificial Sequence
  derived and/or modified sequence
atggacggcagagacttcggcccccagagaagcgtgcacggcccccccccccccctgctgagcggcctggccatggacagccacagagtgggcgccgccaccgccggcagactgcccgccagcggcctgcccggccccctgccccccggcaagtacatggccggcctgaacctgcacccccaccccggcgaggccttcctgggcagcttcgtggccagcggcatgggccccagcgccagcagccacggcagccccgtgcccctgcccagcgacctgagcttcagaagccccacccccagcaacctgcccatggtgcagctgtgggccgcccacgcccacgagggcttcagccacctgcccagcggcctgtaccccagctacctgcacctgaaccacctggagccccccagcagcggcagccccctgctgagccagctgggccagcccagcatcttcgacacccagaagggccagggccccggcggcgacggcttctacctgcccaccgccggcgcccccggcagcctgcacagccacgcccccagcgccagaacccccggcggcggccacagcagcggcgcccccgccaagggcagcagcagcagagacggccccgccaaggagagagccggcagaggcggcgagcccccccccctgttcggcaagaaggaccccagagccagaggcgaggaggccagcggccccagaggcgtggtggacctgacccaggaggccagagccgagggcagacaggacagaggcccccccagactggccgagagactgagccccttcctggccgagagcaagaccaagaacgccgccctgcagcccagcgtgctgaccatgtgcaacggcggcgccggcgacgtgggcctgcccgccctggtggccgaggccggcagaggcggcgccaaggaggccgccagacaggacgagggcgccagactgctgagaagaaccgagaccctgctgcccggccccagaccctgccccagccccctgccccccccccccgccccccccaagggcccccccgccccccccgccgccacccccgccggcgtgtacaccgtgttcagagagcagggcagagagcacagagtggtggcccccaccttcgtgcccagcgtggaggccttcgacgagagacccggccccatccagatcgccagccaggccagagacgccagagccagagagagagaggccggcagacccggcgtgctgcaggccccccccggcagccccagacccctggacagacccgagggcctgagagagaagaacagcgtgatcagaagcctgaagagacccccccccgccgacgcccccaccgtgagagccaccagagccagccccgaccccagagcctacgtgcccgccaaggagctgctgaagcccgaggccgaccccagaccctgcgagagagcccccagaggccccgccggccccgccgcccagcaggccgccaagctgttcggcctggagcccggcagacccccccccaccggccccgagcacaagtggaagcccttcgagctgggcaacttcgccgccacccagatggccgtgctggccgcccagcaccaccacagcagagccgaggaggaggccgccgtggtggccgccagcagcagcaagaaggcctacctggaccccggcgccgtgctgcccagaagcgccgccacctgcggcagacccgtggccgacatgcacagcgccgcccacggcagcggcgaggccagcgccatgcagagcctgatcaagtacagcggcagcttcgccagagacgccgtggccgtgagacccggcggctgcggcaagaagagccccttcggcggcctgggcaccatgaagcccgagcccgcccccaccagcgccggcgccagcagagcccaggccagactgccccacagcggcggccccgccgccggcggcggcagacagctgaagagagaccccgagagacccgagagcgccaaggccttcggcagagagggcagcggcgcccagggcgaggccgaggtgagacacccccccgtgggcatcgccgtggccgtggccagacagaaggacagcggcggcagcggcagactgggccccggcctggtggaccaggagagaagcctgagcctgagcaacgtgaagggccacggcagagccgacgaggactgcgtggacgacagagccagacacagagaggagagactgctgggcgccagactggacagagaccaggagaagctgctgagagagagcaaggagctggccgacctggccagactgcaccccaccagctgcgcccccaacggcctgaaccccaacctgatggtgaccggcggccccgccctggccggcagcggcagatggagcgccgaccccgccgcccacctggccacccacccctggctgcccagaagcggcaacgccagcatgtggctggccggccacccctacggcctgggcccccccagcctgcaccagggcatggcccccgccttcccccccggcctgggcggcagcctgcccagcgcctaccagttcgtgagagacccccagagcggccagctggtggtgatccccagcgaccacctgccccacttcgccgagctgatggagagagccaccgtgccccccctgtggcccgccctgtacccccccggcagaagccccctgcaccacgcccagcagctgcagctgttcagccagcagcacttcctgagacagcaggagttcctgtacctgcagcagcaggccgcccaggccctggagctgcagagaagcgcccagctggtgcaggagagactgaaggcccaggagcacagagccgagatggaggagaagggcagcaagagaggcctggaggccgccggcaaggccggcctggccaccgccggccccggcctgctgcccagaaagccccccggcctggccgccggccccgccggcacctacggcaaggccgtgagccccccccccagccccagagccagccccgtggccgccctgaaggccaaggtgatccagaagctggaggacgtgagcaagccccccgcctacgcctaccccgccacccccagcagccaccccaccagccccccccccgccagccccccccccacccccggcatcaccagaaaggaggaggcccccgagaacgtggtggagaagaaggacctggagctggagaaggaggcccccagccccttccaggccctgttcagcgacatcccccccagataccccttccaggccctgcccccccactacggcagaccctaccccttcctgctgcagcccaccgccgccgccgacgccgacggcctggcccccgacgtgcccctgcccgccgacggccccgagagactggccctgagccccgaggacaagcccatcagactgagccccagcaagatcaccgagcccctgagagagggccccgaggaggagcccctggccgagagagaggtgaaggccgaggtggaggacatggacgagggccccaccgagctgccccccctggagagccccctgcccctgcccgccgccgaggccatggccacccccagccccgccggcggctgcggcggcggcctgctggaggcccaggccctgagcgccaccggccagagctgcgccgagcccagcgagtgccccgacttcgtggagggccccgagcccagagtggacagccccggcagaaccgagccctgcaccgccgccctggacctgggcgtgcagctgacccccgagaccctggtggaggccaaggaggagcccgtggaggtgcccgtggccgtgcccgtggtggaggccgtgcccgaggagggcctggcccaggtggcccccagcgagagccagcccaccctggagatgagcgactgcgacgtgcccgccggcgagggccagtgccccagcctggagccccaggaggccgtgcccgtgctgggcagcacctgcttcctggaggaggccagcagcgaccagttcctgcccagcctggaggaccccctggccggcatgaacgccctggccgccgccgccgagctgccccaggccagacccctgcccagccccggcgccgccggcgcccaggccctggagaagctggaggccgccgagagcctggtgctggagcagagcttcctgcacggcatcaccctgctgagcgagatcgccgagctggagctggagagaagaagccaggagatgggcggcgccgagagagccctggtggccagacccagcctggagagcctgctggccgccggcagccacatgctgagagaggtgctggacggccccgtggtggaccccctgaagaacctgagactgcccagagagctgaagcccaacaagaagtacagctggatgagaaagaaggaggagagaatgtacgccatgaagagcagcctggaggacatggacgccctggagctggacttcagaatgagactggccgaggtgcagagacagtacaaggagaagcagagagagctggtgaagctgcagagaagaagagacagcgaggacagaagagaggagccccacagaagcctggccagaagaggccccggcagacccagaaagagaacccacgcccccagcgccctgagcccccccagaaagagaggcaagagcggccacagcagcggcaagctgagcagcaagagcctgctgaccagcgacgactacgagctgggcgccggcatcagaaagagacacaagggcagcgaggaggagcacgacgccctgatcggcatgggcaaggccagaggcagaaaccagacctgggacgagcacgaggccagcagcgacttcatcagccagctgaagatcaagaagaagaagatggccagcgaccaggagcagctggccagcaagctggacaaggccctgagcctgaccaagcaggacaagctgaagagccccttcaagttcagcgacagcgccggcggcaagagcaagaccagcggcggctgcggcagatacctgaccccctacgacagcctgctgggcaagaacagaaaggccctggccaagggcctgggcctgagcctgaagagcagcagagagggcaagcacaagagagccgccaagaccagaaagatggaggtgggcttcaaggccagaggccagcccaagagcgcccacagccccttcgccagcgaggtgagcagctacagctacaacaccgacagcgaggaggacgaggagttcctgaaggacgagtggcccgcccagggccccagcagcagcaagctgacccccagcctgctgtgcagcatggtggccaagaacagcaaggccgccggcggccccaagctgaccaagagaggcctggccgcccccagaaccctgaagcccaagcccgccaccagcagaaagcagcccttctgcctgctgctgagagaggccgaggccagaagcagcttcagcgacagcagcgaggagagcttcgaccaggacgagagcagcgaggaggaggacgaggaggaggagctggaggaggaggacgaggccagcggcggcggctacagactgggcgccagagagagagccctgagccccggcctggaggagagcggcctgggcctgctggccagattcgccgccagcgccctgcccagccccaccgtgggccccagcctgagcgtggtgcagctggaggccaagcagaaggccagaaagaaggaggagagacagagcctgctgggcaccgagttcgagtacaccgacagcgagagcgaggtgaaggtgagaaagagaagccccgccggcctgctgagacccaagaagggcctgggcgagcccggccccagcctggccgcccccacccccggcgccagaggccccgaccccagcagccccgacaaggccaagctggccgtggagaagggcagaaaggccagaaagctgagaggccccaaggagcccggcttcgaggccggccccgaggccagcgacgacgacctgtggaccagaagaagaagcgagagaatcttcctgcacgacgccagcgccgccgcccccgcccccgtgagcaccgcccccgccaccaagaccagcagatgcgccaagggcggccccctgagccccagaaaggacgccggcagagccaaggacagaaaggaccccagaaagaagaagaagggcaaggaggccggccccggcgccggcctgcccccccccagagcccccgccctgcccagcgaggccagagccccccacgccagcagcctgaccgccgccaagagaagcaaggccaaggccaagggcaaggaggtgaagaaggagaacagaggcaagggcggcgccgtgagcaagctgatggagagcatggccgccgaggaggacttcgagcccaaccaggacagcagcttcagcgaggacgagcacctgcccagaggcggcgccgtggagagacccctgacccccgcccccagaagctgcatcatcgacaaggacgagctgaaggacggcctgagagtgctgatccccatggacgacaagctgctgtacgccggccacgtgcagaccgtgcacagccccgacatctacagagtggtggtggagggcgagagaggcaacagaccccacatctactgcctggagcagctgctgcaggaggccatcatcgacgtgagacccgccagcaccagattcctgccccagggcaccagaatcgccgcctactggagccagcagtacagatgcctgtaccccggcaccgtggtgagaggcctgctggacctggaggacgacggcgacctgatcaccgtggagttcgacgacggcgacaccggcagaatccccctgagccacatcagactgctgccccccgactacaagatccagtgcgccgagcccagccccgccctgctggtgcccagcgccaagagaagaagcagaaagaccagcaaggacaccggcgagggcaaggacggcggcaccgccggcagcgaggagcccggcgccaaggccagaggcagaggcagaaagcccagcgccaaggccaagggcggcagagccgccaccctggaggagggcaaccccaccgacgaggtgcccagcacccccctggccctggagcccagcagcacccccggcagcaagaagagcccccccgagcccgtggacaagagagccaaggcccccaaggccagacccgcccccccccagcccagccccgccccccccgccttcaccagctgccccgcccccgagcccttcgccgagctgcccgcccccgccaccagcctggcccccgcccccctgatcaccatgcccgccaccagacccaagcccaagaaggccagagccgccgaggagagcggcgccaagggccccagaagacccggcgaggaggccgagctgctggtgaagctggaccacgagggcgtgaccagccccaagagcaagaaggccaaggaggccctgctgctgagagaggaccccggcgccggcggctggcaggagcccaagagcctgctgagcctgggcagctacccccccgccgccggcagcagcgagcccaaggccccctggcccaaggccaccgacggcgacctggcccaggagcccggccccggcctgaccttcgaggacagcggcaaccccaagagccccgacaaggcccaggccgagcaggacggcgccgaggagagcgagagcagcagcagcagcagcagcggcagcagcagcagcagcagcagcagcagcagcagcggcagcgagaccgagggcgaggaggagggcgacaagaacggcgacggcggctgcggcaccggcggcagaaactgcagcgccgccagcagcagagccgccagccccgccagcagcagcagcagcagcagcagcagcagcagcagcagcagcagcagcagcagcagcagcagcagcagcagcagcagcagcagcagcagcagcagcagcagcagcagcagcagcagcagcagcagcagcagcagcagcagcagcagcagcagcagcagcagcagcagcagcagcaccaccgacgaggacagcagctgcagcagcgacgacgaggccgcccccgcccccaccgccggccccagcgcccaggccgccctgcccaccaaggccaccaagcaggccggcaaggccagacccagcgcccacagccccggcaagaagacccccgccccccagccccaggccccccccccccagcccacccagcccctgcagcccaaggcccaggccggcgccaagagcagacccaagaagagagagggcgtgcacctgcccaccaccaaggagctggccaagagacagagactgcccagcgtggagaacagacccaagatcgccgccttcctgcccgccagacagctgtggaagtggttcggcaagcccacccagagaagaggcatgaagggcaaggccagaaagctgttctacaaggccatcgtgagaggcaaggagatgatcagaatcggcgactgcgccgtgttcctgagcgccggcagacccaacctgccctacatcggcagaatccagagcatgtgggagagctggggcaacaacatggtggtgagagtgaagtggttctaccaccccgaggagaccagccccggcaagcagttccaccagggccagcactgggaccagaagagcagcagaagcctgcccgccgccctgagagtgagcagccagagaaaggacttcatggagagagccctgtaccagagcagccacgtggacgagaacgacgtgcagaccgtgagccacaagtgcctggtggtgggcctggagcagtacgagcagatgctgaagaccaagaagtaccaggacagcgagggcctgtactacctggccggcacctacgagcccaccaccggcatgatcttcagcaccgacggcgtgcccgtgctgtgctag

SEQ ID NO: 36723 - DNA, 8907 bp, Artificial Sequence
  derived and/or modified sequence
atggacggcagagacttcggcccccagagaagcgtgcacggcccccccccccccctgctgagcggcctggccatggacagccacagagtgggcgccgccaccgccggcagactgcccgccagcggcctgcccggccccctgccccccggcaagtacatggccggcctgaacctgcacccccaccccggcgaggccttcctgggcagcttcgtggccagcggcatgggccccagcgccagcagccacggcagccccgtgcccctgcccagcgacctgagcttcagaagccccacccccagcaacctgcccatggtgcagctgtgggccgcccacgcccacgagggcttcagccacctgcccagcggcctgtaccccagctacctgcacctgaaccacctggagccccccagcagcggcagccccctgctgagccagctgggccagcccagcatcttcgacacccagaagggccagggccccggcggcgacggcttctacctgcccaccgccggcgcccccggcagcctgcacagccacgcccccagcgccagaacccccggcggcggccacagcagcggcgcccccgccaagggcagcagcagcagagacggccccgccaaggagagagccggcagaggcggcgagcccccccccctgttcggcaagaaggaccccagagccagaggcgaggaggccagcggccccagaggcgtggtggacctgacccaggaggccagagccgagggcagacaggacagaggcccccccagactggccgagagactgagccccttcctggccgagagcaagaccaagaacgccgccctgcagcccagcgtgctgaccatgtgcaacggcggcgccggcgacgtgggcctgcccgccctggtggccgaggccggcagaggcggcgccaaggaggccgccagacaggacgagggcgccagactgctgagaagaaccgagaccctgctgcccggccccagaccctgccccagccccctgccccccccccccgccccccccaagggcccccccgccccccccgccgccacccccgccggcgtgtacaccgtgttcagagagcagggcagagagcacagagtggtggcccccaccttcgtgcccagcgtggaggccttcgacgagagacccggccccatccagatcgccagccaggccagagacgccagagccagagagagagaggccggcagacccggcgtgctgcaggccccccccggcagccccagacccctggacagacccgagggcctgagagagaagaacagcgtgatcagaagcctgaagagacccccccccgccgacgcccccaccgtgagagccaccagagccagccccgaccccagagcctacgtgcccgccaaggagctgctgaagcccgaggccgaccccagaccctgcgagagagcccccagaggccccgccggccccgccgcccagcaggccgccaagctgttcggcctggagcccggcagacccccccccaccggccccgagcacaagtggaagcccttcgagctgggcaacttcgccgccacccagatggccgtgctggccgcccagcaccaccacagcagagccgaggaggaggccgccgtggtggccgccagcagcagcaagaaggcctacctggaccccggcgccgtgctgcccagaagcgccgccacctgcggcagacccgtggccgacatgcacagcgccgcccacggcagcggcgaggccagcgccatgcagagcctgatcaagtacagcggcagcttcgccagagacgccgtggccgtgagacccggcggctgcggcaagaagagccccttcggcggcctgggcaccatgaagcccgagcccgcccccaccagcgccggcgccagcagagcccaggccagactgccccacagcggcggccccgccgccggcggcggcagacagctgaagagagaccccgagagacccgagagcgccaaggccttcggcagagagggcagcggcgcccagggcgaggccgaggtgagacacccccccgtgggcatcgccgtggccgtggccagacagaaggacagcggcggcagcggcagactgggccccggcctggtggaccaggagagaagcctgagcctgagcaacgtgaagggccacggcagagccgacgaggactgcgtggacgacagagccagacacagagaggagagactgctgggcgccagactggacagagaccaggagaagctgctgagagagagcaaggagctggccgacctggccagactgcaccccaccagctgcgcccccaacggcctgaaccccaacctgatggtgaccggcggccccgccctggccggcagcggcagatggagcgccgaccccgccgcccacctggccacccacccctggctgcccagaagcggcaacgccagcatgtggctggccggccacccctacggcctgggcccccccagcctgcaccagggcatggcccccgccttcccccccggcctgggcggcagcctgcccagcgcctaccagttcgtgagagacccccagagcggccagctggtggtgatccccagcgaccacctgccccacttcgccgagctgatggagagagccaccgtgccccccctgtggcccgccctgtacccccccggcagaagccccctgcaccacgcccagcagctgcagctgttcagccagcagcacttcctgagacagcaggagttcctgtacctgcagcagcaggccgcccaggccctggagctgcagagaagcgcccagctggtgcaggagagactgaaggcccaggagcacagagccgagatggaggagaagggcagcaagagaggcctggaggccgccggcaaggccggcctggccaccgccggccccggcctgctgcccagaaagccccccggcctggccgccggccccgccggcacctacggcaaggccgtgagccccccccccagccccagagccagccccgtggccgccctgaaggccaaggtgatccagaagctggaggacgtgagcaagccccccgcctacgcctaccccgccacccccagcagccaccccaccagccccccccccgccagccccccccccacccccggcatcaccagaaaggaggaggcccccgagaacgtggtggagaagaaggacctggagctggagaaggaggcccccagccccttccaggccctgttcagcgacatcccccccagataccccttccaggccctgcccccccactacggcagaccctaccccttcctgctgcagcccaccgccgccgccgacgccgacggcctggcccccgacgtgcccctgcccgccgacggccccgagagactggccctgagccccgaggacaagcccatcagactgagccccagcaagatcaccgagcccctgagagagggccccgaggaggagcccctggccgagagagaggtgaaggccgaggtggaggacatggacgagggccccaccgagctgccccccctggagagccccctgcccctgcccgccgccgaggccatggccacccccagccccgccggcggctgcggcggcggcctgctggaggcccaggccctgagcgccaccggccagagctgcgccgagcccagcgagtgccccgacttcgtggagggccccgagcccagagtggacagccccggcagaaccgagccctgcaccgccgccctggacctgggcgtgcagctgacccccgagaccctggtggaggccaaggaggagcccgtggaggtgcccgtggccgtgcccgtggtggaggccgtgcccgaggagggcctggcccaggtggcccccagcgagagccagcccaccctggagatgagcgactgcgacgtgcccgccggcgagggccagtgccccagcctggagccccaggaggccgtgcccgtgctgggcagcacctgcttcctggaggaggccagcagcgaccagttcctgcccagcctggaggaccccctggccggcatgaacgccctggccgccgccgccgagctgccccaggccagacccctgcccagccccggcgccgccggcgcccaggccctggagaagctggaggccgccgagagcctggtgctggagcagagcttcctgcacggcatcaccctgctgagcgagatcgccgagctggagctggagagaagaagccaggagatgggcggcgccgagagagccctggtggccagacccagcctggagagcctgctggccgccggcagccacatgctgagagaggtgctggacggccccgtggtggaccccctgaagaacctgagactgcccagagagctgaagcccaacaagaagtacagctggatgagaaagaaggaggagagaatgtacgccatgaagagcagcctggaggacatggacgccctggagctggacttcagaatgagactggccgaggtgcagagacagtacaaggagaagcagagagagctggtgaagctgcagagaagaagagacagcgaggacagaagagaggagccccacagaagcctggccagaagaggccccggcagacccagaaagagaacccacgcccccagcgccctgagcccccccagaaagagaggcaagagcggccacagcagcggcaagctgagcagcaagagcctgctgaccagcgacgactacgagctgggcgccggcatcagaaagagacacaagggcagcgaggaggagcacgacgccctgatcggcatgggcaaggccagaggcagaaaccagacctgggacgagcacgaggccagcagcgacttcatcagccagctgaagatcaagaagaagaagatggccagcgaccaggagcagctggccagcaagctggacaaggccctgagcctgaccaagcaggacaagctgaagagccccttcaagttcagcgacagcgccggcggcaagagcaagaccagcggcggctgcggcagatacctgaccccctacgacagcctgctgggcaagaacagaaaggccctggccaagggcctgggcctgagcctgaagagcagcagagagggcaagcacaagagagccgccaagaccagaaagatggaggtgggcttcaaggccagaggccagcccaagagcgcccacagccccttcgccagcgaggtgagcagctacagctacaacaccgacagcgaggaggacgaggagttcctgaaggacgagtggcccgcccagggccccagcagcagcaagctgacccccagcctgctgtgcagcatggtggccaagaacagcaaggccgccggcggccccaagctgaccaagagaggcctggccgcccccagaaccctgaagcccaagcccgccaccagcagaaagcagcccttctgcctgctgctgagagaggccgaggccagaagcagcttcagcgacagcagcgaggagagcttcgaccaggacgagagcagcgaggaggaggacgaggaggaggagctggaggaggaggacgaggccagcggcggcggctacagactgggcgccagagagagagccctgagccccggcctggaggagagcggcctgggcctgctggccagattcgccgccagcgccctgcccagccccaccgtgggccccagcctgagcgtggtgcagctggaggccaagcagaaggccagaaagaaggaggagagacagagcctgctgggcaccgagttcgagtacaccgacagcgagagcgaggtgaaggtgagaaagagaagccccgccggcctgctgagacccaagaagggcctgggcgagcccggccccagcctggccgcccccacccccggcgccagaggccccgaccccagcagccccgacaaggccaagctggccgtggagaagggcagaaaggccagaaagctgagaggccccaaggagcccggcttcgaggccggccccgaggccagcgacgacgacctgtggaccagaagaagaagcgagagaatcttcctgcacgacgccagcgccgccgcccccgcccccgtgagcaccgcccccgccaccaagaccagcagatgcgccaagggcggccccctgagccccagaaaggacgccggcagagccaaggacagaaaggaccccagaaagaagaagaagggcaaggaggccggccccggcgccggcctgcccccccccagagcccccgccctgcccagcgaggccagagccccccacgccagcagcctgaccgccgccaagagaagcaaggccaaggccaagggcaaggaggtgaagaaggagaacagaggcaagggcggcgccgtgagcaagctgatggagagcatggccgccgaggaggacttcgagcccaaccaggacagcagcttcagcgaggacgagcacctgcccagaggcggcgccgtggagagacccctgacccccgcccccagaagctgcatcatcgacaaggacgagctgaaggacggcctgagagtgctgatccccatggacgacaagctgctgtacgccggccacgtgcagaccgtgcacagccccgacatctacagagtggtggtggagggcgagagaggcaacagaccccacatctactgcctggagcagctgctgcaggaggccatcatcgacgtgagacccgccagcaccagattcctgccccagggcaccagaatcgccgcctactggagccagcagtacagatgcctgtaccccggcaccgtggtgagaggcctgctggacctggaggacgacggcgacctgatcaccgtggagttcgacgacggcgacaccggcagaatccccctgagccacatcagactgctgccccccgactacaagatccagtgcgccgagcccagccccgccctgctggtgcccagcgccaagagaagaagcagaaagaccagcaaggacaccggcgagggcaaggacggcggcaccgccggcagcgaggagcccggcgccaaggccagaggcagaggcagaaagcccagcgccaaggccaagggcgacagagccgccaccctggaggagggcaaccccaccgacgaggtgcccagcacccccctggccctggagcccagcagcacccccggcagcaagaagagcccccccgagcccgtggacaagagagccaaggcccccaaggccagacccgcccccccccagcccagccccgccccccccgccttcaccagctgccccgcccccgagcccttcgccgagctgcccgcccccgccaccagcctggcccccgcccccctgatcaccatgcccgccaccagacccaagcccaagaaggccagagccgccgaggagagcggcgccaagggccccagaagacccggcgaggaggccgagctgctggtgaagctggaccacgagggcgtgaccagccccaagagcaagaaggccaaggaggccctgctgctgagagaggaccccggcgccggcggctggcaggagcccaagagcctgctgagcctgggcagctacccccccgccgccggcagcagcgagcccaaggccccctggcccaaggccaccgacggcgacctggcccaggagcccggccccggcctgaccttcgaggacagcggcaaccccaagagccccgacaaggcccaggccgagcaggacggcgccgaggagagcgagagcagcagcagcagcagcagcggcagcagcagcagcagcagcagcagcagcagcagcggcagcgagaccgagggcgaggaggagggcgacaagaacggcgacggcggctgcggcaccggcggcagaaactgcagcgccgccagcagcagagccgccagccccgccagcagcagcagcagcagcagcagcagcagcagcagcagcagcagcagcagcagcagcagcagcagcagcagcagcagcagcagcagcagcagcagcagcagcagcagcagcagcagcagcagcagcagcagcagcagcagcagcagcagcagcagcagcagcagcagcagcagcaccaccgacgaggacagcagctgcagcagcgacgacgaggccgcccccgcccccaccgccggccccagcgcccaggccgccctgcccaccaaggccaccaagcaggccggcaaggccagacccagcgcccacagccccggcaagaagacccccgccccccagccccaggccccccccccccagcccacccagcccctgcagcccaaggcccaggccggcgccaagagcagacccaagaagagagagggcgtgcacctgcccaccaccaaggagctggccaagagacagagactgcccagcgtggagaacagacccaagatcgccgccttcctgcccgccagacagctgtggaagtggttcggcaagcccacccagagaagaggcatgaagggcaaggccagaaagctgttctacaaggccatcgtgagaggcaaggagatgatcagaatcggcgactgcgccgtgttcctgagcgccggcagacccaacctgccctacatcggcagaatccagagcatgtgggagagctggggcaacaacatggtggtgagagtgaagtggttctaccaccccgaggagaccagccccggcaagcagttccaccagggccagcactgggaccagaagagcagcagaagcctgcccgccgccctgagagtgagcagccagagaaaggacttcatggagagagccctgtaccagagcagccacgtggacgagaacgacgtgcagaccgtgagccacaagtgcctggtggtgggcctggagcagtacgagcagatgctgaagaccaagaagtaccaggacagcgagggcctgtactacctggccggcacctacgagcccaccaccggcatgatcttcagcaccgacggcgtgcccgtgctgtgctag

SEQ ID NO: 36724 - DNA, 8907 bp, Artificial Sequence
  derived and/or modified sequence
atggacggacgggatttcggtccacaaagatcagtgcacgggccgccaccacctctgctctccggacttgctatggacagtcatagggtaggggcagcgaccgcgggtcgcctgcctgcctcaggcctccccggcccactgcctcccggtaaatatatggcgggactgaacttgcatccacatccaggggaggcgttcttagggagtttcgtcgcttccgggatgggcccctctgctagttctcatggctcccctgtccccttacccagcgatctgtcctttaggtcccccaccccttctaatctaccaatggttcaactctgggctgcccacgcacacgaaggcttctcgcatttaccgagcggactatatccatcttatttgcatctgaatcatcttgagcctccctcatccggatcccccctgctgtctcagctggggcaaccctcaattttcgacacccagaagggtcagggaccaggcggggacggtttctacttacctacagctggcgctcccggatcccttcatagccacgcccccagtgcacgtaccccggggggtggacactccagtggagctccagcaaaggggagcagttctagggatggacctgccaaagagcgcgccggtagaggcggcgagcccccacctctgtttgggaaaaaagaccccagagctcgaggcgaagaggcgagtggtccgaggggcgtcgttgacttgactcaagaggccagagccgaaggtcgacaggaccgaggacctccaaggctggctgagagactcagcccattcctcgccgaaagtaaaacaaagaatgccgccttgcaaccatccgttttgaccatgtgcaacggtggagctggagatgttggcctcccagcactggtcgccgaggcaggccgcgggggagccaaggaagccgcacgccaggatgaaggcgcccgcctcctccgccgtaccgagactttacttcctgggccacgtccctgccctagcccgctaccccctcctccagctccgccaaaaggcccccccgccccccccgccgcgacccccgccggcgtgtacacggtcttcagagagcaaggtcgagaacaccgggtggtagcgcctactttcgttccttcggtagaggcctttgacgaacggccaggtccaatccagattgcttcgcaggccagggatgccagggcccgggaaagagaagcaggaagaccgggtgtgctccaggcaccccccggttccccgagacccttggaccggcccgagggccttagggagaaaaactccgtcatcagaagcttaaagcggccaccaccagcggatgcaccaacagttagagcaactagggcatctcctgacccaagagcctatgtgcctgccaaagagctgcttaagcctgaagccgatccgcgaccgtgtgaaagggcaccgcgcggacctgccggtcctgcggctcagcaagcagccaagttgtttgggctggaaccaggacgcccaccacctaccggcccagagcacaaatggaagcctttcgaactggggaattttgccgccacccagatggccgtgctggcggctcagcatcaccatagcagggcggaagaggaagcagctgtggtcgcagccagctcaagcaaaaaggcttacttagatccaggggccgtattaccgcggtctgcggcaacctgcgggcgtcccgtggccgatatgcattcagccgcacacggcagcggggaggcatccgcaatgcagagcctgataaaatactctggatcctttgcccgtgatgcggtagccgtgcgccctgggggctgcggcaagaaatcacccttcggagggctaggcaccatgaaacctgagcctgctcccacatcggccggagctagtagagcccaggcccgcctgccacattccggcggaccagccgcagggggagggcgacagcttaagcgggaccccgaaagacctgagagcgcaaaggcattcgggcgggaaggtagcggcgcccagggagaagctgaggtgagacaccccccggtggggatcgctgtggccgtggcacgccaaaaggatagcggcggctctgggcggttaggaccgggtttagtggaccaggaacgatcactaagtctctctaacgtgaaaggacacggccgggcggatgaagactgcgttgacgaccgcgccaggcaccgggaggaacggctgctcggggcacgactggacagagatcaagagaaacttctgagggagagcaaagagctagccgaccttgccagactgcatcccacatcatgtgccccaaacggcctgaaccccaacctgatggtaaccggaggccctgccctggctgggtcaggccggtggtctgctgacccggccgcccatctcgccacccatccttggttgccacggtcggggaacgcgagcatgtggcttgctggccacccttatggcctggggcctccttcgttacaccaaggcatggccccagctttcccacccggactgggaggtagtctgccatctgcctatcaatttgtgcgtgacccccagagcggtcaattggttgtgatcccctcagatcacctgccacattttgctgagctgatggagagagccaccgtcccaccactctggccggccctctatcctccaggtcgaagccctctgcatcatgctcagcaactccaattattcagtcagcagcatttcctccgtcaacaggagttcctctacctgcaacagcaagctgcccaggctttagaactccagagatctgctcagctcgtccaggagagactcaaagctcaggaacacagagctgaaatggaggagaaagggtctaaacgaggtttggaagctgccggaaaagccgggctggctactgcggggccagggctgctcccaagaaagcctcccggcctggcggctgggcccgctggcacatacgggaaagcagtctctccgcccccttcccccagggccagtcctgttgccgctctgaaagccaaggtcatccagaaactggaggacgtctctaagccacccgcctatgcctacccagccaccccgtcaagccaccctacatccccgcccccagccagccccccccccacacccggaattacccgcaaggaagaagcccccgagaacgtggttgagaaaaaagatttagagcttgaaaaggaagctccaagccccttccaggcactgtttagcgacattccccccagatatccgttccaggccctgccaccgcactacgggagaccctacccttttctgctccagcccacagctgccgcagacgccgatggactcgcccccgacgtgccacttccagccgatggaccggagcgcctggcgttatccccagaggataagccaatccggctctccccaagcaagatcacagagcccttaagggagggacccgaggaagagcccctggctgagagggaggtaaaagcagaggtggaggacatggacgaggggccgacggagctcccccccttagagagtccactaccgcttcccgctgccgaggcaatggccaccccttctcccgcaggagggtgcggcggtggtctcctggaggcgcaggccttgtccgcgacggggcagtcatgtgcggagcctagcgaatgtccagactttgtggagggccccgagccccgggtcgatagccctggtcggactgaaccctgcacagctgcccttgacctgggcgtgcaactcactcctgaaacgttagtggaagctaaagaagagcctgtggaggtgcccgtggcagtgcccgtggttgaggctgtgcccgaggaagggctggctcaagtggctcccagcgagtcccagcccactttggaaatgtccgattgcgacgtcccagctggggagggacaatgcccctccctcgaaccccaggaggctgtccctgtgctggggtccacttgttttctcgaggaagcttcttccgaccagtttctgcctagcctggaagaccctcttgctgggatgaatgccctggccgcagcagcagagctgccacaggccagacctctccctagtcctggcgctgcaggagctcaagccctcgagaagctcgaggcggccgaatcactagtgctggagcagtcatttctccatgggataactctgctgtccgaaatcgccgagctcgagctcgagcgccggtctcaggagatgggcggggctgagagggctctggtggcgcgacctagcctggagtccctcttggccgctggatctcacatgttacgggaggtccttgacggcccggtcgtcgatcccctcaaaaatctacgattgcctcgggaattgaaaccgaacaaaaaatattcgtggatgagaaaaaaggaggagcgcatgtacgctatgaagagttcactcgaggacatggatgccctggagttagacttccgaatgcgcctcgctgaggtgcagagacagtacaaggagaagcagcgcgaactggtcaagctacagcggagacgcgacagtgaggaccgaagggaggagccccaccggagtctagcgcgaagagggccaggccgccctcgaaagaggactcacgctcccagcgctctcagtccacctcgcaagagaggaaagtccgggcattcttctggaaaactctcctcaaagtccctcttgaccagcgatgattacgagctgggagctggcattagaaagcgtcataaggggagtgaagaggaacacgacgccctgattggaatgggtaaggcccgagggcggaaccagacctgggacgaacatgaggcttcctccgactttatatcgcagctcaaaataaagaagaagaagatggcgagtgaccaggaacagctggcctcaaagttagacaaggccctgagcctgacaaaacaagataaactgaagagtccatttaaattcagcgattctgccggcggcaagtccaagactagcggcggctgcggccggtatttgaccccgtacgactccctattgggaaaaaaccgcaaggcactcgccaagggcctggggctctcacttaagtcatccagagaaggaaaacataagcgcgcagcaaagacccgaaagatggaagtcggcttcaaggcccgcggccaaccaaaatcagcgcatagcccttttgcttcagaggtctcttcgtactcttataatactgattctgaggaggacgaggagtttctgaaagatgagtggcctgcgcagggacctagctcaagtaagttaaccccatccctgctgtgttcgatggtcgctaagaattccaaggcagccggagggccgaagctcacgaagagggggctggcagctcctcggaccttaaaaccaaagccagctacatcccgaaaacagccattttgtctacttctgagggaagccgaagctcgctccagctttagcgattcctccgaggaaagcttcgaccaagacgagtcatccgaggaggaggacgaagaggaagaacttgaggaagaggacgaggccagtggagggggctataggttaggagctcgagagcgcgcactcagtcccggactggaagagtcaggcctgggtttgcttgctcgtttcgccgcgtcagcgctgccttccccaactgtaggacccagtctgtcagtggtgcagctcgaagcaaagcagaaagcgcgaaagaaggaggagaggcagagcctgctggggacagagttcgagtacacagattccgagtcagaagttaaggtcaggaagagatccccggccggcctcctgcgcccgaaaaagggactgggagaacctgggccatcactggcagctccaacaccaggcgctagaggaccggaccctagtagtcccgataaggctaagctagccgttgagaaaggccggaaagctagaaaactgcgcggccccaaagagccggggttcgaggccggccccgaagcttccgatgatgacctgtggacccgaaggagaagcgagcggatatttctgcacgacgcgtctgccgccgctcccgcgcccgtcagcacggctcccgcaaccaaaacctccagatgcgccaaggggggccccctaagcccacgcaaggacgcaggccgggccaaagatagaaaggacccgcgaaagaaaaagaaaggcaaagaagccggcccaggtgcaggcctgccccctccccgggctcctgccctcccttcagaagcgagagccccacacgcatctagcctgacagctgctaaacggtctaaagctaaagccaaaggcaaggaggtgaagaaggaaaacaggggcaagggcggagcagtttctaaactgatggaatccatggccgctgaagaggacttcgagcccaaccaggatagctcattttcagaagatgaacatctgcctcggggaggagctgtggaacggcctctgacgccagctcccagatcctgcattatagataaggatgagcttaaggacggcctcagggtcctaatcccaatggacgataaactcctgtacgcaggtcatgtccagaccgttcatagcccagatatctaccgtgtggtggttgaaggcgagagaggcaacaggccacacatttactgtctagagcagctactgcaggaagccatcattgatgtgagaccggcttccaccaggttcctcccacagggcactcgtatcgccgcctattggtctcagcagtatagatgtttgtatcctggcacagtagtccgcggcctactggacctggaagacgatggcgatctgattacagtcgagttcgacgacggagataccgggaggattccgctgagccacatccgactgctgccccctgattacaagatccaatgtgctgaaccgtccccggcacttctcgtgcctagtgcgaaaaggcgctcccgcaagacatccaaagataccggtgagggcaaggacggcggcaccgcaggctcggaggagccaggtgccaaggcaaggggccgagggcggaagcctagcgccaaagcaaagggcggtcgcgcagcgactctggaagagggaaacccaactgatgaggtgccgtctacccccctggcactggaaccaagctctactccgggatccaagaagtccccgcctgagcccgtcgataagagagctaaagctccaaaggcccgaccagcaccaccccagcctagtcctgcccctccagcgtttactagttgtcctgctcccgaacctttcgctgagctgcccgcacccgcaacatcactggcaccagccccgctcattactatgcccgccacacggcccaagccgaagaaggcccgagcagcagaggaatcaggtgcgaaggggcctcgtcgtcctggtgaggaggctgagctgctggtgaaactcgatcacgagggagtgaccagtcccaagtccaaaaaggcaaaggaggcactcctgctaagggaagaccctggcgccggtggctggcaggaaccaaaaagcctattgtcactggggtcttaccctcccgccgctggttcaagcgaacctaaagccccttggccaaaagcgaccgatggcgatcttgcacaggaacctgggccagggctgacttttgaggacagcggtaaccccaaatcgcccgacaaagcacaggctgagcaggacggagcagaagagagtgagtcgagttccagctcctcttcgggaagttctagcagcagcagctctagtagtagtagcgggtctgaaacagaaggcgaggaggagggggacaaaaacggcgatgggggctgtggtactggaggacgcaactgcagcgctgcgtcgtctcgggctgcttcccccgctagttccagttcctccagttccagttctagcagtagctcatcttcctcaagcagctccagctcttctagtagcagctcctcctcttcatcttccagcagctccagtagttctagttctagcagctcatcatctagcagcagtagttcctcgagctcgtctagctctagctctagtacgacagacgaagatagttcttgcagttccgatgatgaagccgccccagctccgacagctggcccttccgcccaggccgccctgcccactaaagcaacaaaacaggccggcaaggctaggcccagtgctcatagtcctggcaagaagacgccagctccacagccccaggctccaccccctcaaccaacgcagcccttgcagcctaaggcccaggcgggcgccaaatctagaccgaagaaacgcgagggggtccacctccccactactaaggaactggcaaaaaggcagagacttccaagtgtggaaaataggccaaaaattgcggccttcttgcctgctcgccagctgtggaaatggtttggaaagcccacccagcgaagaggaatgaaaggtaaagcgcgaaagctgttttataaggcaatcgtgagaggcaaggagatgattagaattggcgattgtgccgtattcctctcagcaggcaggccaaatcttccatatataggccgcattcagagtatgtgggaatcgtggggcaacaacatggtcgtgcgtgtgaagtggttctatcatcctgaggagacatcccctggtaagcagtttcaccagggtcaacattgggaccagaagagttcacgcagcctccccgctgcccttagggtgagctctcagcgaaaggacttcatggaacgtgcactctaccaatcctctcacgtggacgaaaatgacgttcagactgtctctcataagtgtcttgtggtcgggctcgagcagtatgagcaaatgctgaagaccaagaagtatcaggacagcgaggggctttactacctggccggcacatacgaacctaccacaggaatgattttctcaacagacggcgttcctgtgctgtgttag

SEQ ID NO: 36725 - DNA, 8907 bp, Artificial Sequence
  derived and/or modified sequence
atggacggacgtgactttggcccccagcgctctgtacatggccccccacctccactgctgagcgggctcgcgatggactctcaccgggttggagccgcgacagccggccgcctccctgcctccgggttgccaggtccactacctcccggaaaatacatggcaggtctgaatctgcatccccacccaggagaggcttttcttggctccttcgtcgcctccgggatgggccctagcgcttccagccatggctcccccgttccactcccaagcgacctgtcattccgctcacctacacccagtaatcttcccatggtccagctgtgggctgctcacgcccacgaaggattttcacacttacccagtgggctgtaccccagctatctgcatctaaatcatctcgaaccacctagttcagggagtccactgctgtctcagctggggcagccttccatatttgatactcaaaagggacagggccctggcggcgacggtttttatctcccaactgccggcgcccctggtagcctgcacagccacgcgccctctgctcgaacccccggcggcggacattcatccggagcacctgccaaaggatccagctcgagggacgggcctgctaaagagagagctgggcggggaggcgagccccctccacttttcggcaagaaagacccgagagcacgtggggaagaagctagtggtcctcgaggagtagttgatctgacacaggaagctagagcagagggacgccaggaccgcgggcccccccggcttgccgagagactgagcccatttttagctgaaagcaagacgaagaatgccgctttacaacccagcgtgcttactatgtgcaacgggggcgccggggacgtcggcctgccagcgctcgttgccgaagcaggaagagggggcgccaaggaagctgcccggcaggatgagggcgctagactcctcagaagaaccgagactctccttccggggccacgtccctgtccctctccactgccacctcctccggcacctcccaagggtccccctgcaccacccgcagctacgcctgctggggtctatactgtgttcagagagcaggggagagaacaccgcgtagtggcccccactttcgttccatccgtagaagccttcgacgagagacctggccccattcagatagcctctcaggcaagggatgctcgtgccagagaacgagaggcggggagacccggcgtattgcaggctccacccggaagccccagaccactggatcgacctgaaggactcagggagaagaactccgttattagaagccttaagcgaccccctcccgcagatgccccaacagtgcgcgcgacacgagcaagccctgacccgagggcttatgtccccgccaaggagctactgaagccagaagctgatcctcggccgtgtgagcgagcccctcggggccccgccgggcccgctgcacagcaggccgcaaagctatttgggcttgaacctggcagaccgcctccaaccggacccgagcacaaatggaaaccctttgagctaggcaactttgccgccactcaaatggcagtcttagcggcccagcatcatcactctagggctgaggaggaggcggccgtggtcgcagcttcaagctcaaagaaagcctatctagatccaggagctgtattaccccggtcagccgccacttgtgggaggcctgtagccgatatgcattccgcggcccacggtagcggcgaggcctcagccatgcagagcctcataaaatatagtggtagcttcgcaagggacgccgtagcagtacgaccaggggggtgcggcaagaagtcaccctttggcggcctcggtaccatgaagccagagcccgccccaacttctgcaggggcatcccgcgcacaggcccgcttgccgcactcgggcggccctgcagccggaggcggaaggcaactcaagcgcgatcctgagcgtccagagagcgcaaaggcgttcggtcgtgagggatctggcgcacagggggaggctgaggtgcggcatcctccagtcggaattgctgtggccgtggcccgacagaaggattcaggtggttcgggcaggctgggacccggattggtggatcaggaaaggtccctgtccttatcaaatgtaaaaggccacgggcgcgcggacgaagactgtgtggatgaccgcgcccggcatcgcgaggaacgactgctcggcgcccggttagacagggatcaggaaaagctgctaagagaatctaaagagctggccgacctcgcccgattgcatcctaccagctgcgctccaaacggcctgaatcccaacctgatggtgaccggagggccggcccttgcaggctctgggcgctggtccgctgaccccgccgctcacctagcgacccacccatggctaccgagaagcgggaacgcttcaatgtggcttgctggtcacccttacggtctagggcccccatctctccatcagggtatggcacccgcttttccacctggcctgggaggatccctcccctctgcttaccagtttgtccgcgatcctcagagcggccaacttgtggtaatcccatctgatcacctgccacactttgctgaactgatggagcgggctactgtgccccctctgtggcccgcattgtatcctcctggccgttccccactccaccatgctcagcaacttcagctattttcacagcagcactttctcaggcaacaggaatttctctacctacagcagcaggccgcacaggccctggaactgcagcgttccgcccagctcgtccaggagagactgaaggcccaagaacacagagctgaaatggaagagaaaggctccaaacggggcttggaagctgctgggaaagccggtctagccactgccggccccggcttactcccaaggaagcctccaggcctggcagccggtcccgcaggcacctacgggaaggccgtttcccccccacccagtccacgggccagccctgtcgcggcactaaaagctaaggttatccagaaactcgaggacgtgtctaagccccccgcttacgcataccctgcgacaccaagttctcatccaaccagcccccctcctgcatctccgcctcctacgcccggtatcactcgcaaggaggaagcccctgaaaatgttgtggaaaaaaaggatttggaactcgagaaagaagccccttccccttttcaagctctgttttccgatattcccccaaggtacccatttcaggctctccctccacactacggaagaccctacccttttctgctccagcccacagccgccgccgacgccgacgggctggcgcccgacgtaccactgccggcagacggacctgaacgattggcactctcacctgaagacaagccaatcagattgtccccttctaagattaccgagccactgcgtgaaggccccgaagaggagcccttggctgagcgggaagtcaaggcggaggttgaggatatggatgagggacctacggaattgcctccactggagtcacccttacccctgccagccgccgaagccatggcaacaccctctccagccggcggatgcggcgggggcctgctcgaggcccaggctctgagcgctaccggccagtcctgcgccgagccatctgagtgcccggacttcgtggagggccctgagcctcgggtcgatagcccgggtcgcaccgaaccatgtactgccgccttggacctgggagtgcaactaaccccagaaacactagtggaggctaaggaggaacctgtggaggtgcccgtggcagtcccagtcgtggaggccgtgccagaagaaggactggcacaagttgcaccaagcgaatcccaacctacgctcgagatgtcagattgcgacgtacctgccggcgaagggcagtgcccctccttggagccacaggaggcagtcccagtgcttggcagtacttgcttcctagaagaggcttcaagcgaccagttcttaccctcactggaggatcccttagccggcatgaatgcactcgctgccgccgctgaactccctcaggccaggcctcttccttctcccggagcggcaggagctcaggccctggaaaagctggaggccgcagaatctctcgtgttggaacagtcattccttcacggaattactctgctaagtgagattgccgagttagagctggaacgtaggtcccaagaaatgggtggcgcagagcgcgcactggtggcccggcccagtctcgaatccctgctggcagccggtagccatatgttaagagaagttctggatggccctgttgttgacccactgaaaaatttgaggctcccgagggagcttaagcccaataagaagtactcttggatgcggaagaaggaggagcgaatgtacgctatgaagagctctctcgaagatatggacgctttagagctggacttcagaatgagactcgctgaggtgcagagacaatataaagaaaagcaacgcgaactggtgaagctccagcggcggagggactccgaggacagacgcgaagagccacaccggagtttggcaagaaggggccctgggaggccacgcaagagaacccatgcaccaagtgcgctgtcacccccccggaagagaggtaaatcagggcattccagtggcaagttgtcctccaagtccctgctgaccagcgatgattatgaattgggggctgggatcagaaagcgccacaagggctccgaggaggagcacgatgccctgattggcatgggcaaggcacggggaaggaaccaaacatgggacgagcatgaggcgtcctcagattttatctcccagctcaaaattaagaagaaaaaaatggcttcagaccaggagcaactcgcctctaaactggataaagccctcagccttactaagcaggacaagctaaagagtccttttaaattttcagattctgccggcgggaaatcgaagacttctggaggttgtggtcgatatctgaccccttacgattcgttgctcggcaagaatcgcaaggcactggccaaaggattgggactgtcattgaaaagttcaagagagggcaaacataaaagagccgccaagactcggaagatggaggtagggttcaaagcgcgcggacagcccaaatccgctcatagcccatttgcctctgaagtgagcagctattcttacaacaccgattccgaagaagacgaggagtttctgaaagatgagtggccagcgcagggcccttctagctccaagctgacacctagcctcctatgtagtatggtggcaaaaaacagtaaagctgctggtgggccaaagctcacgaagagaggcctggccgctcccaggactctgaagccgaagccggctacgagcagaaagcaacccttttgtcttcttcttagagaggcagaagccagaagcagctttagtgactcgtccgaggagagtttcgaccaagacgagtcatcagaggaggaagacgaggaggaggaactggaagaagaggatgaagcttccggagggggttatcgtcttggagcccgggaacgcgcactctctcctggcttggaggaaagcgggctaggtttgctggccaggtttgccgcgagcgctttgccaagcccaacagtgggaccatctctcagcgtggttcagcttgaagccaaacagaaggctagaaaaaaggaggagaggcagtcattgttagggacggagtttgagtacacagatagtgaatctgaggtaaaagtcaggaagagaagcccagccgggttgctgcggccaaagaaaggattgggagaacccggcccttcattggccgcaccaacacccggcgccaggggacccgacccgagtagccctgacaaggcaaagctggccgtcgagaaaggacgaaaggcccgcaaactccgcggcccaaaagagcccgggttcgaggcaggccccgaggcctccgatgatgatctttggacccgtaggcgtagtgagagaatattcttgcatgacgcctccgccgccgctccagctccagtatccacggcacctgccacaaaaacaagccgctgtgcaaagggggggccgttatccccaagaaaggatgctggccgtgctaaagaccggaaagaccccagaaaaaagaaaaaaggcaaagaggccggccccggcgcaggcctgccccctccccgagctcccgcattgccgtccgaagccagagccccacacgcatcctccctgaccgctgcaaaaaggagtaaagccaaagctaaaggcaaagaagtcaagaaagaaaatcgtggtaaaggaggagcggtcagtaagttgatggaatccatggcggctgaagaagactttgagcccaaccaggattcttcatttagcgaggacgagcatctgcctaggggaggcgcagtggagcggcctctgacacccgccccccgctcttgcatcatcgataaggacgaactgaaggacggcctgcgcgtgctcataccgatggatgacaagctcctttacgctgggcacgtgcagactgtacactctccagacatttaccgcgttgtggtggagggcgaaagaggaaataggccacacatatactgcttggagcaactgctgcaggaagctatcattgacgtgaggccagccagcacacgtttcctccctcaaggaacaagaatcgctgcatactggtcccaacaataccggtgtctatacccaggaaccgtcgtgcgcggactcctggacttggaggatgacggagatctgattacagtagagttcgacgatggcgacaccggccggataccactctcccatatcagactgttaccccccgattacaagatccagtgcgcagagcctagcccggccctactcgtgcccagtgcaaagagacgctcccggaagacctctaaggatacgggagaaggaaaggacggcggcacggcaggcagcgaggagccgggagccaaggcacgtggaaggggacgtaaaccctcagcgaaagccaagggcgatagagcagcgaccctggaggaaggaaacccaacggatgaggtgcctagtacaccactggcactcgagcctagctcgacccccgggtcaaagaaatcccccccagaacctgtagataagcgggccaaagctccaaaagcccggcccgccccaccccagccctctccagctcctcctgcgttcacatcctgtcctgctccggaaccttttgccgaactacccgctccagccacaagcctagcccctgcacccctgattactatgcccgcaaccagacctaagccaaaaaaggccagagccgcagaggaaagcggggccaaaggaccgcgccgccctggagaagaagcagagctcctggtaaagttagaccacgagggtgttacttccccaaaaagtaaaaaggcaaaggaggcccttctgctcagagaagaccccggagcaggtggctggcaggagcccaagtccttgctctctctgggcagctaccctcctgcagctggctcatccgagcccaaagccccttggcctaaggcaaccgacggagacttagcacaggagcccggccccggcctgacttttgaggatagcgggaatcctaaatccccggataaagcccaggcggaacaagatggagcagaagagagtgagagcagctccagttctagctctggctcctcttcgtcttccagtagcagttcttccagtggttctgagaccgaaggtgaagaggaaggcgacaagaacggtgatggcgggtgcgggactggaggaaggaactgcagcgcagcaagctcaagggctgcctccccggcttcttcctcatctagtagcagctctagtagtagctcctcaagcagctcctcctcctcgtcctcatcaagtagttcatcttcttcgagctcatcgtcttccagttcttcttcttcaagttctagtagctcttcttcgtcttcctcctcatcttcttccagctcctcttcttcgtcgaccactgacgaggattcctcatgtagctcagatgacgaggctgcccctgcgcctaccgcaggtccctccgctcaggctgccttgcccaccaaggccaccaaacaggccggaaaggcgcgcccaagcgctcactcccccggaaagaagacccccgccccccaacctcaggccccccccccccagcccacccaacccctgcaaccgaaagctcaggctggtgctaagtccaggccaaagaagcgggagggcgtccacctaccgacaacaaaggaactagctaagagacagcggttgccatcggtggagaacagacccaaaatcgcggctttcctccccgctaggcagttatggaagtggttcggcaaacctactcagagaagaggtatgaagggcaaagcacgcaagcttttttataaagctattgtccgcgggaaggaaatgattaggatcggcgattgtgccgttttcctgagcgctggccgtccaaacctgccctatatcgggagaattcaatctatgtgggagtcttggggaaataatatggtcgtgagagtgaagtggttctaccaccctgaagagacatcaccaggcaagcagtttcaccaaggacagcactgggaccagaagtcctccaggtcactgcctgcggccttgcgagtgagctcacaacgcaaggatttcatggaaagagcactgtaccagagctcacatgtggacgaaaacgatgtccagacggtctctcataagtgtctagtggtggggctcgagcagtacgagcagatgctgaagaccaagaaatatcaggattctgagggcctttattacttagccggtacttacgagcccaccaccgggatgattttctccacagacggggtgcctgtgctttgctag

SEQ ID NO: 36726 - DNA, 8907 bp, Artificial Sequence
  derived and/or modified sequence
atggatggccgggactttggcccccagaggtctgtgcacggccccccaccacccctgctgagcggcctggccatggacagccaccgggtgggcgccgccacagctggccgcctgcctgccagcggcctgcccggccccctgcccccaggcaagtacatggccggcctgaacctgcacccccaccctggagaggccttcctgggcagctttgtggccagcggcatgggccccagcgccagcagccacggcagccctgtgcccctgcccagcgacctgtccttccgcagccccacccccagcaacctgcccatggtgcagctgtgggccgcccacgcccacgagggcttcagccacctgcccagcggcctgtaccccagctacctgcacctgaaccacctggagccccccagcagcggcagccccctgctgagccagctgggccagcccagcatctttgacacccagaagggccagggccctggaggagatggcttctacctgcccacagctggggcccctggcagcctgcacagccacgcccccagcgcccggacccctgggggcggccacagcagcggggccccagccaagggcagcagcagcagagatggccctgccaaggagcgggccggccggggcggggagcccccacccctgtttgggaagaaggacccccgggcccggggggaggaggccagcggcccccggggcgtggtggacctgacccaggaggcccgggcagagggccggcaggaccggggccccccccggctggccgagcggctgagccccttcctggccgagagcaagaccaagaatgctgccctgcagcccagcgtgctgaccatgtgcaatggaggagctggagatgtgggcctgcctgccctggtggccgaggccggccggggcggggccaaggaggccgcccggcaggatgagggcgcccggctgctgcggaggacagagaccctgctgcccggcccccggccctgccccagccccctgcccccacctccagccccacccaagggccccccagcccccccagctgccaccccagctggggtgtacaccgtcttccgggagcagggccgggagcaccgggtggtggcccccacctttgtgcccagcgtggaggcctttgatgagaggcctggccccatccagatcgccagccaggccagagatgcccgggcccgggagcgggaggccggccggcctggggtgctgcaggcccctcctggcagcccccggcccctggacaggcctgagggcctgcgggagaagaacagcgtcatccgcagcctgaagaggcctcctccagcagatgcccccaccgtgcgggccacccgggccagcccagacccccgggcctacgtgcctgccaaggagctgctgaagccagaggccgacccccggccctgtgagcgggccccccggggccctgctggccctgctgcccagcaggccgccaagctgtttggcctggagcccggccggcccccacccaccggccctgagcacaagtggaagccctttgagctgggcaactttgctgccacccagatggctgtgctggccgcccagcaccaccacagcagagctgaggaggaggccgctgtggtggccgccagcagcagcaagaaggcctacctggaccccggggctgtgctgcccaggtctgctgccacctgtggccggcctgtggccgacatgcacagcgctgcccacggcagcggggaggccagcgccatgcagagcctcatcaagtacagcggcagctttgccagagatgctgtggccgtgcggcctgggggctgcggcaagaagagcccctttggaggcctgggcaccatgaagccagagcccgcccccaccagcgctggggccagccgggcccaggcccggctgccccacagcggcggccctgctgctgggggcggccggcagctgaagagggaccctgagaggcctgagagcgccaaggccttcggccgggagggcagcggggcccagggcgaggccgaggtgcgccacccccctgtgggcattgctgtggccgtggcccggcagaaggacagcggcggcagcggccgcctgggccctggcctggtggaccaggagaggagcctgagcctgagcaatgtgaagggccacggccgggcagatgaggactgtgtggatgaccgggcccggcaccgggaggagcggctgctgggcgcccggctggaccgggaccaggagaagctgctgcgggagagcaaggagctggccgacctggcccggctgcaccccaccagctgtgccccaaatggcctgaaccccaacctgatggtgactggaggccctgccctggccggcagcggccgctggagcgctgaccctgctgcccacctggccacccacccctggctgcccaggtctggaaatgcctccatgtggctggccggccacccctacggcctgggcccccccagcctgcaccagggcatggccccagccttccccccaggcctgggcggcagcctgcccagcgcctaccagtttgtgcgggacccccagagcggccagctggtggtgatccccagcgaccacctgccccactttgctgagctgatggagcgggccaccgtgccccccctgtggccagccctgtacccacctggccgcagccccctgcaccacgcccagcagctgcagctgttcagccagcagcacttcctgcggcagcaggagttcctgtacctgcagcagcaggccgcccaggccctggagctgcagaggtctgcccagctggtgcaggagcggctgaaggcccaggagcacagagctgagatggaggagaagggcagcaagaggggcctggaggccgccggcaaggccggcctggccacagctggccctggcctgctgcccaggaagcccccaggcctggccgccggccctgctggcacctacggcaaggctgtgagccccccacccagcccccgggccagccctgtggccgccctgaaggccaaggtgatccagaagctggaggatgtgtccaagcccccagcctatgcctacccagccacccccagcagccaccccaccagccccccaccagccagccccccacccaccccaggcatcaccaggaaggaggaggccccagaaaatgtggtggagaagaaggacctggagctggagaaggaggcccccagccccttccaggccctcttcagtgacatccccccacgctaccccttccaggccctgcccccccactacggccggccctaccccttcctgctgcagcccacagctgctgctgatgctgatggcctggccccagatgtgcccctgcctgcagatggccctgagcggctggccctgagccctgaggacaagcccatccggctgagccccagcaagatcacagagcccctgcgggagggccctgaggaggagcccctggccgagcgggaggtgaaggccgaggtggaggacatggatgagggccccacagagctgccccccctggagagccccctgcccctgcctgctgctgaggccatggccacccccagccctgctgggggctgcggcggcggcctgctggaggcccaggccctgagcgccaccggccagagctgtgccgagcccagcgagtgcccagactttgtggagggccctgagccccgggtggacagccctggccgcacagagccctgcacagctgccctggacctgggcgtgcagctgaccccagagaccctggtggaggccaaggaggagcctgtggaggtgcctgtggccgtgcctgtggtggaggccgtgcctgaggagggcctggcccaggtggcccccagcgagagccagcccaccctggagatgtctgactgtgatgtgcctgctggggagggccagtgccccagcctggagccccaggaggccgtgcctgtgctgggcagcacctgcttcctggaggaggccagcagtgaccagttcctgcccagcctggaggaccccctggccggcatgaatgccctggccgctgctgctgagctgccccaggcccggcccctgcccagccctggagctgctggggcccaggccctggagaagctggaggccgctgagagcctggtgctggagcagagcttcctgcacggcatcaccctgctgtctgaaattgctgagctggagctggagcggcgcagccaggagatgggcggcgctgagcgggccctggtggcccggcccagcctggagagcctgctggccgccggcagccacatgctgcgggaggtgctggatggccctgtggtggaccccctgaagaacctgcggctgccccgggagctgaagcccaacaagaagtacagctggatgaggaagaaggaggagaggatgtatgccatgaagagcagcctggaggacatggatgccctggagctggacttcaggatgaggctggccgaggtgcagaggcagtacaaggagaagcagcgggagctggtgaagctgcagaggagaagagacagtgaagatagaagagaggagccccacaggagcctggcccggcggggccctggccggcccaggaagaggacccacgcccccagcgccctgagcccccccaggaagaggggcaagagcggccacagcagcggcaagctgagcagcaagagcctgctgaccagtgatgattatgagctgggcgccggcatcaggaagaggcacaagggcagcgaggaggagcatgatgccctgattggcatgggcaaggcccggggcaggaaccagacctgggatgagcacgaggccagcagtgacttcatcagccagctgaagatcaagaagaagaagatggccagtgaccaggagcagctggccagcaagctggacaaggccctgagcctgaccaagcaggacaagctgaagagccccttcaagttcagtgacagcgctgggggcaagagcaagaccagcggcggctgcggccgctacctgaccccctatgacagcctgctgggcaagaacaggaaggccctggccaagggcctgggcctgagcctgaagagcagccgggagggcaagcacaagagagctgccaagaccaggaagatggaggtgggcttcaaggcccggggccagcccaagagcgcccacagcccctttgccagcgaggtgagcagctacagctacaacacagattctgaagaagatgaggagttcctgaaggatgagtggccagcccagggccccagcagcagcaagctgacccccagcctgctgtgcagcatggtggccaagaacagcaaggccgccggcggccccaagctgaccaagaggggcctggccgcccccaggaccctgaagcccaagccagccaccagcaggaagcagcccttctgcctgctgctgcgggaggccgaggcccggagcagcttcagtgacagcagcgaggagagctttgaccaggatgagagcagcgaggaggaggatgaggaggaggagctggaggaggaggatgaggccagcggcggcggctaccgcctgggcgcccgggagcgggccctgagccctggcctggaggagagcggcctgggcctgctggccaggtttgctgccagcgccctgcccagccccaccgtgggccccagcctgtctgtggtgcagctggaggccaagcagaaggccaggaagaaggaggagcggcagagcctgctgggcacagaatttgagtacacagattctgagagcgaggtgaaggtgaggaagaggagccctgctggcctgctgcggcccaagaagggcctgggggagcccggccccagcctggccgcccccacccctggggcccggggccctgaccccagcagcccagacaaggccaagctggccgtggagaagggcaggaaggccaggaagctgcggggccccaaggagcccggctttgaggccggccctgaggccagtgatgatgacctgtggaccaggagaagaagtgagcgcatcttcctgcatgatgccagcgctgctgccccagcccctgtgtccacagccccagccaccaagaccagccgctgtgccaagggcggccccctgagccccaggaaggatgctggccgggccaaggacaggaaggaccccaggaagaagaagaagggcaaggaggccggccctggggccggcctgcccccaccccgggccccagccctgcccagcgaggcccgggccccccacgccagcagcctgacagctgccaagaggagcaaggccaaggccaagggcaaggaggtgaagaaggagaacagaggcaagggcggcgctgtgtccaagctgatggagagcatggctgctgaagaagattttgagcccaaccaggacagcagcttctctgaagatgagcacctgccccggggcggcgctgtggagcggcccctgaccccagcccccaggagctgcatcatcgacaaggatgagctgaaggatggcctgcgggtgctgatccccatggatgacaagctgctgtatgccggccacgtgcagacagtgcacagcccagacatctacagagtggtggtggagggggagcggggcaaccggccccacatctactgcctggagcagctgctgcaggaggccatcattgatgtgcggcctgccagcacccgcttcctgccccagggcaccagaattgctgcctactggagccagcagtaccgctgcctgtacccaggcaccgtggtgcggggcctgctggacctggaggatgatggagacctgatcaccgtggagtttgatgatggagacaccggccgcatccccctgagccacatccggctgctgcccccagactacaagatccagtgtgccgagcccagccctgccctgctggtgcccagcgccaagaggaggagcaggaagaccagcaaggacacaggagagggcaaggatggcggcacagctggcagcgaggagcccggggccaaggcccggggccggggcaggaagcccagcgccaaggccaagggcggccgggccgccaccctggaggagggcaaccccacagatgaggtgcccagcacccccctggccctggagcccagcagcaccccaggcagcaagaagagccccccagagcctgtggacaagagggccaaggcccccaaggcccggcctgccccaccccagcccagccctgcccccccagccttcaccagctgcccagcccctgagccctttgctgagctgcctgccccagccaccagcctggccccagcccccctcatcaccatgcctgccacccggcccaagcccaagaaggcccgggctgctgaggagagcggggccaagggcccccggcggcctggagaggaggccgagctgctggtgaagctggaccacgagggcgtgaccagccccaagagcaagaaggccaaggaggccctgctgctgagagaagatcctggagctgggggctggcaggagcccaagagcctgctgagcctgggcagctacccacctgctgctggcagcagcgagcccaaggccccctggcccaaggccacagatggagacctggcccaggagcccggccctggcctgacctttgaggacagcggcaaccccaagagcccagacaaggcccaggccgagcaggatggagctgaggagagcgagagcagcagcagcagcagcagcggcagcagcagcagcagcagcagcagcagcagcagcggcagcgagacagaaggagaggaggagggggacaagaatggagatggcggctgcggcactggaggcaggaactgcagcgctgccagcagcagagctgccagccctgccagcagcagcagcagcagcagcagcagcagcagcagcagcagcagcagcagcagcagcagcagcagcagcagcagcagcagcagcagcagcagcagcagcagcagcagcagcagcagcagcagcagcagcagcagcagcagcagcagcagcagcagcagcagcagcagcagcagcaccacagatgaggacagcagctgcagcagtgatgatgaagctgccccagcccccacagctggccccagcgcccaggccgccctgcccaccaaggccaccaagcaggccggcaaggcccggcccagcgcccacagccctgggaagaagaccccagccccccagccccaggcccccccaccccagcccacccagcccctgcagcccaaggcccaggccggggccaagagccggcccaagaagcgggagggcgtgcacctgcccaccaccaaggagctggccaagaggcagaggctgcccagcgtggagaaccggcccaagattgctgccttcctgcctgcccggcagctgtggaagtggtttgggaagcccacccagaggcggggcatgaagggcaaggccaggaagctgttctacaaggccatcgtgcggggcaaggagatgatcagaattggagactgtgctgtgttcctgtctgctggccggcccaacctgccctacatcggccgcatccagagcatgtgggagagctggggcaacaacatggtggtgcgggtgaagtggttctaccaccctgaggagaccagccctgggaagcagttccaccagggccagcactgggaccagaagagcagccgcagcctgcctgctgccctgcgggtgagcagccagaggaaggacttcatggagcgggccctgtaccagagcagccacgtggatgaaaatgatgtgcagacagtgagccacaagtgcctggtggtgggcctggagcagtatgagcagatgctgaagaccaagaagtaccaggacagcgagggcctgtactacctggccggcacctatgagcccaccaccggcatgatcttcagcacagatggagtgcctgtgctgtgctag

SEQ ID NO: 36727 - DNA, 8907 bp, Artificial Sequence
  derived and/or modified sequence
atggatggccgggactttggcccccagaggtctgtgcacggccccccaccacccctgctgagcggcctggccatggacagccaccgggtgggcgccgccacagctggccgcctgcctgccagcggcctgcccggccccctgcccccaggcaagtacatggccggcctgaacctgcacccccaccctggagaggccttcctgggcagctttgtggccagcggcatgggccccagcgccagcagccacggcagccctgtgcccctgcccagcgacctgtccttccgcagccccacccccagcaacctgcccatggtgcagctgtgggccgcccacgcccacgagggcttcagccacctgcccagcggcctgtaccccagctacctgcacctgaaccacctggagccccccagcagcggcagccccctgctgagccagctgggccagcccagcatctttgacacccagaagggccagggccctggaggagatggcttctacctgcccacagctggggcccctggcagcctgcacagccacgcccccagcgcccggacccctgggggcggccacagcagcggggccccagccaagggcagcagcagcagagatggccctgccaaggagcgggccggccggggcggggagcccccacccctgtttgggaagaaggacccccgggcccggggggaggaggccagcggcccccggggcgtggtggacctgacccaggaggcccgggcagagggccggcaggaccggggccccccccggctggccgagcggctgagccccttcctggccgagagcaagaccaagaatgctgccctgcagcccagcgtgctgaccatgtgcaatggaggagctggagatgtgggcctgcctgccctggtggccgaggccggccggggcggggccaaggaggccgcccggcaggatgagggcgcccggctgctgcggaggacagagaccctgctgcccggcccccggccctgccccagccccctgcccccacctccagccccacccaagggccccccagcccccccagctgccaccccagctggggtgtacaccgtcttccgggagcagggccgggagcaccgggtggtggcccccacctttgtgcccagcgtggaggcctttgatgagaggcctggccccatccagatcgccagccaggccagagatgcccgggcccgggagcgggaggccggccggcctggggtgctgcaggcccctcctggcagcccccggcccctggacaggcctgagggcctgcgggagaagaacagcgtcatccgcagcctgaagaggcctcctccagcagatgcccccaccgtgcgggccacccgggccagcccagacccccgggcctacgtgcctgccaaggagctgctgaagccagaggccgacccccggccctgtgagcgggccccccggggccctgctggccctgctgcccagcaggccgccaagctgtttggcctggagcccggccggcccccacccaccggccctgagcacaagtggaagccctttgagctgggcaactttgctgccacccagatggctgtgctggccgcccagcaccaccacagcagagctgaggaggaggccgctgtggtggccgccagcagcagcaagaaggcctacctggaccccggggctgtgctgcccaggtctgctgccacctgtggccggcctgtggccgacatgcacagcgctgcccacggcagcggggaggccagcgccatgcagagcctcatcaagtacagcggcagctttgccagagatgctgtggccgtgcggcctgggggctgcggcaagaagagcccctttggaggcctgggcaccatgaagccagagcccgcccccaccagcgctggggccagccgggcccaggcccggctgccccacagcggcggccctgctgctgggggcggccggcagctgaagagggaccctgagaggcctgagagcgccaaggccttcggccgggagggcagcggggcccagggcgaggccgaggtgcgccacccccctgtgggcattgctgtggccgtggcccggcagaaggacagcggcggcagcggccgcctgggccctggcctggtggaccaggagaggagcctgagcctgagcaatgtgaagggccacggccgggcagatgaggactgtgtggatgaccgggcccggcaccgggaggagcggctgctgggcgcccggctggaccgggaccaggagaagctgctgcgggagagcaaggagctggccgacctggcccggctgcaccccaccagctgtgccccaaatggcctgaaccccaacctgatggtgactggaggccctgccctggccggcagcggccgctggagcgctgaccctgctgcccacctggccacccacccctggctgcccaggtctggaaatgcctccatgtggctggccggccacccctacggcctgggcccccccagcctgcaccagggcatggccccagccttccccccaggcctgggcggcagcctgcccagcgcctaccagtttgtgcgggacccccagagcggccagctggtggtgatccccagcgaccacctgccccactttgctgagctgatggagcgggccaccgtgccccccctgtggccagccctgtacccacctggccgcagccccctgcaccacgcccagcagctgcagctgttcagccagcagcacttcctgcggcagcaggagttcctgtacctgcagcagcaggccgcccaggccctggagctgcagaggtctgcccagctggtgcaggagcggctgaaggcccaggagcacagagctgagatggaggagaagggcagcaagaggggcctggaggccgccggcaaggccggcctggccacagctggccctggcctgctgcccaggaagcccccaggcctggccgccggccctgctggcacctacggcaaggctgtgagccccccacccagcccccgggccagccctgtggccgccctgaaggccaaggtgatccagaagctggaggatgtgtccaagcccccagcctatgcctacccagccacccccagcagccaccccaccagccccccaccagccagccccccacccaccccaggcatcaccaggaaggaggaggccccagaaaatgtggtggagaagaaggacctggagctggagaaggaggcccccagccccttccaggccctcttcagtgacatccccccacgctaccccttccaggccctgcccccccactacggccggccctaccccttcctgctgcagcccacagctgctgctgatgctgatggcctggccccagatgtgcccctgcctgcagatggccctgagcggctggccctgagccctgaggacaagcccatccggctgagccccagcaagatcacagagcccctgcgggagggccctgaggaggagcccctggccgagcgggaggtgaaggccgaggtggaggacatggatgagggccccacagagctgccccccctggagagccccctgcccctgcctgctgctgaggccatggccacccccagccctgctgggggctgcggcggcggcctgctggaggcccaggccctgagcgccaccggccagagctgtgccgagcccagcgagtgcccagactttgtggagggccctgagccccgggtggacagccctggccgcacagagccctgcacagctgccctggacctgggcgtgcagctgaccccagagaccctggtggaggccaaggaggagcctgtggaggtgcctgtggccgtgcctgtggtggaggccgtgcctgaggagggcctggcccaggtggcccccagcgagagccagcccaccctggagatgtctgactgtgatgtgcctgctggggagggccagtgccccagcctggagccccaggaggccgtgcctgtgctgggcagcacctgcttcctggaggaggccagcagtgaccagttcctgcccagcctggaggaccccctggccggcatgaatgccctggccgctgctgctgagctgccccaggcccggcccctgcccagccctggagctgctggggcccaggccctggagaagctggaggccgctgagagcctggtgctggagcagagcttcctgcacggcatcaccctgctgtctgaaattgctgagctggagctggagcggcgcagccaggagatgggcggcgctgagcgggccctggtggcccggcccagcctggagagcctgctggccgccggcagccacatgctgcgggaggtgctggatggccctgtggtggaccccctgaagaacctgcggctgccccgggagctgaagcccaacaagaagtacagctggatgaggaagaaggaggagaggatgtatgccatgaagagcagcctggaggacatggatgccctggagctggacttcaggatgaggctggccgaggtgcagaggcagtacaaggagaagcagcgggagctggtgaagctgcagaggagaagagacagtgaagatagaagagaggagccccacaggagcctggcccggcggggccctggccggcccaggaagaggacccacgcccccagcgccctgagcccccccaggaagaggggcaagagcggccacagcagcggcaagctgagcagcaagagcctgctgaccagtgatgattatgagctgggcgccggcatcaggaagaggcacaagggcagcgaggaggagcatgatgccctgattggcatgggcaaggcccggggcaggaaccagacctgggatgagcacgaggccagcagtgacttcatcagccagctgaagatcaagaagaagaagatggccagtgaccaggagcagctggccagcaagctggacaaggccctgagcctgaccaagcaggacaagctgaagagccccttcaagttcagtgacagcgctgggggcaagagcaagaccagcggcggctgcggccgctacctgaccccctatgacagcctgctgggcaagaacaggaaggccctggccaagggcctgggcctgagcctgaagagcagccgggagggcaagcacaagagagctgccaagaccaggaagatggaggtgggcttcaaggcccggggccagcccaagagcgcccacagcccctttgccagcgaggtgagcagctacagctacaacacagattctgaagaagatgaggagttcctgaaggatgagtggccagcccagggccccagcagcagcaagctgacccccagcctgctgtgcagcatggtggccaagaacagcaaggccgccggcggccccaagctgaccaagaggggcctggccgcccccaggaccctgaagcccaagccagccaccagcaggaagcagcccttctgcctgctgctgcgggaggccgaggcccggagcagcttcagtgacagcagcgaggagagctttgaccaggatgagagcagcgaggaggaggatgaggaggaggagctggaggaggaggatgaggccagcggcggcggctaccgcctgggcgcccgggagcgggccctgagccctggcctggaggagagcggcctgggcctgctggccaggtttgctgccagcgccctgcccagccccaccgtgggccccagcctgtctgtggtgcagctggaggccaagcagaaggccaggaagaaggaggagcggcagagcctgctgggcacagaatttgagtacacagattctgagagcgaggtgaaggtgaggaagaggagccctgctggcctgctgcggcccaagaagggcctgggggagcccggccccagcctggccgcccccacccctggggcccggggccctgaccccagcagcccagacaaggccaagctggccgtggagaagggcaggaaggccaggaagctgcggggccccaaggagcccggctttgaggccggccctgaggccagtgatgatgacctgtggaccaggagaagaagtgagcgcatcttcctgcatgatgccagcgctgctgccccagcccctgtgtccacagccccagccaccaagaccagccgctgtgccaagggcggccccctgagccccaggaaggatgctggccgggccaaggacaggaaggaccccaggaagaagaagaagggcaaggaggccggccctggggccggcctgcccccaccccgggccccagccctgcccagcgaggcccgggccccccacgccagcagcctgacagctgccaagaggagcaaggccaaggccaagggcaaggaggtgaagaaggagaacagaggcaagggcggcgctgtgtccaagctgatggagagcatggctgctgaagaagattttgagcccaaccaggacagcagcttctctgaagatgagcacctgccccggggcggcgctgtggagcggcccctgaccccagcccccaggagctgcatcatcgacaaggatgagctgaaggatggcctgcgggtgctgatccccatggatgacaagctgctgtatgccggccacgtgcagacagtgcacagcccagacatctacagagtggtggtggagggggagcggggcaaccggccccacatctactgcctggagcagctgctgcaggaggccatcattgatgtgcggcctgccagcacccgcttcctgccccagggcaccagaattgctgcctactggagccagcagtaccgctgcctgtacccaggcaccgtggtgcggggcctgctggacctggaggatgatggagacctgatcaccgtggagtttgatgatggagacaccggccgcatccccctgagccacatccggctgctgcccccagactacaagatccagtgtgccgagcccagccctgccctgctggtgcccagcgccaagaggaggagcaggaagaccagcaaggacacaggagagggcaaggatggcggcacagctggcagcgaggagcccggggccaaggcccggggccggggcaggaagcccagcgccaaggccaagggggacagagctgccaccctggaggagggcaaccccacagatgaggtgcccagcacccccctggccctggagcccagcagcaccccaggcagcaagaagagccccccagagcctgtggacaagagggccaaggcccccaaggcccggcctgccccaccccagcccagccctgcccccccagccttcaccagctgcccagcccctgagccctttgctgagctgcctgccccagccaccagcctggccccagcccccctcatcaccatgcctgccacccggcccaagcccaagaaggcccgggctgctgaggagagcggggccaagggcccccggcggcctggagaggaggccgagctgctggtgaagctggaccacgagggcgtgaccagccccaagagcaagaaggccaaggaggccctgctgctgagagaagatcctggagctgggggctggcaggagcccaagagcctgctgagcctgggcagctacccacctgctgctggcagcagcgagcccaaggccccctggcccaaggccacagatggagacctggcccaggagcccggccctggcctgacctttgaggacagcggcaaccccaagagcccagacaaggcccaggccgagcaggatggagctgaggagagcgagagcagcagcagcagcagcagcggcagcagcagcagcagcagcagcagcagcagcagcggcagcgagacagaaggagaggaggagggggacaagaatggagatggcggctgcggcactggaggcaggaactgcagcgctgccagcagcagagctgccagccctgccagcagcagcagcagcagcagcagcagcagcagcagcagcagcagcagcagcagcagcagcagcagcagcagcagcagcagcagcagcagcagcagcagcagcagcagcagcagcagcagcagcagcagcagcagcagcagcagcagcagcagcagcagcagcagcagcagcagcaccacagatgaggacagcagctgcagcagtgatgatgaagctgccccagcccccacagctggccccagcgcccaggccgccctgcccaccaaggccaccaagcaggccggcaaggcccggcccagcgcccacagccctgggaagaagaccccagccccccagccccaggcccccccaccccagcccacccagcccctgcagcccaaggcccaggccggggccaagagccggcccaagaagcgggagggcgtgcacctgcccaccaccaaggagctggccaagaggcagaggctgcccagcgtggagaaccggcccaagattgctgccttcctgcctgcccggcagctgtggaagtggtttgggaagcccacccagaggcggggcatgaagggcaaggccaggaagctgttctacaaggccatcgtgcggggcaaggagatgatcagaattggagactgtgctgtgttcctgtctgctggccggcccaacctgccctacatcggccgcatccagagcatgtgggagagctggggcaacaacatggtggtgcgggtgaagtggttctaccaccctgaggagaccagccctgggaagcagttccaccagggccagcactgggaccagaagagcagccgcagcctgcctgctgccctgcgggtgagcagccagaggaaggacttcatggagcgggccctgtaccagagcagccacgtggatgaaaatgatgtgcagacagtgagccacaagtgcctggtggtgggcctggagcagtatgagcagatgctgaagaccaagaagtaccaggacagcgagggcctgtactacctggccggcacctatgagcccaccaccggcatgatcttcagcacagatggagtgcctgtgctgtgctag

SEQ ID NO: 36728 - DNA, 8907 bp, Artificial Sequence
  derived and/or modified sequence
atggacggccgggacttcggcccccagcggagcgtgcacggccccccacctcctctgctttctggacttgccatggattctcacagggtcggcgctgctaccgcgggccggctccccgcttctgggctccccggccccctgccaccaggaaagtatatggccgggctcaatctccatcctcatcccggagaagcattcctggggtcctttgtggcctcgggaatgggtccaagtgcctctagtcatggctctccagtacctctgcccagcgacttgtcgttcagatcacccacgccatcaaacctccctatggttcagctgtgggccgcacatgctcacgaaggttttagtcatttacctagcggcttgtacccgtcctacctgcacttgaaccacctcgaacctcccagcagcggcagccctctgctcagccagttaggccaaccttctatttttgacacacaaaagggccagggacctggcggcgatggcttttatttaccaaccgccggagcccccggctccttacattcccacgccccttccgctcgtacccctggaggtggccacagttctggggcccccgctaaaggttcatccagccgcgatggcccagccaaggagcgtgctggcaggggcggcgagccacccccactcttcggcaaaaaagaccctagagctcgaggagaagaggcatcaggacctcgcggggtggtagacctgacacaggaagcacgagcggagggccgtcaggatagagggccaccaaggcttgccgagaggctctccccttttctcgcggaatcaaagaccaaaaatgctgccttgcaaccatctgttttgaccatgtgtaacgggggggctggtgatgtcggcctccccgctctagttgccgaggccggccgggggggggcaaaagaggccgcccgccaagacgaaggggcacgtttactgcgtaggaccgagactctcctgcctggacccaggccctgtccctccccacttcctccgccgcctgccccacccaagggcccccctgcgccaccggcagctacaccagccggggtgtacactgtgtttagagagcaagggcgagagcatcgggttgtggccccaacttttgtgcccagcgtcgaagccttcgatgaacgcccaggtcctatccagatcgcaagccaggcaagggacgctagggcacgcgaaagggaggcagggcgaccaggcgtcctgcaggctccgcctggcagtccccgacctttagacaggcccgagggcctgcgcgaaaaaaattccgttattcgaagcctgaaaaggccaccacccgctgacgctcctaccgtcagggcaacacgcgcctcccccgatccgcgagcatacgtaccagctaaagaacttcttaagccagaggccgaccctagaccctgtgagagagcaccaaggggcccagccggccccgccgcccagcaggcagcaaaactctttgggctggaaccaggcaggccgccaccaaccggccccgagcacaaatggaaaccttttgaactgggtaatttcgctgctacccagatggctgttcttgcggcacagcaccaccactcgagggcggaggaagaggctgcagttgttgccgcctcgtcaagcaaaaaggcctatctcgacccaggagcagtgttgcctcgttctgccgcgacttgcgggcggccggttgctgacatgcactccgccgcacacggctctggcgaagccagcgcgatgcagagtcttataaagtatagcggaagttttgccagagatgcagtggccgtcagaccaggtggctgcggtaaaaagtccccattcggtggcctcgggaccatgaagccggaacccgcacccacaagcgccggtgcatccagggcccaggccaggctcccacactcgggtggaccggcagcaggcggaggccgacagctcaaacgggaccctgaacgccctgaatcagccaaagccttcggccgagagggcagcggcgcacaaggcgaagccgaggtgcggcaccctcctgtgggcatcgcggtggctgtcgctaggcaaaaggacagtggcgggtcagggcggttaggaccggggctcgtggatcaggagaggagcctgagcttgtcaaacgtcaagggacatggcagagccgacgaggattgcgtggatgatagggctcgccatagagaggagcggctgctaggtgcgcgtttagatagggatcaggagaagctgctccgagagagcaaagagttggctgacttggcccggctacacccgacatcttgtgctcctaatggattgaatccgaacctgatggtcactggtggaccagctctcgcaggcagcgggagatggtcggctgatccggccgcacatcttgctacacacccctggctacctagaagtggcaatgcctctatgtggcttgccggccatccctacgggttagggccccctagcctgcaccaggggatggcccctgctttcccccccgggctcggaggatcacttcctagcgcctaccagttcgtgcgggacccccaatcaggtcagctcgtggtcatccctagcgaccatttgcctcacttcgccgagttaatggagagagcaacagttccacctctgtggccagcactttatcctccggggcgatcaccactgcaccatgctcagcagttgcagctgttcagccagcaacacttcctccgacagcaggagtttttgtaccttcagcagcaggccgcccaggccttggagctccagcggagcgcgcaactggtgcaggagcgccttaaagcgcaagagcacagggccgagatggaggagaaggggtcgaaacggggacttgaagcagccggtaaggctggcctagctacagcggggcccggactcctcccaagaaaacccccgggacttgcggccggacctgccggcacctacggaaaggctgtaagcccaccaccatcaccaagagcatcccctgttgcagccttaaaggccaaggtaattcaaaaacttgaagacgttagcaagcctcctgcctatgcatatccggccacaccgtcctcccacccaacttctcctcctcctgcctctccaccgcccactccgggaatcaccagaaaggaggaggcacctgagaacgtggtggaaaagaaagacttggaactcgagaaggaggccccctccccctttcaagctcttttcagtgatatccccccgagatacccatttcaggctctgccaccccattatggcagaccgtatcctttccttctgcagccaacagcagccgccgacgctgatgggttggcccctgacgtgcctctgccagcagacgggccagagcggctggccctctctcccgaggacaagcccatccgactgagcccgtcgaagattacagagcccctaagagaaggacctgaagaagagccattggccgaaagggaggtgaaagcagaggtggaagacatggacgagggaccgaccgaactgccacctctggagagtccattgccgctgccagccgcggaggcaatggccacccctagtccagccggaggatgcggcggaggactgctcgaagcacaggccctttcggcaacaggtcagagctgtgctgagccctcggagtgccccgacttcgtagagggccctgagccccgggtagacagtccagggaggactgagccctgtacagctgcactggacctcggggtccagttgacacccgagaccctggtggaggccaaggaggagcctgtggaagtccccgtcgccgtccctgtggtagaggcagtccctgaggaaggcctggcccaggtcgcaccgtcagaaagccagccaaccctggagatgtcggactgtgacgtgcccgccggggaaggccagtgtccgagcttggaaccacaggaggccgtccccgtgctgggtagtacttgtttcctcgaggaggcgtccagcgatcagtttctgccgtccttggaggaccccttagctggaatgaatgcactcgcagctgcagcagaactcccccaggctaggcccctgcccagccccggggcggctggggcccaggcgctggaaaagcttgaagccgctgaatcattggtactggagcagagctttctgcacggcatcacacttctctctgagatagctgaactggaattagaaaggagatctcaggaaatgggtggagccgagcgagccctggtggctagaccatcactcgagtccctgctggctgcaggttcccacatgctcagagaggttctggacggcccagttgtcgatcccctgaagaacctgcgattacctcgggagctgaagcccaataaaaaatatagctggatgcgcaaaaaagaagaacgaatgtacgcaatgaagtcatcacttgaagatatggacgccctcgaattggactttcgcatgaggctagccgaggtccagcgacagtataaggagaagcagcgagaactggtcaagttgcagcgaagacgagactcagaagaccgtcgcgaggaaccccaccggtcactagcccggcgcggacccggaagaccccgtaaacgtactcatgctccgtctgctctgtcaccccccagaaagaggggcaaaagcggacactcctctggaaaactttccagcaagtcccttttaacttccgacgattatgagctgggcgcgggtatacggaaacgccataaaggaagtgaggaagagcacgatgccctcatcggtatggggaaggctcggggccggaaccagacgtgggacgaacacgaggcctctagcgactttatcagtcagttgaagattaaaaaaaagaagatggccagcgaccaagaacagttagcatctaaactggataaagcattatcactgactaaacaggataaactcaagtccccattcaaattttccgactccgccgggggcaaatctaaaacatctggggggtgtggccgctacttaacaccatacgactcactcctgggcaaaaacagaaaggcactcgcgaaaggcctcggacttagcctgaagtctagcagggaaggcaagcataaacgagctgccaagactcgcaaaatggaggttgggtttaaggcgagggggcaaccgaaaagtgctcattctcccttcgccagtgaggtttcatcgtatagctacaataccgatagcgaggaggacgaggagtttctgaaggatgagtggcccgcccagggtcccagctcgtcaaaattaacccccagcctcttgtgctcgatggtggccaaaaattcaaaggccgctggtggcccaaaactgacgaagagggggctcgctgcccctcgcacacttaagcctaagcccgcaacttcccgaaaacagcctttttgcctgcttctcagagaggcagaggccaggtccagttttagtgattcttcagaggagtctttcgatcaggatgaatcgtcggaagaggaggacgaggaagaggaactagaggaagaggacgaagcatccggcggcggttatcgcctgggagctagggaacgggccctttcgcccggcctcgaggagagcggcctcggtctgttagctcggttcgccgcctccgctttaccttctcctaccgttggcccctccctaagcgtggtacagctggaggctaaacagaaggccagaaagaaagaggaacggcaatccttgttgggcacggagttcgagtacacagatagcgagtccgaagtgaaagtgaggaaacgaagtccagccggattgctgagacccaagaagggcctaggcgaaccgggcccgagtttggcagcacccacgccaggggctagaggaccagatcccagctcccccgacaaggccaaacttgcagtagaaaagggacgtaaggcgaggaagctcaggggtcctaaagagccaggcttcgaggctggaccggaggctagcgatgacgacctttggacacggagaagatccgagcggatcttcctgcatgacgctagcgctgccgcccccgctccggtaagcaccgcgcccgcaacgaagacaagccggtgcgccaagggaggacctctttccccaaggaaggacgcaggcagagccaaagataggaaagacccaagaaaaaagaaaaaaggaaaggaggctggccccggagccggattacctcccccccgggcgccagccctgccaagtgaagcccgcgccccccacgcctctagtctcacagcagctaaacgctcaaaagctaaagccaaaggcaaagaggtgaaaaaggagaacagaggcaaaggcggcgctgtgtcaaagctgatggagagcatggctgcggaggaggatttcgagcctaaccaggacagctcattctccgaggatgaacatctaccaaggggcggggctgtggaacgcccactaactcctgctccaaggtcctgtataatcgacaaagacgagctcaaggatggactacgggtcctgatcccaatggatgacaagctcctctacgctggacacgttcagaccgtgcacagtcctgatatttatcgggtggtggtggaaggcgagcgcggtaaccgtccccacatttactgtctcgaacagctcctgcaggaggccataatcgatgtcaggccagccagcactcgatttttgcctcagggaaccaggatagctgcctactggagccaacaatacaggtgtttgtaccccgggacagtcgtgcgggggctcctggacctcgaggacgacggagatttaattactgtggagttcgatgacggtgacaccggaaggattcctcttagtcatatcaggctactccctccggactacaaaatccagtgcgctgaaccaagtcctgccctgctggtgccatccgcaaagagaaggagcagaaaaacctctaaagacaccggagaagggaaggacgggggaaccgccggcagcgaggaaccgggcgcgaaggcgagaggacgcggtagaaaacccagcgccaaggcaaaaggcgggcgcgccgcgacactagaggaaggaaaccccacagacgaggttccctcaacaccactggctctcgaaccatcatcaactcccggttctaaaaagagtcctcctgagcccgtcgataaacgtgccaaagcccctaaggcacgtcccgctccccctcagccctctcccgctcccccagctttcacaagctgtcctgcacccgagcccttcgcggagctacccgcaccagctacatctctggcccccgcacctctcataacaatgcccgctacgagacctaaacctaagaaagcaagagcggctgaagaaagcggagccaaaggcccacgaaggcccggagaggaagccgagctgctcgtgaaactcgaccatgaaggcgtcacgtctccaaagagcaaaaaagctaaggaggccctgctcctgcgagaggatcccggtgctgggggctggcaagagcctaaatcactgcttagccttgggagttaccctccggcagcagggagctccgaaccaaaagccccctggcctaaagcgaccgacggggatctggcgcaggaacctgggccgggccttacctttgaagactccggcaatcccaagagccccgacaaggctcaggccgaacaagatggagctgaggagtctgagtccagttcaagctcttcttcaggatctagttcctcatccagcagtagttcatcctctggaagcgagaccgagggggaagaagaaggggacaagaacggagacggaggctgtggcacaggaggtcgcaattgtagtgccgcctcgagtagggcagcaagtccagcatcttctagcagttcatcctcctcatcaagcagcagctcgagttccagttcctcatcttcctcctctagtagcagctcttccagcagcagctcctcgagcagcagtagtagcagctcatcctcatcaagtagcagctcatcttcctcttcttcttcaagctctagctctagcagcacaactgatgaggactccagttgcagctcagatgacgaggccgcacctgctccgaccgcaggcccctctgcccaggctgcactgcccacgaaggcaaccaaacaggcgggaaaagcccgaccgtctgcccactctccagggaagaagacgcccgcaccacaaccgcaggcccctcctccccagcccactcagccactgcaacccaaggcccaggccggcgcgaagtccagacctaaaaaaagagaaggggttcatttacctacgacaaaggaattggctaaacggcagcgcctcccgtctgtggaaaaccgacccaagatcgcggcctttctgcccgccaggcagttgtggaagtggtttgggaaaccaacacagcggcgcggaatgaaggggaaggcccgcaagctgttttacaaggcgattgtgagaggtaaagaaatgattcgcattggagattgtgctgtgttcctgtctgctggccgccccaatctcccatacattggcagaattcaatccatgtgggagtcatgggggaacaatatggtggttagggtgaagtggttctatcaccctgaagagacctcaccgggcaagcaattccatcagggccaacactgggaccagaaaagctcgagaagtcttccagccgctctcagggtgagcagccagaggaaggatttcatggaaagagccctctaccaatcatcccatgtggacgagaatgatgtgcaaactgtctctcacaaatgccttgtggtcggcttggagcagtatgaacagatgttaaagaccaagaagtaccaggattccgaaggactgtactaccttgccggcacttatgaaccaaccaccgggatgatcttctctaccgacggggtgcctgttctctgctag

SEQ ID NO: 36729 - DNA, 8907 bp, Artificial Sequence
  derived and/or modified sequence
atggacggccgggacttcggcccccagcggagcgtgcacggcccccctccgccgctcctgtctggtctggcgatggactcccacagggtgggcgctgccaccgcagggagattgcctgcaagtggactccctggtcctctgcctcctggcaaatacatggccggtctgaacctgcacccccatccaggagaagcgtttttgggatcatttgtcgcctctggtatgggccctagcgccagctcccatggctctccagtccctctccccagcgacctgtctttccggtccccgacccccagtaatctgcctatggtgcagctgtgggccgctcatgcccacgaaggtttttcccacctcccgtcggggctttatccaagttacctgcatcttaatcatctggaacctcccagttccggctcaccattgttgagccagctggggcagccatccatcttcgatacacagaagggccagggccccggtggggacgggttctatctccccaccgcaggtgcccctgggtcgttgcattctcacgctccctcagcacgcacacccggcggtggtcactctagcggggcaccggccaagggttcctccagccgagatggacccgcgaaagagagggctggccgggggggggagccccctcctctgtttggcaagaaagatcccagggctaggggtgaggaggctagcggtcctaggggtgtcgttgacctcactcaggaggcccgagctgaaggacggcaagatcgcggaccaccaagattagccgaaaggcttagcccatttttagccgagagcaaaacgaaaaacgccgccctgcagccgtcagtcttgaccatgtgcaacgggggagcgggcgatgttggcttgccagcccttgtggctgaggcagggcggggaggagctaaggaagcagcccgccaggacgagggcgctaggctattacggcgcactgaaacgttgttgcctggaccacgaccttgcccctcaccgttaccgccacctcccgcaccacccaaaggccctcctgcccctccagctgcaacccctgccggcgtgtatactgtgtttagggagcaaggccgcgaacaccgagttgttgctcccacattcgtgcctagcgtagaagccttcgacgagcggccaggccccattcaaatcgcaagccaagccagagacgcgcgggctcgagagcgggaagcaggtaggccaggagtgctccaggccccgcctggaagccccaggcctcttgatcgacccgaggggctacgcgaaaaaaactctgtgattcgctccctgaagagaccaccgcccgccgatgcaccaacagtgcgtgctacacgggcctccccagatcccagggcttacgttcccgctaaggagcttttaaagccagaagccgaccctcgaccgtgcgagcgggcgcctaggggcccagccggaccggccgcgcagcaggccgcaaagctgttcggcctggagcccggccggcctccgccgacaggacctgagcataagtggaagcctttcgaactcgggaacttcgcggccactcagatggctgttttggccgctcaacaccaccacagtcgggctgaagaggaggcagctgttgttgccgcttcctcatctaaaaaagcatacctggaccctggggccgtgttgccgcggagtgccgctacctgtggccgccccgtcgctgacatgcactcagccgcacatggcagcggggaggccagcgctatgcagtcattgattaagtacagcggctcatttgcccgggatgcagttgctgttcgtccaggaggctgcggaaagaagagtcccttcgggggccttggtacaatgaaacctgagcctgcacccacctccgcaggggcatctcgggcccaggctcgcctgcctcacagcggtggacccgccgccggtggaggccggcagctgaaacgggaccctgagagacccgagagcgccaaagcattcggccgggaggggtctggcgcccaaggcgaagctgaggttcgacaccctccggtaggaattgcagtcgctgtggccaggcaaaaggacagtggggggtcaggccgtctgggtccaggactcgtagaccaagaacggtccctcagcctgtcaaacgtgaagggccacgggcgcgcggacgaagactgtgttgacgatagagccagacaccgagaagagaggctgctaggagcacgtctggaccgagatcaggagaaattgctccgagaatccaaagaactggcagatctcgctcgactccacccaacctcttgcgcaccgaacggccttaaccccaatctcatggttaccggcggtcctgccctggccggctccggaagatggtcagccgacccagcagcacatctcgctactcacccatggcttccaagatcaggaaacgcatccatgtggctggctgggcacccatacggtcttggcccaccaagcctccatcaaggaatggctcccgccttccctccggggctcggcggttcactccctagcgcgtaccagtttgtaagagacccccaaagtggacagttggttgtaatcccctctgaccacctaccccacttcgccgaattaatggagcgagcaacggtcccccctctttggccggctctgtatcctcccggcagatcccctttacaccacgcacaacagctgcaacttttttcacaacagcactttctccgacagcaagagttcttgtatctgcaacagcaggcagcccaggcactggagctccaacgaagtgcccagctagtgcaggaacggttgaaagcgcaagagcaccgggcggaaatggaagagaaaggctccaagcgcggactggaagcggctgggaaggctggcctggcaaccgctgggccgggcctgctgcctcgcaagcctccgggactcgctgcgggaccagcgggaacttacggcaaggcggtctctcctcccccctctcctcgggcttcgccagttgctgccctgaaggccaaggtcatacaaaaactggaggacgtgtccaaaccaccagcatacgcctacccagcgactccttcctctcaccctacctccccaccgcccgcctctccacctccgacccccggcattacccgtaaggaggaagcccccgagaatgttgtagagaagaaggatctggagctggaaaaagaggccccctccccatttcaagcactcttcagcgatatacccccgcgttatccttttcaggcactgccccctcattatggccggccctaccctttcctcctgcagcctaccgccgccgctgatgctgacggcttagctcccgatgtgcccctgccagctgacgggcccgagcgtctagcactgtcacccgaagacaaacctattagacttagtccatctaaaataacagaacccctgcgcgaaggacctgaggaggagccgctggctgagagggaggtgaaggccgaggtcgaagacatggacgagggaccaaccgagctgcctcccctcgagtcgcctctgcccctacccgcggcagaagctatggccactccttctcctgccggcggctgtggcgggggcctcttggaggcacaggcccttagtgccaccggacaaagctgcgcagagccgagtgaatgccccgatttcgtggagggccctgaaccaagggttgacagtcctggccgcactgaaccttgtactgccgcgttagatctgggagtgcaactgacccctgaaaccctcgtcgaggctaaagaggagccagttgaagtccctgtggccgtgccggtggtagaagcagtccctgaggagggacttgcccaggtcgcccctagcgagagccagcccacccttgagatgtcagactgcgatgtgccagccggcgaaggacagtgtccttctctcgagccgcaggaggcagttccagttctggggtcgacctgcttccttgaagaggcctctagcgaccagtttctgccctccctggaagatcctcttgcgggtatgaatgccctcgcagcagctgcagagcttcctcaagcacgacctctgccctcacccggggcagcaggggctcaggcactggagaaactggaagccgcagaaagcctggtccttgaacagagctttctccacggcattactttgctgagtgagattgccgagctggaactggagcgccgatcccaagaaatgggcggcgcagagcgcgcgctggtggcacgccccagtctggaatcattactggcagccggatcccacatgctgcgagaagtactcgacggaccggtcgtcgatcctctgaaaaaccttcgtctgcccagagaactgaagccaaacaagaagtactcctggatgagaaagaaggaggaaagaatgtacgcgatgaaaagcagtctggaagatatggacgcacttgagttggatttccgtatgaggctagctgaggtgcaacgacagtacaaagagaagcagagagaactggtcaagctccaacgacgccgcgatagcgaagaccggcgggaggagccccacagatctctggcgcggaggggcccaggcaggccccggaaaagaacccatgcccccagtgcattgagccctcccagaaagcgaggcaaatccggacactcttctggaaagcttagcagtaagagtctgctcacatctgacgactacgagctgggcgcaggcattaggaaaaggcacaagggcagtgaggaggagcacgacgctctcattggtatgggaaaggctagaggcaggaatcagacttgggatgagcatgaggcctctagcgattttatcagccagctgaagatcaagaagaagaagatggcctcagaccaagagcagctggcttccaagctggataaagccctctctctgaccaaacaggataaactgaagtccccattcaagttctccgactctgccggcggaaagtctaaaacatctggtggatgtgggaggtatttgacaccctacgattcactcctgggcaagaaccggaaagccttggcgaagggactaggcctttcactcaaatcttcaagagagggcaaacataaacgagctgctaagactcgcaaaatggaagtgggcttcaaagctagagggcaacccaagtcagcccactctccatttgcctcggaagtgtcttcatattcatataatactgactccgaggaggacgaggaatttctcaaggatgagtggcctgctcaggggccatcaagttccaagcttaccccctcactgctctgttccatggtggctaagaatagtaaagccgccggtggccctaaattgaccaagcggggcctagcagccccaaggactctcaagcccaagccagccaccagcaggaaacagcccttctgtctgttactgcgggaagctgaggctcggagctccttctctgacagcagcgaggagtctttcgaccaggacgaatcctctgaagaggaggacgaagaagaagagttggaggaggaggacgaggcgtcggggggtggttataggctgggcgcccgggaacgcgctttatctcctggtctagaggagtccggcctgggattactagctaggttcgccgccagtgcgctgccgtctcccaccgtgggaccctctctgagtgttgtgcagctcgaagccaaacagaaagcccgcaaaaaggaagaaagacagagcctcctgggtaccgagtttgagtatacagactccgagagcgaggtcaaggtgagaaaaagatctccggcaggcctcctgcggcctaaaaagggcttgggagaacccggccctagcttggcagcacctaccccaggcgccagaggacccgatccctcatcaccagataaggccaaattggctgttgagaagggacgtaaagcgcgcaagctcagaggccctaaagagcccggcttcgaggctggaccagaagcctcagacgacgatttgtggacccgccgacgcagcgagagaatatttctccatgatgcttcagccgctgcacctgcccccgtctctaccgcccccgccaccaagacaagccggtgtgcaaaaggaggaccgctcagtcctcgaaaagacgcgggccgggctaaagatcgaaaagatccccgtaaaaagaaaaagggcaaagaagccggtcctggagccggtctgccccccccgagagcgcccgccctgcctagcgaggccagggctccgcacgcctctagtctaacagcggcaaaaaggtccaaggctaaagcgaagggaaaggaagtgaagaaagagaacagaggcaaaggtggcgcagtcagcaaacttatggaatccatggctgccgaggaggatttcgagcccaatcaagactccagtttcagcgaggatgagcatctgccccgcggaggcgctgtggagcgtccattaaccccagcccctagatcgtgcattatcgataaagacgagttaaaggacggcctgcgtgttctgatcccaatggacgataagcttctctacgccgggcacgtgcaaacagtgcattctccagacatctaccgcgtcgtggttgaaggtgaaaggggcaaccgccctcacatttattgcctggagcagctgctccaggaagcaattattgatgttcgtcctgcttccacgcgattcctgccacagggcacaagaattgcagcttactggagccagcagtacagatgcctgtacccaggaaccgtagtgaggggactacttgacttagaagacgatggggatctcattacagttgagtttgatgatggagacaccggcaggatcccactgagccacattcgattactgccacctgattataagattcaatgtgcagagccttctcccgctcttctcgtcccctcagctaagaggagaagccgcaagactagcaaggataccggggaggggaaagacgggggaacggcggggtccgaggaacccggcgcgaaggcaaggggtaggggaagaaagcctagcgccaaagcaaaaggcgacagagcggccactcttgaagagggaaatccgacagatgaggtacccagcacccccctagccctcgaacctagctcaactcctggatccaaaaagtcccctccggagcctgtggataagcgggccaaggcccccaaagcccgccccgctccacctcaaccttctcccgccccccccgcttttacgtcttgtcccgctccagagccctttgctgagttacctgcacctgctacgtccttagcccctgcaccgctgattacaatgccagccactcgacccaagcccaaaaaggctcgggcagctgaggagtcaggcgccaaaggtccacgcaggccaggtgaggaagctgaactgctggttaaactggatcatgagggcgtcacttcccctaagtcaaagaaggctaaagaggcactgctcctccgcgaggatccaggtgccggcggatggcaggagcccaaatcactgctgtcactggggtcttaccctcccgctgccggttcctctgagcccaaggccccttggccaaaggcaaccgatggggatcttgcacaggaacccgggccaggcctgaccttcgaagacagtggcaatcctaaaagcccagataaagcccaggccgagcaggatggtgccgaggagtccgaatcatcatcctcaagtagttctggctcctcgtcgagctcgtcgagctcatctagctccgggtctgaaacggagggagaagaagagggcgacaagaacggtgacggtgggtgtggaacagggggacggaactgcagcgccgcttcttccagagccgcctctcctgcctcaagcagttccagttctagcagcagctccagttcatcttccagttcctcgtcaagctccagctcaagttcatccagctccagcagcagctcaagcagcagctccagctcgtccagcagcagcagtagcagtagctcttcctcttcctcaagttcgagcagcagctcctcttctacaactgatgaggacagcagttgtagcagcgacgacgaagcagcacccgcaccgaccgcagggccctccgctcaagccgctctacccacaaaggccaccaagcaggcggggaaagcccgcccttccgcacattctccagggaagaagacccctgctccccagcctcaggcaccaccgcctcaacctacccagccgctgcagccaaaggcgcaggccggcgcgaagagtcggccaaagaagagagagggcgtccatctgcctactacgaaggagcttgccaaacgccagaggttgccttccgtcgagaaccggcctaaaatcgccgccttccttcccgctagacagctgtggaaatggttcggcaaacctacccagcgacgaggcatgaagggcaaagcaagaaagctgttttacaaagcaatcgtgagaggtaaggagatgatccgaattggagattgcgccgtgttcttgtcagcggggagacctaaccttccttacatcgggagaatacagagtatgtgggagtcttggggaaataatatggtggtgagagtgaaatggttttatcatcctgaggaaacctcacccggaaagcaatttcatcagggccagcactgggatcagaagtcaagcaggagcctgcctgcagcactgagggttagtagccagcggaaagattttatggagagagcgctgtatcagagcagtcacgtcgatgaaaatgatgtacagaccgtaagccataagtgcttggttgtgggccttgagcagtacgaacagatgctgaagactaagaagtatcaggacagtgaaggcctctattatctcgccggaacatacgaaccaacgacaggaatgatcttttcaaccgatggtgtgcccgtactgtgttag

SEQ ID NO: 36730 - DNA, 8906 bp, Artificial Sequence
  derived and/or modified sequence
atggatgggagggacttcggccctcagcgcagtgttcacggccctccccctcccttgctaagcggcctcgccatggactcccatcgcgttggcgctgccaccgcaggaagattgcctgcatccggtcttcccggtccactccctccagggaaatacatggccggattgaaccttcacccccaccctggggaggcattcctcggaagctttgtggctagtggaatgggcccaagcgcgtccagccacggatcacccgtgccgctgccttctgacttgtcattcagatctccaacccctagtaacctccctatggttcagctgtgggcggcacacgcccacgaaggcttcagtcacctccccagtggcctgtacccttcatatctccatctgaaccatctcgaaccccctagctctggatcacctttgctgagccagctcggccagcctagcatctttgatacccaaaaggggcagggccctggaggagatgggttttatctgcccacggctggtgcccctggatctcttcactcccatgccccaagtgcccgtacgcctgggggtgggcactctagcggagcaccagcgaaagggagcagtagcagagatgggcctgccaaggagcgggctggccgaggcggagagcccccacccctgtttggtaaaaaggatcccagagccaggggtgaggaggcctcaggcccacgcggtgttgtggatcttactcaggaggctcgagccgaaggcaggcaggatcgaggccctccgcgtctggctgagcgcctctctccgttcctggccgagtctaaaaccaagaatgcggcactgcagccttctgtacttaccatgtgtaacggtggcgcaggtgacgtgggcctccctgccctcgttgccgaagccggacgcggtggcgcaaaggaggccgctcgacaggacgagggagcccgactgctaagaagaacggaaaccttgttgcccggaccccgaccttgtccctcacctcttccgcctcccccagctcctcctaaaggtccccctgcccctcctgccgcaaccccagctggcgtgtacactgtgttcagagagcagggaagggaacatagagtggtggctccaacgttcgtgcccagcgtggaagcttttgatgagaggcctggccctattcagatagcaagccaggccagggacgctcgtgcccgagagagagaggcgggacgcccaggtgtgttgcaggcgccaccaggcagccccaggccattggaccggccagagggtcttagggaaaaaaactcagtgatcaggagtttgaaacgtcccccaccagccgatgcccctacagtgagagcaaccagggcctctccagacccaagggcctacgttcctgcaaaggagctgctaaaacccgaggccgacccaagaccttgtgagcgggctccacgcggaccagccggtccggcagcacagcaggcagcgaagttatttgggctcgaacccggaaggcccccacctactgggccagagcataagtggaaaccattcgaactcggcaacttcgccgctacacagatggccgtcctggcagcgcagcatcaccattcgagagctgaggaggaagcagcagtggtggccgcttcaagcagcaaaaaggcctacctcgatcctggagccgtgctgcctcggagtgccgctacctgtggtcgcccagttgcggatatgcatagtgcagcccacggctcaggcgaggcctctgccatgcagtcccttattaaatacagtggttctttcgccagagacgccgtggccgtcagacctgggggttgcggaaaaaaaagtcccttcggtggcttgggaacaatgaaacccgagccagccccaaccagcgccggagcttctagggcacaagcacgcctcccccatagcggaggaccggctgcaggtggcggtaggcagctgaagagagatccagagcgccctgaaagcgccaaagcgttcggaagagagggttccggagcccagggcgaggctgaggtgcgacacccacccgtgggcatagccgtggcagtggctcgccaaaaagacagcgggggaagtggcagactgggacccggtctggtcgatcaggagcgatcattgagtctgtctaatgttaagggccacgggagagccgatgaagattgtgtcgatgatagggccaggcatcgcgaggagcgacttcttggggcaaggctcgatagagaccaggagaagctcctccgagagtcaaaagagctcgctgacttagctcgtctccatccaacaagctgtgcccctaacgggcttaatccaaaccttatggtcacaggcggaccagcactcgccggtagcgggagatggtccgcagaccctgccgctcacctggccacgcacccgtggctcccccgaagcggtaacgcttccatgtggctcgccggacatccttatggcctgggtcctcctagtctacatcagggaatggccccagcgttccccccaggcctgggagggtctctccctagtgcctaccagttcgtgagagatcctcaaagcggacagctggtggtgatcccaagtgatcacttgcctcactttgctgagctcatggaacgcgcaacagtccctcctctgtggccagccctgtatccccctgggaggtcacccctgcaccacgcccaacagctgcagctgttttcacagcagcatttcctgagacaacaggaatttctttacctgcaacagcaggccgcacaagctttagagctacagcgatctgctcagctggttcaggaaaggctcaaagcccaggagcatcgcgctgaaatggaagagaagggctcaaaacggggactcgaggccgcaggcaaagcgggtttagccaccgccggaccgggtctgctgcctcgaaagcccccaggcctagcggcagggcctgctggcacatatggcaaagcagtgtcaccacccccttctccccgtgcgtcaccggtcgcggctctaaaggctaaggtgatacaaaagctggaggatgtctcgaaacctcccgcatacgcctatcctgcaaccccatcctctcacccaactagccctccgccagcctcacctcccccaacccctggtatcactaggaaagaggaagccccagagaacgtggtggagaaaaaggacttggaattagagaaggaggctccgtccccatttcaagctctcttcagcgatatccctccgagatacccctttcaggccctgccccctcactatggtcgaccttacccattcttgctgcaaccaaccgctgcggctgatgctgatggactcgcacccgacgtgcccttgcctgccgacgggcctgagcgcttggccctgtcaccagaagacaaacccattcgcctgagccccagcaagattacagagcctttgcgcgaaggtcctgaggaggaacccctcgctgaaagggaggtcaaggccgaggtggaagatatggacgagggccctacggaacttcctccgctcgaaagccccttgccactgcctgctgctgaggctatggccacccctagcccagctgggggttgtggtgggggactgctggaggcgcaggcgttatccgccaccgggcagtcttgcgccgagccttcagaatgccccgatttcgtggaagggcctgagccccgagtcgactcacctggcagaacagagccctgcacagccgctctggacctaggtgtccagctgacaccagaaactctcgtcgaggccaaagaagagccagtcgaggtgcccgttgccgtcccggtggtcgaagcggttccagaggaaggtctggcacaagtagctccatctgagtcacagccaactctcgagatgagtgactgcgacgtcccagccggagaggggcaatgccccagtctcgagccccaggaggccgtccctgttcttgggtctacctgcttcttggaagaagctagttcagaccagttcttgccaagtttggaggacccgctggccggaatgaacgcgctcgccgctgcggcagaactgccacaggcgagacccctgccctcacccggagcagcgggagcccaggccctggagaagctcgaggcagctgagtccctggtgcttgaacagtcattcctgcacgggatcaccctgctctcagagattgcggaactggaactcgaaaggagatcacaggaaatgggcggagcggagagggcattagtcgctcgcccatcactagagagtctgttggctgcagggtcccatatgctgagagaggtgcttgacgggccagtggtcgacccactcaagaacctgcgccttcctagagagctgaagcctaataaaaagtacagctggatgcgtaagaaggaggagaggatgtacgctatgaagagcagtctcgaggacatggatgcgctggaactcgactttcgcatgcgtcttgcggaggtgcagcggcagtataaggagaagcagagagaactggtgaagctccagagaagacgggacagtgaagataggagagaagaaccccaccggtcactggcgaggagggggcctggcagaccacgaaagaggactcatgccccaagtgctcttagtccccctcggaaaagaggcaagagtggacacagctcaggcaagctgagctcaaagtctttgctcaccagtgatgactacgaactcggcgctggcattcgtaaaaggcataagggttctgaagaagagcacgatgccctcataggaatggggaaagctagaggaagaaatcaaacatgggatgaacatgaagccagctcggacttcataagtcaacttaaaatcaaaaagaagaaaatggcctctgaccaggaacaactggccagcaaactcgataaagccctctcactgaccaagcaggacaaactcaagtctccttttaagttttccgattcagccggaggcaaatctaaaacatcaggcggatgcgggcgttacttaactccttatgatagcctgctgggtaaaaacagaaaagctctggccaagggcctgggcctttcactgaaatcctctagggagggaaaacataaacgagccgctaagacacgtaagatggaagtgggcttcaaggcgagaggccagccaaagtccgcccattcacctttcgcctccgaggtgtcctcatatagttacaatacggactctgaggaggacgaagagtttttgaaagatgagtggcccgctcagggtccatcttctagtaagctcactccaagcctgctctgttccatggtggcaaaaaattccaaagctgctggtggtcccaaactaaccaagcggggactggccgctcccaggactctgaagcctaagccagctacctctcgcaaacagcccttttgtctgctcctgcgggaggcagaagccaggagttcgttcagcgactctagcgaggagagctttgatcaggatgaaagttcggaagaagaggatgaggaggaggagcttgaagaggaagatgaggcatccggtgggggttaccggttaggggcaagagaaagggcattgagtccgggactggaggagagcgggctggggctgctcgctcgcttcgccgctagcgccctgccttctcctacagtggggcctagtctcagcgtcgtgcagctggaagcaaagcagaaagctcggaagaaagaggagcgccagagcctgctcgggactgagttcgagtatactgacagcgagtcagaggtcaaggtgcgcaagcgttcacccgctggtttgctgcgccctaagaaggggctcggcgaacctggtcctagcctagctgcaccaacaccaggggcaaggggtcctgatccctcgagccctgacaaggctaagcttgccgtggaaaagggacgcaaagccaggaaactgcgcggtcccaaagagcctggcttcgaagccggacctgaggcatctgacgacgatttatggactcgaaggcggtccgagcggattttcctgcatgatgcaagtgccgcagctcccgctccagtgtccactgcgcctgccactaagactagcagatgcgccaaaggtgggcctctgtctcctcggaaggacgctggacgagccaaggatcgcaaggatcccagaaagaagaaaaaagggaaggaggcgggacccggtgccggactgcccccaccccgagcccctgctctgccctcggaagctcgtgcaccacacgcgagttcattgactgccgctaaaaggtctaaggcgaaagccaagggcaaagaggtcaagaaagaaaaccgcggtaaaggtggagccgttagtaagctgatggagtccatggccgctgaagaggactttgagccaaaccaggactctagttttagtgaggacgagcatctaccacgcggaggtgccgttgaaagacctcttactccagcacctcggtcgtgcatcatcgataaagatgaactaaaagacggactgagagtcctgatcccgatggacgacaagttactttacgccggtcacgttcaaacagtccattctccagacatttacagagttgtggtcgagggggagcgtggcaatcgccctcacatctattgcttggagcagctgctgcaggaagccatcattgatgtgcgtcctgctagcaccaggtttttaccccagggaacccgaattgctgcctactggtcccagcagtatcgttgcctgtatccaggaacagtggtgcgcggtttgcttgatttggaggacgatggggacttgattaccgtcgagtttgatgacggtgacactggtcggattcctctatctcacatccgccttttgcctcctgattataagattcaatgtgctgaaccgtcacccgctctccttgtgccctcagccaaacgaagaagccggaaaacatccaaagacactggcgaaggaaaagatgggggaactgccggtagcgaggagcccggagcgaaagctaggggaaggggaaggaagccatctgccaaggcaaaggggggacgcgctgccacactggaagaagggaaccccactgatgaagttccttcaacgcccttggcactcgaaccctcaagcacccctggctccaaaaagagtccccctgaacctgttgacaagcgtgctaaagcccctaaagccaggccggctcctccgcagcctagcccagcacctcccgcttttacaagctgtcccgcacccgaaccatttgccgagttgcctgcccctgctacttctttagcccctgctcccctgatcaccatgcccgcaactaggcccaaaccaaaaaaagcacgggcagcagaggagtctggagctaaggggcctagaagacctggggaagaagctgaattgttggtgaagttggaccacgagggcgtgacttcacccaaaagcaagaaagccaaggaagccttacttctgagagaagacccaggcgctggcggttggcaggaaccaaagtcactgctctctctggggtcctaccccccagcagccggtagctccgagccgaaggcaccctggcctaaggccaccgatggcgacttggcacaggaaccaggtcctgggctcacatttgaagatagcggcaaccccaaaagccccgataaggcccaggcggaacaggatggcgcagaagaaagtgagtcctcttcctcctcgtccagcggcagttcgagctcaagttcaagttcatcaagtagtggatccgagactgagggggaggaggagggggataaaaacggcgatggaggctgtggcactgggggacgaaactgttcagccgctagcagtcgggctgccagtcccgcatcatcttctagctccagcagtagttcatcatcctctagctccagtagcagtagctcttcctcttcctctagttcaagttcttcttcaagctccagctccagctcctccagcagctccagctcgtcatcgagttcttcaagctccagcagctctagcagttcatcaagctcctctacaacggacgaagactctagctgctcttctgatgatgaggccgcacctgcccctaccgcaggcccttctgcccaagccgcactgcccacgaaggcaacaaaacaggcagggaaagctcgtccgtccgcccactctccgggtaaaaagactccagcgccacagccgcaggctccccctccccaacctactcaacccctccagcctaaagcccaggctggggctaaaagccgcccaaaaaaacgcgagggagttcacttgccgaccactaaagaattagcaaagaggcagagactccctagcgtggagaaccgcccaaagattgctgccttcctccccgcacggcagctgtggaaatggttcgggaagcccacccagcgcaggggaatgaaaggcaaggctaggaagttattttacaaagcgatcgtccggggtaaagaaatgatacggattggtgactgcgcagtttttctctccgcaggaagaccaaatctaccgtacattgggagaatccagtcaatgtgggagagctggggcaataacatggtggtccgcgttaagtggttttatcacccagaggagacctcccctggaaagcagtttcaccaggggcagcactgggatcagaaatcatcccggtccttgcctgctgcgttgcgcgtcagcagccagagaaaggacttcatggaacgggcactttatcagtctagtcacgtggatgagaatgatgtgcagacagtgagccataagtgtttagtcgtgggactcgagcaatacgaacagatgttaaagacaaagaaatatcaggatagcgaaggtctgtactatttggccggaacctatgaaccaacaaccggaatgatcttcagcactgatggtgtccccgtactgtgtta

SEQ ID NO: 36731 - DNA, 8906 bp, Artificial Sequence
  derived and/or modified sequence
atggacgggagggatttcgggccacaaaggtctgtgcatggccctcctccgcctttgctgagcggacttgccatggacagtcatcgcgtcggtgcagctactgcaggcaggttgcctgcctctggcctcccaggtccgctaccgccaggcaagtacatggccggactgaatctgcacccacatcccggagaggccttccttggatcctttgtggcatctggcatggggcctagcgctagttcccatgggagccccgttcccttgccatctgacctgtctttccgatcccccaccccgagcaacctcccgatggtgcagctgtgggcagcccacgcacacgagggattcagccacttgccatctggcctgtatccatcttacctccatcttaaccatcttgaaccaccctcttccgggagccctctactaagccagctagggcaaccaagcatatttgacacgcagaagggacaggggcctggaggggatggcttctatttgcctactgccggagctccaggttccctgcactcacacgctccatccgccaggacgccgggagggggacattcctctggggctcccgctaagggctcgtcttcacgggatggacctgccaaagaaagggcaggccgtgggggtgagcccccaccgctatttggcaagaaggacccacgcgctagaggcgaagaggcctctggtcctcggggagtcgtcgatttgacacaggaagcgagggctgagggtaggcaagatagaggcccacctcgactggcagagcgcctgtccccatttctggctgagtcgaagaccaaaaatgctgctctacagccctccgttcttacaatgtgtaacgggggtgcaggggatgtcggtctgccagccctagtcgccgaagcaggcagggggggtgccaaagaggccgcacgtcaggatgagggtgcccgtctgttgcggagaaccgagacacttctccccggacctcgtccttgtccctctccgctgcctccacctcccgctcctcctaaaggacccccagcacccccagccgcaactcctgccggagtgtataccgtttttagagagcagggcagagagcatagagttgtggcccctacgtttgtccctagcgtggaggcctttgacgaaagacctggacccatccaaatcgcctcacaggccagagatgctagagcgcgtgaacgggaggccggacgtcctggggtgctccaagcccctcccggatcacctaggccccttgatcgtccggagggactgcgcgagaagaactctgtaattcgttcattgaaaagacccccacctgcagacgccccaaccgttcgcgcaacacgtgcctcccctgacccgagggcttacgtccccgctaaagaactgctgaagcctgaagccgatcctcggccttgtgaacgagcccctcgcggtcctgcaggtccagcagctcagcaggccgctaagttatttgggctggaacccggaagaccgcctccaaccggcccagagcacaagtggaaaccatttgaattgggcaacttcgcagccacacaaatggctgtcctggctgcacagcaccaccactcccgcgctgaagaagaggcagctgttgtggcagcctcctcctccaagaaggcatacttggatcccggagccgtgttgcccaggtcggcagcgacctgtggcaggcccgtggctgacatgcattccgccgcacacggctccggcgaggccagtgctatgcagtctctcatcaagtactccggctccttcgctagagatgcggttgccgtgaggccagggggttgcggtaagaagagcccatttggcggacttggtaccatgaaaccagaaccagcccctacttccgctggcgcttctcgggctcaggcgagattgccgcactctgggggacccgctgcgggaggagggagacagctcaaacgggatccagagagacccgagtcagccaaagcgtttggacgggaggggtccggcgctcaaggggaagcggaagttaggcatccgccagtcggcattgcggtggctgtggcgaggcagaaagattctgggggaagtggcaggttgggccctggccttgtggatcaggagcggtcactgtctctgtctaacgtaaagggccacggacgcgcagacgaggactgtgtggacgatagggctcggcacagggaggagagactgttgggagccagattagatcgagatcaggaaaagctgctccgcgaatctaaggagctagctgacctggcccgattacaccccacttcctgtgccccaaacggcctcaatccaaatctcatggttacaggtggccctgctctggccggtagtggcaggtggagtgctgatccggctgcccatctggctacccacccgtggttgccgaggagtggtaacgcaagtatgtggctggccggtcacccttatgggctgggacctcctagcctgcaccagggcatggctcctgctttccctcctggcctcggcggaagtctgcccagcgcctaccaattcgtgagggaccctcagtctggccagctggttgtgataccctctgaccacctccctcactttgccgaactcatggagagggcaacagtcccaccgctctggcctgccttgtaccctcccggacgtagtcccctccatcacgcgcagcagctgcagctgtttagccagcaacacttcctgaggcagcaagaatttctgtacctgcaacagcaagctgcccaggcgctcgagttgcagcgttcggcacagctcgtgcaggagcgattgaaggcccaggagcaccgtgcagagatggaagaaaagggttccaagagagggctggaggcagccggtaaagccggactggctaccgccggaccgggactcctgcccagaaagcctccaggcctcgccgctggaccggctggaacatacggcaaagcagtttctccccctccctcccctagggctagtcccgtggctgctttaaaggccaaggttattcagaaattggaggacgtttcgaagcctccagcttatgcctaccccgctacacctagttctcatcctactagtcctccacccgcaagccctcctcctacccctggcattacccgtaaggaggaagctcccgagaacgtggtggaaaagaaggatcttgaactggagaaggaggcaccaagccccttccaggcactcttttccgacatcccccctcggtacccctttcaggccctgccccctcattacggccgtccatatccgtttctccttcagcccaccgcagcggctgacgccgacgggctggctcctgatgtgccactccctgctgatggccctgagagactggccctgtctcccgaggacaaacctatcagactgtcaccgtcgaaaataactgagcctcttcgtgagggtccggaggaagaacctctggccgagagggaagtgaaagcagaagtggaggacatggacgaggggccaacagagctcccccctttggagtctccccttcccctgcctgccgcagaagcaatggccacaccttcacccgcaggtggctgtggagggggattattagaggcgcaggcactctccgccacaggacagagctgtgctgagccctcggagtgcccagattttgtagaagggcctgaacctcgagttgactctccagggagaactgaaccttgcacagcagctctcgatttgggcgtacaacttactccggaaacacttgtggaggccaaagaagaacctgtggaagtgccggtcgctgtccctgtggtggaggcggtgcctgaagagggactggctcaggtggccccttcagagagtcagccaaccctggagatgtccgactgtgacgttccagcgggagaaggacagtgtccttctcttgagcctcaggaagcggttcccgtccttggcagcacctgctttctggaagaggctagctcagaccagttccttccaagtctcgaggacccccttgccggtatgaacgcactggcggcagccgctgagctgccacaggctaggccacttccatctccaggggctgcgggtgcccaagccttggaaaaactagaggccgctgaatctctggtacttgaacaaagtttccttcacggcattaccctgctctcagaaatcgccgaactggaactagaaaggcgctctcaagagatggggggagcagaacgggcactagtcgcccgacctagcctggaatctctgctcgccgctggtagccacatgctgcgcgaagtcctggatgggcctgtggtggaccctctgaagaacctgagactgcctagagaactcaagcctaacaagaagtacagctggatgcggaagaaagaagaaagaatgtacgccatgaagtcctccctcgaggatatggacgctctcgagctcgatttcaggatgcgcctggccgaggtccagaggcagtacaaggaaaagcagagggagctggtgaagctgcagaggcggagggattcagaagacaggcgggaggagccccatcgcagcctcgctagacgtggaccgggtcggcctcggaaaaggacccatgccccttcagccctctctcctcccagaaaaagaggcaagagtggtcacagctcaggaaaactgtccagcaagagtctgctgacaagtgatgattacgagttgggggctgggattcggaagagacacaaaggcagcgaagaagaacatgatgccctaatcggcatggggaaagccagggggagaaatcaaacctgggacgaacacgaagcctcttctgactttatttctcagctcaagatcaaaaaaaagaaaatggcctcagatcaggaacagcttgcatcgaaacttgataaagcattaagcctcaccaaacaggacaaattaaaaagtcccttcaaattttctgatagcgccggtggcaaaagtaaaacttccggtggatgcggccgataccttactccctacgactccctgttgggcaagaaccgtaaggctctggcaaaaggactcggactttcactgaaaagtagtcgcgaagggaagcacaaaagagctgccaaaacacgcaaaatggaagtcggcttcaaggctaggggtcagcccaagagcgcccactccccctttgcctcagaagtttccagttatagctacaacacagactcggaagaggatgaagagttcctgaaggatgaatggcccgctcagggaccaagcagctccaaactgaccccttctttgctttgcagcatggttgctaagaactcaaaagcagccggaggaccaaagcttacaaagagaggactggcagcaccaaggacactaaagccgaaaccagccacgtctcggaagcagcccttctgtctgctgctccgggaggcagaagcacgctcaagcttttccgatagtagtgaggaatcatttgatcaggacgagagcagtgaggaagaggacgaagaggaggaactggaggaggaagatgaggccagcggtgggggttatcgactgggcgcaagggagagagctctctcacctggacttgaggagagcggcctaggcctgctggctcgattcgcggcttcagcccttccgagccccaccgttgggccttccctttctgtcgtgcagcttgaggctaaacaaaaagcacgcaagaaagaagagcgccaatccttactgggtactgagtttgagtatacagacagcgagtctgaggtcaaggtgcgaaagcgctctcctgcgggtctgctgagacctaaaaaaggcctcggagagccagggccatccctggcagctccaacacccggagccagggggccagatccttctagccccgataaggccaagctggccgtcgagaagggccgtaaggctaggaagctgcgcggtccaaaggagcccggtttcgaggcaggccctgaggcttcagatgatgatctctggactagaaggagaagcgaacgcattttcctacatgacgcatccgcggctgccccagcgcctgtctcaacagcaccagccacaaagacttcgagatgtgccaagggcggacctctgagcccccgtaaggatgccggtcgcgctaaggacagaaaggaccctcgcaaaaagaagaagggcaaggaggccggtcccggagccggactcccgccaccgagggctcccgctctgccctctgaagcccgtgcgccacatgcctctagcttgaccgctgccaaaaggagcaaagccaaagcaaaaggcaaggaagtcaaaaaggaaaacagaggaaaaggaggagccgtgagtaagctcatggaaagtatggcagctgaggaggacttcgaaccgaaccaggattcctctttctcagaagacgagcatctgccccgagggggagccgtcgaacgacctttaacacccgctcctcgctcctgtataatagataaagacgaactaaaggacggacttagggtgttgatcccaatggatgataaactactgtacgccggacacgtacagacagtacatagtccagacatttatagagtggtggtcgaaggggaaaggggcaaccgaccacatatctattgccttgaacagctgctgcaggaagccatcatcgacgttcgaccagcgagcacgcgctttctgccacagggaacccggatcgctgcatattggagccaacagtatcgatgtctgtatcctggcacagtagtgcggggactgctggacctggaagatgatggtgatttgatcactgtcgagttcgatgacggtgatactggccgtatccctctgagccacatacgactgctgccacccgactacaaaattcagtgtgctgagccctcacctgctttacttgtcccatccgctaaacggcgatctagaaagacgtcaaaggatacaggagaaggtaaggacgggggtacagccggttcagaggaaccaggagcaaaggcgaggggcaggggcagaaagccatcagcaaaagcaaagggagatagggcagctaccctggaagagggcaaccccaccgacgaagtcccaagtactccgttagctctggagccttcgtctacccccggttcgaagaagtctccaccagaacctgtggacaaaagggccaaggccccaaaggcccgacctgcaccaccccaaccatcacccgctcctcctgcattcacctcctgccctgcaccagagcccttcgcagagctacctgcccctgccacaagcctcgcgccagccccactaattacaatgccggcaacgaggccaaaaccaaaaaaagcacgggcagccgaagaatcaggcgctaaagggccaagacgcccaggcgaggaagcggaactactggtgaaacttgatcacgagggagtgacgagcccaaagagtaagaaagccaaggaggcactgctgttgagggaagatccaggggcaggcggatggcaggagcctaagtctctgctgagcctgggatcctatcctcccgctgctggaagctccgaaccaaaagctccatggccaaaagccaccgatggcgacctggctcaagaacctggtccaggcctgacgtttgaagactccgggaatcccaagagcccagacaaggcacaggccgagcaggatggagccgaggaaagcgagtcctcctcgagctccagctccggcagcagctcctcctcttcttcaagctccagctccggatccgaaacagaaggcgaggaggagggagataagaacggcgatggcggatgcggcaccggaggccgaaactgctctgcagcaagctcgagggcggcatctccggcatcaagcagtagctctagctcttcaagctctagctcttcatcgtcgtcctcatcttcatcttcatcctcttccagctcttcctcctcctcctccagctcgagcagcagttcaagctcatcttcctcgtcttcttcgtcgagcagttcatcctcgagcagttcatcctccagtagtaccacagatgaagattcctcgtgctcatccgacgatgaagcggcacctgcccctacagctggtccctctgcacaagctgctctgcctaccaaagctaccaagcaagcgggtaaggctagaccctccgcccactccccaggaaagaagacccccgctcctcagccacaggccccacccccacaaccaacccagcctttacagccaaaggctcaggctggcgctaaatcgaggcccaagaaaagggagggcgtgcatttgccaacaaccaaggagcttgctaagcgtcagcggctccccagtgttgagaaccggcctaaaatcgccgcttttttgcccgctcggcaattatggaagtggtttggcaagccaactcagcggagaggaatgaaagggaaggcccgaaaactgttctataaagcaatcgtccggggtaaggagatgattagaatcggagattgtgccgtctttttaagcgccggacgccctaacctgccttatatcgggcgtatacaaagtatgtgggaaagttggggaaacaacatggtggtaagagttaagtggttctatcaccccgaggagacatctccgggaaaacagttccaccagggtcagcactgggaccaaaagtcctctcggagtcttccagcggcactccgagtaagttcgcaacgaaaggatttcatggagcgagcactataccagtcaagccacgtcgacgagaacgatgtgcaaacagtatcccacaaatgccttgtggttggcctcgaacagtatgagcagatgttaaaaaccaaaaagtaccaggattccgaaggcctgtactaccttgcaggaacttatgaaccaacgaccggaatgatcttcagtaccgacggtgtgcctgtgctctgtta

SEQ ID NO: 36732 - DNA, 10572 bp, Artificial Sequence
  derived and/or modified sequence
ggccgcgggatggcgggcagcaggggcgcctagctgcgccgggagccggggccgccgccggagtcgttgtcgccggagcctggagccgtgaacccagccgcgccagacgccgtgtgcgccgcctcgcgcagctccgcctggccgcccggaggggccccaccgccggccgcctgtgcgccccgggccgcgggcccgccgccgagcgcaagccccgctggccgccgccatgcacgccgcggagcccccgccgcccgaggactctgggactacgccgaggccgaacttttaggtcccactgagctaggcctgcgggccgggtggggggctgatcgcggcactcccgcggaggatggatggccgagacttcgggccccagcggtccgtgcacggtcccccgccgccgctgctgtccggcctggccatggacagccaccgcgtgggcgcggccactgccggacgcttgcccgcctcgggcttgcccggcccgctgccgcccgggaagtacatggccggcctgaatctccatccgcacccgggcgaggccttcttgggcagctttgtggccagcgggatggggccctcggcctcgtcccatgggagcccagtgccactgccctctgacctgtctttccgctccccaacccctagcaacctgcccatggtgcagctgtgggccgcccacgcccatgaaggcttctcccacctgcccagtgggctgtacccatcctacctccacctgaaccacctggagccccccagcagtgggagccccctcctcagccagctgggtcagcccagcattttcgatacccagaaaggtcaggggccaggaggagacggtttctacctgcccaccgcgggggctccgggctccctgcactctcacgcgccctcggcccggacccctggcggcggccactcctcgggcgccccggccaaaggctcgtcgtcgcgggacggtccagccaaggagcgggcgggccgcggcggggagccgcctccgcttttcggcaagaaggacccgcgcgcccggggcgaggaggcctcggggccacggggcgtggtggacctgacccaggaggcgcgcgccgagggccgccaggaccgggggcccccgcgcctggctgagcgcctgtcgcccttcctggctgagtccaagaccaagaatgcggcgctgcagccgtcggtactgaccatgtgcaacggcggcgccggggacgtggggctgcccgcgctggtggccgaagcggggcgcgggggtgccaaggaggctgcccggcaggacgagggcgcgcggctgctgcggcgcacggagaccctgctccctgggccgcgcccctgcccctcaccgctgcccccgccgcccgcgccccccaaggggcctcctgcaccccccgcggccacccccgccggcgtctacaccgtcttccgcgagcagggccgtgagcaccgcgtggtggcgcccaccttcgtgccttccgtggaggccttcgacgagcgcccggggcccatccagatcgcatcccaggcgcgcgatgcccgggcccgcgagcgcgaggctggcaggccaggggtcctgcaggcgccccccggctccccgcggcctctggaccggcccgagggcctgcgcgagaagaactcggtcatccgctcgctcaagcggccgccccccgcggatgcccccacggtgcgggccacacgcgcctccccggacccccgcgcctacgtgcctgccaaggagctgctcaagcccgaggcggacccgaggccctgcgagcgtgcgccccgcggcccagccggtcctgcagcccaacaggccgccaagctcttcggcctggagcccgggcgccccccgcccaccggccctgagcataaatggaaacccttcgagctgggcaacttcgccgccacgcagatggccgtgctggccgcgcagcaccaccacagccgcgccgaagaggaggccgccgtggtcgctgcctcctcctccaagaaggcctacctggaccctggggctgtgctgccccgctcggcggccacctgcggccggccggtcgctgacatgcactctgcggcccacgggtctggagaggcctcggccatgcagagccttataaagtacagtggcagctttgcccgggacgccgtggccgtgcgccctggtggctgtggcaagaagagcccctttggaggtttgggcaccatgaaacccgagcctgcgcccacctctgcgggtgcctcccgagcccaggcccgtctcccacactccggaggccctgcagcgggcggcggccggcagctgaagcgggaccccgagaggcccgagagcgccaaagctttcgggcgcgagggctctggtgcccagggtgaggcagaagtgcgacacccgcctgtgggcattgcagtggctgtggcccggcagaaggacagtggcggcagtggccggctggggcctgggctggtagaccaggagcgctctctgtcgctgagtaacgtcaaagggcacggccgagcagatgaggactgtgtggacgaccgggccagacaccgggaggaacggctgctcggggcacggctggaccgggatcaggagaagctgctcagagagagtaaggagctggctgacctggcccgcctgcaccctaccagctgtgctcctaacggcctgaaccccaacctcatggtgacggggggcccggcgctggcgggctcaggtcgctggtctgccgaccccgcagcccatctggccacgcacccctggttgccccgctcgggcaacgcatccatgtggctcgctggacacccctacggcttgggtcccccatctctgcaccagggcatggcccctgcgttcccacctggcctggggggctccctcccgtcagcctaccagtttgtcagggacccccaatcgggccagctggtggtcattcccagtgatcaccttcctcactttgcggagctgatggagcgggccaccgtaccgcccctctggcccgccctgtacccgccgggccgcagccccctgcaccacgcccagcagctgcagctcttctcacagcagcacttcctgcggcagcaggagttcctgtacctgcagcagcaggcggcccaggccttggaactgcagaggagcgcccagctcgtgcaggagcggttgaaggcgcaggagcaccgggcggagatggaagagaaggggagcaagcggggcctggaggctgcgggcaaggctggcctggccaccgccggccccgggctgctgccgcggaagccccctggcctggccgccggccccgcgggcacctacggcaaggccgtgagcccgccaccatcaccccgcgcatcccctgtggctgccctgaaggccaaggtcatccagaagctggaggacgtgtccaagccacccgcctacgcctaccccgccacccccagctcccaccccaccagcccgccgcccgcctccccaccgcccaccccgggtatcacccgcaaggaggaggctcccgagaatgtggtcgagaagaaagacttggagttggagaaggaagcccccagccccttccaggccctgttctcagatatcccgcccaggtacccgttccaagccctgccaccgcactacgggaggccctaccctttcctgctgcagcccacggccgccgccgacgcggacggcttggcccctgatgtgccgctcccggctgatgggcccgagcgcctggcactctcacccgaagacaagcccatccgcttgtccccctccaagatcacagagccgctgcgggagggcccggaggaagaaccgctggctgagcgggaggtgaaggcagaggtggaggacatggacgagggccccacagagctgccgcctctggagtcgccgctgccactgcccgccgcggaagccatggctacccccagccctgcagggggttgtggaggtggcctgttggaggcccaggcgctgagtgccaccgggcagagctgcgcagagccctctgagtgtccagactttgtggaggggcctgaaccacgggtggattccccgggccggacagaaccctgcaccgccgccctggacctgggggtgcagctgacacccgagacactggtggaggccaaggaggagccggtggaggtgcctgtggcggtgcccgtggtggaggcagtgcccgaggaaggcctggcgcaggtggcaccgagcgagtcccagcccaccctagaaatgtcagactgtgacgtgcccgccggggagggacagtgcccgagcctggagccccaagaggccgtgcctgtactcggcagcacctgcttcctggaagaggcaagctctgaccagttcctgcccagtctggaggacccactggctggcatgaacgccctggcggcagctgcggagctgccccaggccaggcctctgccctccccgggtgctgctggagcccaggccttggagaagctggaagcagccgagagccttgtcttggagcagagcttcctgcatggcatcaccctgctaagtgagatcgcagagctggagctggagaggaggagccaagagatgggaggtgcggagcgggccctggtggcgcggccctccctggagagtctgctggcagctggcagccacatgctgagggaggtgctggatgggcccgtggtggacccactcaagaacctgcggctcccgcgggagctgaagcccaacaagaagtacagctggatgcgcaagaaggaggagcggatgtatgccatgaagtcctccctggaggacatggacgccctggagctggacttccggatgcggctggccgaggtgcagcgccagtacaaggagaagcagcgtgagctggtgaagctgcagcgccgccgggactccgaggacaggcgcgaggaaccccatagaagcttggcacgcagaggccctggcaggccgcggaaacggacccacgccccgagcgccctgtcgcccccccgcaagagagggaagagcggccacagtagcggaaagctgagcagcaagtctctgctgacatcagatgattatgagctgggagcagggataagaaagagacacaaggggtctgaggaggaacatgatgccctcatcggaatggggaaagccagggggaggaaccagacttgggatgaacatgaggcctcgtcggacttcatcagtcagctaaagattaagaagaagaagatggccagcgaccaggagcagttggcaagcaagctcgacaaggccctctccctcaccaagcaggacaagttgaagtcgcccttcaagttttcggacagtgctggggggaaatcgaaaactagcgggggctgcggcaggtacttgactccttacgacagcctgctggggaagaacaggaaggcgctggccaagggcctcggcctgtctctgaaatcctccagagaaggtaaacacaaaagggcagccaaaaccaggaagatggaggtggggttcaaggccagaggccagcccaagtcggcccattccccgtttgcctcggaagtgagcagctactcttacaatacggactcagaggaagacgaagaattcctgaaggacgagtggcccgcccaaggcccctccagctccaaactgacgccttccctcctgtgtagcatggtggcaaagaacagcaaggcagctggtggccccaagctgaccaagaggggcctggcggccccccggactctgaaacccaagccggccaccagcaggaagcagccgttttgtctgctgcttcgagaggccgaggcgcgttcctccttcagcgactcttcggaggaatcgtttgaccaagatgagagctcggaggaggaggacgaggaggaggagctcgaggaggaggacgaggccagcggtggtggctacaggctgggtgcccgggagcgggccctgtcaccgggcctggaggagagtgggctgggcctgctggcacgcttcgccgccagcgccctccccagccccacggtgggtccatccctgtctgtggtacagctggaggccaagcagaaggcccggaagaaagaggagcggcagagcctgctgggcacagagttcgagtacaccgactcagagagcgaggtcaaggtgcgcaagcggtcgcctgcggggctgctgcggcccaagaaggggctgggggagccgggaccctccctggccgcacccacgcctggcgcccgcggtcccgaccccagcagcccagacaaggccaagctggcggtggagaaggggcgcaaggcccggaagctgcggggccccaaggagcctggcttcgaggcggggcccgaggccagcgacgacgacctgtggacgcggcgccgcagcgagcgcatcttcctgcacgacgcctcggctgctgcacctgcgcccgtcagcaccgcgcccgccaccaagaccagccgctgcgccaagggcggccccctgagcccgcgcaaggacgccgggcgtgcaaaggacaggaaggaccccaggaagaagaagaaagggaaagaggctgggccaggagctgggctgccgccgccccgagctcctgccttgccctctgaggccagggctcctcacgccagctccctgaccgctgccaaaaggagcaaagccaaggccaaagggaaggaggtgaagaaggagaaccgcggcaaggggggtgccgtgagcaagctgatggagagcatggcagccgaggaggactttgaacccaaccaagactcgagcttctctgaggacgagcacctgccgcgtggcggggctgtggagcggccgctgaccccggcccctcgctcctgcatcatcgacaaggatgagctgaaggacggcctgcgtgtgctcatccccatggatgacaagctgctgtacgccgggcacgtgcagaccgtgcactcgccagacatataccgcgtggtggtggagggtgagcggggcaaccggccccacatctactgtctggagcagttgctgcaggaggcgatcatcgatgtgaggccagcctccactcgcttcttgccacaagggaccaggattgcagcctactggagccagcagtaccgctgtctctacccaggcactgtggtccgagggttactggacctggaggacgatggggacttgatcaccgtggagtttgacgacggagacacgggcaggatccccctctcacatatccgcctcctgccccctgactataagatacagtgtgctgagccgtccccggcccttctggtgccaagtgccaagcgccgcagccggaagaccagcaaagacactggggagggcaaagatggtggcacggctgggtcggaggagccaggagccaaggcccgtgggcgtgggcggaaacccagcgccaaggccaagggtggtagagccgctaccctggaggaggggaacccaacagacgaggtccccagtacccccttagccctggagccgagcagcaccccaggttccaagaagagccccccagagcctgtggacaagcgagccaaggcccccaaggcgcgcccggcaccgccgcagcccagtcccgcaccacccgccttcaccagctgcccagcacccgagccatttgcagagctgccagctcctgccacctccctggccccagcacccctcatcaccatgcctgccacacgccccaagcccaagaaggcgcgggcagccgaggagtcgggtgccaagggccctcggaggccgggggaggaggccgagctgcttgtcaaactggaccacgagggtgtcacgtcacccaaaagcaagaaggctaaagaggccctgctgctccgggaggatccgggggcggggggctggcaggagcccaagagcctcctgagcctgggcagctatccccccgcggccggcagcagcgagcccaaggcaccctggcccaaggccaccgacggggacctcgcccaggagcccgggccggggctcacgttcgaggactctgggaaccccaagagcccagacaaggcccaggctgagcaggacggggccgaagagtccgagagcagcagcagcagcagtagtggcagcagtagcagcagcagcagcagcagcagcagcggctcggagacagaaggggaggaggaaggcgacaagaacggggacgggggctgcggcaccgggggccgtaactgcagcgctgccagctccagggcggcctcaccggcctcctcctcctcctcctcatcctcctcctcctcctcctcctcctcctcatcctcctcttcctcctcctcctcttcctcctcctcctcttcctcttcgtcttcctcctcttcctcctcctcctcttcctcgtcctcatcctcctcctcctcctcctcttcctcctcttcttcctccaccacagacgaggactcttcctgcagctcggacgatgaggcagcccccgcccccacggctggcccttccgcgcaggcggcgctccccaccaaggccaccaagcaggccggcaaggcgcggccctcggcccactccccaggcaagaagacgcccgcgccccagccccaggcgcctcctccgcagcccacacagcctctgcagcccaaggctcaggccggggccaagagccgacccaagaagagagagggcgtccacctccccaccaccaaggagctggccaagcggcagcgcctgccgtccgtggagaaccggcccaagatcgccgccttcctgccagcccggcagctctggaagtggttcggcaagcccacccagcggcgtggcatgaagggcaaggcccgcaagctcttctacaaggccatcgtgcgcggcaaggagatgatccgtatcggggactgtgccgtgttcctctctgccggccgccccaacctgccctacatcggccgcatccagagcatgtgggagtcgtggggcaacaacatggtggtccgcgtcaagtggttctaccaccccgaggagaccagcccgggcaagcagttccaccagggccagcactgggaccagaagtccagccgcagcctcccggcggccctgcgggtctccagccagaggaaggacttcatggagcgcgcgctataccagtcctcgcatgtggacgaaaatgacgtgcagacggtgtcgcacaagtgcctggtggtgggcctggagcagtatgagcagatgctgaagaccaagaagtaccaggacagcgagggcctgtactacctcgcgggcacctacgagcccaccacgggcatgatcttctccacggacggcgtgcccgtgctctgctgagcccgccgggccctgcgggccacctgtgccccgagggcggccagggacccatctccatcactgccatggcgcggagaccacgtgcgttgtgtgcatgcgagcgctcctgcaggcgtgtgcatggggccaggtgtgcacgtggatgcccgggtgagtgtgtgtgcatgcacgtgtgtgcacgcatgtgcacatgcctccagccccaccttccaacccctcagtgcccccaggacaggggcccctcttagctatcagggtatggccggaccggcccttcctgcccagcacgttgcaagcacttggccaggccggccctccaggctgctgctgcgtgggggcccgggtgcccccaggtccatgcagactggggattcggtggggaggggcgcttctaaggaaccaaactgacgctcactctgggcttcccaagcacccttagcatggagcccaccccaaggcctcccaccgtgcatgggacagggcagcccgatgccagctggcctacctgactgtgccaggggccctgcccccaccctctcaggatggcctagacttggggaacagagccgggtggggttgcagcccggagtgtctgtcaaaggcaccaggtggagagggcccggcacaggcccaccctggtccaaaccctcacactacagaaaaccccaatggtgctgaaactgtcgcccggccacgcctggcccctccccacccaggagggaggtggcacttcttaacctgtacagttttattgtaccaagagactcgccccgcccctgtatcataagcctttaaatggagtcaactttttaattatatatataaagataaatatatataaatatatatataaactttttaaaactgtgaaaaatagctatgaaattataaaaaaaaacattctgacgtgcagaatattattttttatttcctgttagattatagtgtctagcaccggcttcaccggcctcccagtccccagcacaccccccgcccaccccaccaagtgtactgtactcaccccccaggatagagaagtgtttgttagggagagaagagggagaggcaggagccggcccaagcccagggtccctgcttgggccccagaaagcacttaaccaggccccaagccttcaagggaaaccaaggcctcaaccagacaatcttgagggaaggaaaagccagactttgggtttgttttttgggggaattattggtttttttttttatgtttcttttggaattttgtttgttggcaaattctgtgtgatcttttttcataaaaaaaaagaaaagatttaattggaaaaataaaa

SEQ ID NO: 36733 - DNA, 10562 bp, Artificial Sequence
  derived and/or modified sequence
ggccgcgggatggcgggcagcaggggcgcctagctgcgccgggagccggggccgccgccggagtcgttgtcgccggagcctggagccgtgaacccagccgcgccagacgccgtgtgcgccgcctcgcgcagctccgcctggccgcccggaggggccccaccgccggccgcctgtgcgccccgggccgcgggcccgccgccgagcgcaagccccgctggccgccgccatgcacgccgcggagcccccgccgcccgaggactctgggactacgccgaggccgaacttttaggtcccactgagctaggcctgcgggccgggtggggggctgatcgcggcactcccgcggaggatggatggccgagacttcgggccccagcggtccgtgcacggtcccccgccgccgctgctgtccggcctggccatggacagccaccgcgtgggcgcggccactgccggacgcttgcccgcctcgggcttgcccggcccgctgccgcccgggaagtacatggccggcctgaatctccatccgcacccgggcgaggccttcttgggcagctttgtggccagcgggatggggccctcggcctcgtcccatgggagcccagtgccactgccctctgacctgtctttccgctccccaacccctagcaacctgcccatggtgcagctgtgggccgcccacgcccatgaaggcttctcccacctgcccagtgggctgtacccatcctacctccacctgaaccacctggagccccccagcagtgggagccccctcctcagccagctgggtcagcccagcattttcgatacccagaaaggtcaggggccaggaggagacggtttctacctgcccaccgcgggggctccgggctccctgcactctcacgcgccctcggcccggacccctggcggcggccactcctcgggcgccccggccaaaggctcgtcgtcgcgggacggtccagccaaggagcgggcgggccgcggcggggagccgcctccgcttttcggcaagaaggacccgcgcgcccggggcgaggaggcctcggggccacggggcgtggtggacctgacccaggaggcgcgcgccgagggccgccaggaccgggggcccccgcgcctggctgagcgcctgtcgcccttcctggctgagtccaagaccaagaatgcggcgctgcagccgtcggtactgaccatgtgcaacggcggcgccggggacgtggggctgcccgcgctggtggccgaagcggggcgcgggggtgccaaggaggctgcccggcaggacgagggcgcgcggctgctgcggcgcacggagaccctgctccctgggccgcgcccctgcccctcaccgctgcccccgccgcccgcgccccccaaggggcctcctgcaccccccgcggccacccccgccggcgtctacaccgtcttccgcgagcagggccgtgagcaccgcgtggtggcgcccaccttcgtgccttccgtggaggccttcgacgagcgcccggggcccatccagatcgcatcccaggcgcgcgatgcccgggcccgcgagcgcgaggctggcaggccaggggtcctgcaggcgccccccggctccccgcggcctctggaccggcccgagggcctgcgcgagaagaactcggtcatccgctcgctcaagcggccgccccccgcggatgcccccacggtgcgggccacacgcgcctccccggacccccgcgcctacgtgcctgccaaggagctgctcaagcccgaggcggacccgaggccctgcgagcgtgcgccccgcggcccagccggtcctgcagcccaacaggccgccaagctcttcggcctggagcccgggcgccccccgcccaccggccctgagcataaatggaaacccttcgagctgggcaacttcgccgccacgcagatggccgtgctggccgcgcagcaccaccacagccgcgccgaagaggaggccgccgtggtcgctgcctcctcctccaagaaggcctacctggaccctggggctgtgctgccccgctcggcggccacctgcggccggccggtcgctgacatgcactctgcggcccacgggtctggagaggcctcggccatgcagagccttataaagtacagtggcagctttgcccgggacgccgtggccgtgcgccctggtggctgtggcaagaagagcccctttggaggtttgggcaccatgaaacccgagcctgcgcccacctctgcgggtgcctcccgagcccaggcccgtctcccacactccggaggccctgcagcgggcggcggccggcagctgaagcgggaccccgagaggcccgagagcgccaaagctttcgggcgcgagggctctggtgcccagggtgaggcagaagtgcgacacccgcctgtgggcattgcagtggctgtggcccggcagaaggacagtggcggcagtggccggctggggcctgggctggtagaccaggagcgctctctgtcgctgagtaacgtcaaagggcacggccgagcagatgaggactgtgtggacgaccgggccagacaccgggaggaacggctgctcggggcacggctggaccgggatcaggagaagctgctcagagagagtaaggagctggctgacctggcccgcctgcaccctaccagctgtgctcctaacggcctgaaccccaacctcatggtgacggggggcccggcgctggcgggctcaggtcgctggtctgccgaccccgcagcccatctggccacgcacccctggttgccccgctcgggcaacgcatccatgtggctcgctggacacccctacggcttgggtcccccatctctgcaccagggcatggcccctgcgttcccacctggcctggggggctccctcccgtcagcctaccagtttgtcagggacccccaatcgggccagctggtggtcattcccagtgatcaccttcctcactttgcggagctgatggagcgggccaccgtaccgcccctctggcccgccctgtacccgccgggccgcagccccctgcaccacgcccagcagctgcagctcttctcacagcagcacttcctgcggcagcaggagttcctgtacctgcagcagcaggcggcccaggccttggaactgcagaggagcgcccagctcgtgcaggagcggttgaaggcgcaggagcaccgggcggagatggaagagaaggggagcaagcggggcctggaggctgcgggcaaggctggcctggccaccgccggccccgggctgctgccgcggaagccccctggcctggccgccggccccgcgggcacctacggcaaggccgtgagcccgccaccatcaccccgcgcatcccctgtggctgccctgaaggccaaggtcatccagaagctggaggacgtgtccaagccacccgcctacgcctaccccgccacccccagctcccaccccaccagcccgccgcccgcctccccaccgcccaccccgggtatcacccgcaaggaggaggctcccgagaatgtggtcgagaagaaagacttggagttggagaaggaagcccccagccccttccaggccctgttctcagatatcccgcccaggtacccgttccaagccctgccaccgcactacgggaggccctaccctttcctgctgcagcccacggccgccgccgacgcggacggcttggcccctgatgtgccgctcccggctgatgggcccgagcgcctggcactctcacccgaagacaagcccatccgcttgtccccctccaagatcacagagccgctgcgggagggcccggaggaagaaccgctggctgagcgggaggtgaaggcagaggtggaggacatggacgagggccccacagagctgccgcctctggagtcgccgctgccactgcccgccgcggaagccatggctacccccagccctgcagggggttgtggaggtggcctgttggaggcccaggcgctgagtgccaccgggcagagctgcgcagagccctctgagtgtccagactttgtggaggggcctgaaccacgggtggattccccgggccggacagaaccctgcaccgccgccctggacctgggggtgcagctgacacccgagacactggtggaggccaaggaggagccggtggaggtgcctgtggcggtgcccgtggtggaggcagtgcccgaggaaggcctggcgcaggtggcaccgagcgagtcccagcccaccctagaaatgtcagactgtgacgtgcccgccggggagggacagtgcccgagcctggagccccaagaggccgtgcctgtactcggcagcacctgcttcctggaagaggcaagctctgaccagttcctgcccagtctggaggacccactggctggcatgaacgccctggcggcagctgcggagctgccccaggccaggcctctgccctccccgggtgctgctggagcccaggccttggagaagctggaagcagccgagagccttgtcttggagcagagcttcctgcatggcatcaccctgctaagtgagatcgcagagctggagctggagaggaggagccaagagatgggaggtgcggagcgggccctggtggcgcggccctccctggagagtctgctggcagctggcagccacatgctgagggaggtgctggatgggcccgtggtggacccactcaagaacctgcggctcccgcgggagctgaagcccaacaagaagtacagctggatgcgcaagaaggaggagcggatgtatgccatgaagtcctccctggaggacatggacgccctggagctggacttccggatgcggctggccgaggtgcagcgccagtacaaggagaagcagcgtgagctggtgaagctgcagcgccgccgggactccgaggacaggcgcgaggaaccccatagaagcttggcacgcagaggccctggcaggccgcggaaacggacccacgccccgagcgccctgtcgcccccccgcaagagagggaagagcggccacagtagcggaaagctgagcagcaagtctctgctgacatcagatgattatgagctgggagcagggataagaaagagacacaaggggtctgaggaggaacatgatgccctcatcggaatggggaaagccagggggaggaaccagacttgggatgaacatgaggcctcgtcggacttcatcagtcagctaaagattaagaagaagaagatggccagcgaccaggagcagttggcaagcaagctcgacaaggccctctccctcaccaagcaggacaagttgaagtcgcccttcaagttttcggacagtgctggggggaaatcgaaaactagcgggggctgcggcaggtacttgactccttacgacagcctgctggggaagaacaggaaggcgctggccaagggcctcggcctgtctctgaaatcctccagagaaggtaaacacaaaagggcagccaaaaccaggaagatggaggtggggttcaaggccagaggccagcccaagtcggcccattccccgtttgcctcggaagtgagcagctactcttacaatacggactcagaggaagacgaagaattcctgaaggacgagtggcccgcccaaggcccctccagctccaaactgacgccttccctcctgtgtagcatggtggcaaagaacagcaaggcagctggtggccccaagctgaccaagaggggcctggcggccccccggactctgaaacccaagccggccaccagcaggaagcagccgttttgtctgctgcttcgagaggccgaggcgcgttcctccttcagcgactcttcggaggaatcgtttgaccaagatgagagctcggaggaggaggacgaggaggaggagctcgaggaggaggacgaggccagcggtggtggctacaggctgggtgcccgggagcgggccctgtcaccgggcctggaggagagtgggctgggcctgctggcacgcttcgccgccagcgccctccccagccccacggtgggtccatccctgtctgtggtacagctggaggccaagcagaaggcccggaagaaagaggagcggcagagcctgctgggcacagagttcgagtacaccgactcagagagcgaggtcaaggtgcgcaagcggtcgcctgcggggctgctgcggcccaagaaggggctgggggagccgggaccctccctggccgcacccacgcctggcgcccgcggtcccgaccccagcagcccagacaaggccaagctggcggtggagaaggggcgcaaggcccggaagctgcggggccccaaggagcctggcttcgaggcggggcccgaggccagcgacgacgacctgtggacgcggcgccgcagcgagcgcatcttcctgcacgacgcctcggctgctgcacctgcgcccgtcagcaccgcgcccgccaccaagaccagccgctgcgccaagggcggccccctgagcccgcgcaaggacgccgggcgtgcaaaggacaggaaggaccccaggaagaagaagaaagggaaagaggctgggccaggagctgggctgccgccgccccgagctcctgccttgccctctgaggccagggctcctcacgccagctccctgaccgctgccaaaaggagcaaagccaaggccaaagggaaggaggtgaagaaggagaaccgcggcaaggggggtgccgtgagcaagctgatggagagcatggcagccgaggaggactttgaacccaaccaagactcgagcttctctgaggacgagcacctgccgcgtggcggggctgtggagcggccgctgaccccggcccctcgctcctgcatcatcgacaaggatgagctgaaggacggcctgcgtgtgctcatccccatggatgacaagctgctgtacgccgggcacgtgcagaccgtgcactcgccagacatataccgcgtggtggtggagggtgagcggggcaaccggccccacatctactgtctggagcagttgctgcaggaggcgatcatcgatgtgaggccagcctccactcgcttcttgccacaagggaccaggattgcagcctactggagccagcagtaccgctgtctctacccaggcactgtggtccgagggttactggacctggaggacgatggggacttgatcaccgtggagtttgacgacggagacacgggcaggatccccctctcacatatccgcctcctgccccctgactataagatacagtgtgctgagccgtccccggcccttctggtgccaagtgccaagcgccgcagccggaagaccagcaaagacactggggagggcaaagatggtggcacggctgggtcggaggagccaggagccaaggcccgtgggcgtgggcggaaacccagcgccaaggccaagggtgacagagccgctaccctggaggaggggaacccaacagacgaggtccccagtacccccttagccctggagccgagcagcaccccaggttccaagaagagccccccagagcctgtggacaagcgagccaaggcccccaaggcgcgcccggcaccgccgcagcccagtcccgcaccacccgccttcaccagctgcccagcacccgagccatttgcagagctgccagctcctgccacctccctggccccagcacccctcatcaccatgcctgccacacgccccaagcccaagaaggcgcgggcagccgaggagtcgggtgccaagggccctcggaggccgggggaggaggccgagctgcttgtcaaactggaccacgagggtgtcacgtcacccaaaagcaagaaggctaaagaggccctgctgctccgggaggatccgggggcggggggctggcaggagcccaagagcctcctgagcctgggcagctatccccccgcggccggcagcagcgagcccaaggcaccctggcccaaggccaccgacggggacctcgcccaggagcccgggccggggctcacgttcgaggactctgggaaccccaagagcccagacaaggcccaggctgagcaggacggggccgaagagtccgagagcagcagcagcagcagtagtggcagcagtagcagcagcagcagcagcagcagcagcggctcggagacagaaggggaggaggaaggcgacaagaacggggacgggggctgcggcaccgggggccgtaactgcagcgctgccagctccagggcggcctcaccggcctcctcctcctcctcctcatcctcctcctcctcctcctcctcctcctcatcctcctcttcctcctcctcctcttcctcctcctcctcttcctcttcgtcttcctcctcttcctcctcctcctcttcctcgtcctcatcctcctcctcctcctcctcttcctcctcttcttcctccaccacagacgaggactcttcctgcagctcggacgatgaggcagcccccgcccccacggctggcccttccgcgcaggcggcgctccccaccaaggccaccaagcaggccggcaaggcgcggccctcggcccactccccaggcaagaagacgcccgcgccccagccccaggcgcctcctccgcagcccacacagcctctgcagcccaaggctcaggccggggccaagagccgacccaagaagagagagggcgtccacctccccaccaccaaggagctggccaagcggcagcgcctgccgtccgtggagaaccggcccaagatcgccgccttcctgccagcccggcagctctggaagtggttcggcaagcccacccagcggcgtggcatgaagggcaaggcccgcaagctcttctacaaggccatcgtgcgcggcaaggagatgatccgtatcggggactgtgccgtgttcctctctgccggccgccccaacctgccctacatcggccgcatccagagcatgtgggagtcgtggggcaacaacatggtggtccgcgtcaagtggttctaccaccccgaggagaccagcccgggcaagcagttccaccagggccagcactgggaccagaagtccagccgcagcctcccggcggccctgcgggtctccagccagaggaaggacttcatggagcgcgcgctataccagtcctcgcatgtggacgaaaatgacgtgcagacggtgtcgcacaagtgcctggtggtgggcctggagcagtatgagcagatgctgaagaccaagaagtaccaggacagcgagggcctgtactacctcgcgggcacctacgagcccaccacgggcatgatcttctccacggacggcgtgcccgtgctctgctgagcccgccgggccctgcgggccacctgtgccccgagggcggccagggacccatctccatcactgccatggcgcggagaccacgtgcgttgtgtgcatgcgagcgctcctgcaggcgtgtgcatggggccaggtgtgcacgtggatgcccgggtgagtgtgtgtgcatgcacgtgtgtgcacgcatgtgcacatgcctccagccccaccttccaacccctcagtgcccccaggacaggggcccctcttagctatcagggtatggccggaccggcccttcctgcccagcacgttgcaagcacttggccaggccggccctccaggctgctgctgcgtgggggcccgggtgcccccaggtccatgcagactggggattcggtggggaggggcgcttctaaggaaccaaactgacgctcactctgggcttcccaagcacccttagcatggagcccaccccaaggcctcccaccgtgcatgggacagggcagcccgatgccagctggcctacctgactgtgccaggggccctgcccccaccctctcaggatggcctagacttggggaacagagccgggtggggttgcagcccggagtgtctgtcaaaggcaccaggtggagagggcccggcacaggcccaccctggtccaaaccctcacactacagaaaaccccaatggtgctgaaactgtcgcccggccacgcctggcccctccccacccaggagggaggtggcacttcttaacctgtacagttttattgtaccaagagactcgccccgcccctgtatcataagcctttaaatggagtcaactttttaattatatatataaagataaatatatataaatatatatataaactttttaaaactgtgaaaaatagctatgaaattataaaaaaaaacattctgacgtgcagaatattattttttatttcctgttagattatagtgtctagcaccggcttcaccggcctcccagtccccagcacaccccccgcccaccccaccaagtgtactgtactcaccccccaggatagagaagtgtttgttagggagagaagagggagaggcaggagccggcccaagcccagggtccctgcttgggccccagaaagcacttaaccaggccccaagccttcaagggaaaccaaggcctcaaccagacaatcttgagggaaggaaaagccagactttgggtttgttttttgggggaattattggtttttttttttatgtttcttttggaattttgtttgttggcaaattctgtgtgatcttttttcataaaaaaaaagaaaagatttaattgg

SEQ ID NO: 36734 - protein, 602 aa, Artificial Sequence
  derived and/or modified sequence
MNGGAERAMRSLPSLGGLALLCCAAAAAAAAVASAASAGNVTGGGGAAGQVDASPGPGLRGEPSHPFPRATAPTAQAPRTGPPRATVHRPLAATSPAQSPETTPLWATAGPSSTTFQAPLGPSPTTPPAAERTSTTSQAPTRPAPTTLSTTTGPAPTTPVATTVPAPTTPRTPTPDLPSSSNSSVLPTPPATEAPSSPPPEYVCNCSVVGSLNVNRCNQTTGQCECRPGYQGLHCETCKEGFYLNYTSGLCQPCDCSPHGALSIPCNSSGKCQCKVGVIGSICDRCQDGYYGFSKNGCLPCQCNNRSASCDALTGACLNCQENSKGNHCEECKEGFYQSPDATKECLRCPCSAVTSTGSCSIKSSELEPECDQCKDGYIGPNCNKCENGYYNFDSICRKCQCHGHVDPVKTPKICKPESGECINCLHNTTGFWCENCLEGYVHDLEGNCIKKEVILPTPEGSTILVSNASLTTSVPTPVINSTFTPTTLQTIFSVSTSENSTSALADVSWTQFNIIILTVIIIVVVLLMGFVGAVYMYREYQNRKLNAPFWTIELKEDNISFSSYHDSIPNADVSGLLEDDGNEVAPNGQLTLTTPIHNYKA

SEQ ID NO: 36735 - protein, 639 aa, Artificial Sequence
  derived and/or modified sequence
MRSLPSLGGLALLCCAAAAAAAAVASAASAGNVTGGGGAAGQVDASPGPGLRGEPSHPFPRATAPTAQAPRTGPPRATVHRPLAATSPAQSPETTPLWATAGPSSTTFQAPLGPSPTTPPAAERTSTTSQAPTRPAPTTLSTTTGPAPTTPVATTVPAPTTPRTPTPDLPSSSNSSVLPTPPATEAPSSPPPGHQWPVAKMPQKYLGKYACESNLKSKYLPLTQPVMNLRVSEAVKTEYVCNCSVVGSLNVNRCNQTTGQCECRPGYQGLHCETCKEGFYLNYTSGLCQPCDCSPHGALSIPCNSSGKCQCKVGVIGSICDRCQDGYYGFSKNGCLPCQCNNRSASCDALTGACLNCQENSKGNHCEECKEGFYQSPDATKECLRCPCSAVTSTGSCSIKSSELEPECDQCKDGYIGPNCNKCENGYYNFDSICRKCQCHGHVDPVKTPKICKPESGECINCLHNTTGFWCENCLEGYVHDLEGNCIKKEVILPTPEGSTILVSNASLTTSVPTPVINSTFTPTTLQTIFSVSTSENSTSALADVSWTQFNIIILTVIIIVVVLLMGFVGAVYMYREYQNRKLNAPFWTIELKEDNISFSSYHDSIPNADVSGLLEDDGNEVAPNGQLTLTTPIHNYKA

SEQ ID NO: 36736 - DNA, 1809 bp, Artificial Sequence
  derived and/or modified sequence
atgaacggaggggctgaacgcgcgatgcggagccttcctagcctgggcggactggctctgctgtgctgtgctgccgcggctgctgcagctgccgtggcctcagcggcctccgctggaaatgtaacaggaggtgggggggccgctggccaggtggacgcctcccctggccccggactgcgaggagaaccctcgcatccctttcccagagctacagcccctactgcccaggcaccccggaccggccctcctagagctaccgttcaccggcctctggctgcaacgagcccggctcagagtcccgaaactactccactctgggcaacagcagggcccagcagcacgacatttcaggccccccttgggcctagccctacgactccacccgccgcagagagaacctctacgacttcccaggcccccactcggccagctccaacaaccctcagcaccaccaccggcccagcccccactacccctgtcgctacgaccgtccctgcccctaccaccccacggactcccacacctgacctaccatcaagctccaactcgtcagtcctccctacaccacctgccacagaagctccctcttccccaccccccgagtatgtgtgcaattgttctgtggtagggagccttaacgtaaatcgttgcaatcagacaacaggacagtgtgagtgtaggcccggataccaagggctgcactgtgagacttgcaaggagggtttttatctgaattatacaagcggcctgtgtcaaccatgcgactgtagtcctcatggggccttgtctattccttgtaattcaagtggtaagtgccagtgcaaagtcggagtgattggaagcatatgcgacaggtgtcaagatgggtattacggttttagcaagaacggatgcctcccttgccaatgcaataatcgctctgccagctgcgacgccctgacaggggcctgtctcaattgtcaggagaactcaaagggcaaccattgcgaagagtgtaaagaaggattctaccaaagccctgatgctaccaaggaatgcttaagatgtccatgttcagccgtgactagcaccggctcttgtagcatcaagagttcagagttagaacccgagtgtgatcagtgtaaagatggatacatcgggccaaattgcaacaagtgtgagaatgggtattacaatttcgatagcatttgcaggaagtgccaatgccacgggcacgttgaccccgtaaaaaccccaaagatatgcaagccagagtccggggaatgcattaattgtcttcacaataccacaggattctggtgtgagaattgcttggagggttacgtgcacgatctcgaggggaactgtatcaaaaaggaagtgatcctccctacacccgagggatcaactatactcgtgtcgaatgcgtcactcacgaccagtgtcccaactcccgtgattaatagcacattcactcccacgaccctgcagacaatcttctccgtctccaccagcgaaaattcgactagcgccctggccgatgttagttggacccaattcaatattattatactgaccgttatcattattgtagtggtcctgttaatggggttcgtaggagcggtctacatgtacagagaataccaaaatcgaaagctcaatgcacccttttggaccatcgaactgaaggaagacaatatctccttttcatcctatcacgattcaatccctaacgccgacgtttccggattacttgaggatgacgggaacgaggttgcccccaacgggcagctcaccctgaccactcccatccataattataaggcctag

SEQ ID NO: 36737 - DNA, 1920 bp, Artificial Sequence
  derived and/or modified sequence
atgaggtcgctcccgtcgcttggcgggctggcactcctctgttgtgcggcagctgccgctgctgcggcagtggcatccgccgcatccgctggtaacgtaaccggaggaggtggcgccgctggccaagtggacgccagccctggaccagggttgcggggggagccatcacatcccttcccccgtgcaacagccccaacagcacaggcaccccggactggaccgcctagggccacagttcatcgcccactggccgctacttcccccgcccagtcccctgagacaacccccctgtgggccaccgcaggcccctcatcgacaaccttccaggctccactgggtcccagcccaaccactcctccagccgctgaacggacttccaccacgtctcaggcacccacaaggcccgctcctaccaccctttctacaacgacaggacccgcccccaccacccccgttgccaccaccgttcccgcgcccactactccaagaactcctactcccgatctgccctctagttctaattcaagcgttctccccacaccgccagctacagaggctcccagttccccccctcctggccaccaatggccagtggcgaagatgcctcagaagtatttgggcaagtatgcgtgtgaatcaaacctgaagtctaagtacttgccactgacgcagcctgtgatgaatctgcgggtctcagaagctgtgaaaactgaatacgtgtgcaattgcagtgttgtcggctccctcaacgtgaaccggtgcaaccagacaaccggacagtgtgaatgtcgtcccgggtaccagggcctccattgcgaaacgtgtaaggagggattctatctgaattatacttctggcctgtgccagccctgcgattgcagtcctcacggagctttgtcaattccttgtaatagttctggcaaatgtcagtgtaaggtcggagtcattggaagtatctgcgacagatgccaagacggctactatggtttttcgaaaaatggctgtttaccgtgccaatgtaacaaccggtccgcttcttgtgacgccctcaccggggcttgtctaaattgtcaagaaaatagcaagggcaaccactgtgaagagtgcaaggaagggttctaccagagcccggatgctacaaaagagtgtctaaggtgcccttgcagtgccgtgacatctacgggtagctgctcaattaagtctagcgaactcgagcctgaatgcgaccaatgtaaggatggctatataggccccaattgcaacaaatgcgaaaatggatattataactttgattctatttgtcgtaagtgccagtgtcacggccacgtggaccctgtgaagactccaaaaatttgcaaacctgagtccggagagtgcattaattgtttacacaacacaactggattctggtgcgagaattgtttggaaggctatgtgcatgatctggaagggaattgcattaagaaggaggttatcctgcccacacctgaaggctccacgatcttggtctccaacgcctccctgaccacgtctgtcccaacaccagtcattaactcaacattcacaccaacaacgctgcagacaatctttagcgtctctactagtgagaatagtacctcagcgttggctgacgtgtcttggacgcagttcaatatcatcatcctgactgtcattattatcgttgttgttctgctcatgggattcgtcggggcagtatatatgtacagggagtatcagaaccgtaagctgaacgctcccttttggacgattgaactgaaagaggataatatctccttttccagctatcacgattcaatcccaaacgcagatgtgtcagggctccttgaagatgacgggaatgaggtcgcacccaatggccagttgacactgaccaccccaatccataactataaggcttag

SEQ ID NO: 36738 - DNA, 1809 bp, Artificial Sequence
  derived and/or modified sequence
atgaatggaggagctgagcgggccatgaggagcctgcccagcctgggcggcctggccctgctgtgctgtgccgctgctgctgctgctgctgctgtggccagcgctgccagcgctggaaatgtgactggaggcggcggggccgccggccaggtggatgccagccctggccctggcctgcggggggagcccagccaccccttcccccgggccacagcccccacagcccaggcccccaggacaggccccccccgggccaccgtgcaccggcccctggccgccaccagccctgcccagagccctgagaccacccccctgtgggccacagctggccccagcagcaccaccttccaggcccccctgggccccagccccaccaccccacctgctgctgagaggaccagcaccaccagccaggcccccaccaggcctgcccccaccaccctgagcaccaccaccggccctgcccccaccacccctgtggccaccaccgtgcctgcccccaccacccccaggacccccaccccagacctgcccagcagcagcaacagctctgtgctgcccaccccaccagccacagaggcccccagcagccccccaccagaatatgtgtgcaactgcagcgtggtgggcagcctgaatgtgaaccgctgcaaccagaccaccggccagtgtgaatgtcggcccggctaccagggcctgcactgtgagacctgcaaggagggcttctacctgaactacaccagcggcctgtgccagccctgtgactgcagcccccatggagccctgagcatcccctgcaacagcagcggcaagtgccagtgcaaggtgggcgtgattggcagcatctgtgaccgctgccaggacggctactacggcttcagcaagaatggctgcctgccctgccagtgcaacaacagaagtgccagctgtgatgccctgaccggggcctgcctgaactgccaggagaacagcaaaggaaaccactgtgaggagtgcaaggagggcttctaccagagcccagatgccaccaaggaatgtctgcgctgcccctgcagcgctgtgaccagcacaggcagctgcagcatcaagagcagcgagctggagccagaatgtgaccagtgcaaggatggctacatcggccccaactgcaacaagtgtgaaaatggctactacaactttgacagcatctgcaggaagtgccagtgccacggccacgtggaccctgtgaagacccccaagatctgcaagccagagagcggggagtgcatcaactgcctgcacaacaccaccggcttctggtgtgagaactgcctggagggctacgtgcatgacctggagggcaactgcatcaagaaggaggtgatcctgcccaccccagagggcagcaccatcctggtgtccaatgccagcctgaccacctctgtgcccacccctgtgatcaacagcaccttcacccccaccaccctgcagaccatcttctctgtgtccaccagcgagaacagcaccagcgccctggctgatgtgtcctggacccagttcaacatcatcatcctgaccgtcatcatcatcgtggtggtgctgctgatgggctttgtgggcgctgtgtacatgtaccgggagtaccagaacaggaagctgaatgcccccttctggaccatcgagctgaaggaggacaacatctccttcagcagctaccatgacagcatccccaatgctgatgtgtctggcctgctggaggatgatggaaatgaggtggcccccaacggccagctgaccctgaccacccccatccacaactacaaggcctag

SEQ ID NO: 36739 - DNA, 1920 bp, Artificial Sequence
  derived and/or modified sequence
atgaggagcctgcccagcctgggcggcctggccctgctgtgctgtgccgctgctgctgctgctgctgctgtggccagcgctgccagcgctggaaatgtgactggaggcggcggggccgccggccaggtggatgccagccctggccctggcctgcggggggagcccagccaccccttcccccgggccacagcccccacagcccaggcccccaggacaggccccccccgggccaccgtgcaccggcccctggccgccaccagccctgcccagagccctgagaccacccccctgtgggccacagctggccccagcagcaccaccttccaggcccccctgggccccagccccaccaccccacctgctgctgagaggaccagcaccaccagccaggcccccaccaggcctgcccccaccaccctgagcaccaccaccggccctgcccccaccacccctgtggccaccaccgtgcctgcccccaccacccccaggacccccaccccagacctgcccagcagcagcaacagctctgtgctgcccaccccaccagccacagaggcccccagcagccccccacctggccaccagtggcctgtggccaagatgccccagaagtacctgggcaagtatgcctgtgagagcaacctgaagagcaagtacctgcccctgacccagcctgtgatgaacctgcgggtgtctgaggccgtgaagacagaatatgtgtgcaactgcagcgtggtgggcagcctgaatgtgaaccgctgcaaccagaccaccggccagtgtgagtgcaggcctggctaccagggcctgcactgtgagacctgcaaggagggcttctacctgaactacaccagcggcctgtgccagccctgtgactgcagcccccacggggccctgagcatcccctgcaacagcagcggcaagtgccagtgcaaggtgggcgtcatcggcagcatctgtgaccgctgccaggacggctactacggcttcagcaagaatggctgcctgccctgccagtgcaacaacagaagtgccagctgtgatgccctgactggagcctgcctgaactgccaggagaacagcaagggcaaccactgtgaggagtgcaaggagggcttctaccagagcccagatgccaccaaggagtgcctgcgctgcccctgcagcgctgtgaccagcacaggcagctgcagcatcaagagcagcgagctggagccagaatgtgaccagtgcaaggatggctacatcggccccaactgcaacaagtgtgaaaatggctactacaactttgacagcatctgcaggaagtgccagtgccacggccacgtggaccctgtgaagacccccaagatctgcaagccagagagcggggagtgcatcaactgcctgcacaacaccaccggcttctggtgtgagaactgcctggagggctacgtgcatgacctggagggcaactgcatcaagaaggaggtgatcctgcccaccccagagggcagcaccatcctggtgtccaatgccagcctgaccacctctgtgcccacccctgtgatcaacagcaccttcacccccaccaccctgcagaccatcttctctgtgtccaccagcgagaacagcaccagcgccctggctgatgtgtcctggacccagttcaacatcatcatcctgaccgtcatcatcatcgtggtggtgctgctgatgggctttgtgggcgctgtgtacatgtaccgggagtaccagaacaggaagctgaatgcccccttctggaccatcgagctgaaggaggacaacatctccttcagcagctaccatgacagcatccccaatgctgatgtgtctggcctgctggaggatgatggaaatgaggtggccccaaatggccagctgaccctgaccacccccatccacaactacaaggcctag

SEQ ID NO: 36740 - DNA, 6298 bp, Artificial Sequence
  derived and/or modified sequence
agagggaggtggcgatggtgcgcccggtggcggtggcggcggcggttgcggaggcttccttggtcggattgcaacgaggagaagatgactgaccaaccgactggctgaatgaatgaatggcggagccgagcgcgccatgaggagcctgccgagcctgggcggcctcgccctgttgtgctgcgccgccgccgccgccgccgccgccgtcgcctcagccgcctcggcggggaatgtcaccggtggcggcggggccgcggggcaggtggacgcgtcgccgggccccgggttgcggggcgagcccagccaccccttccctagggcgacggctcccacggcccaggccccgaggaccgggcccccgcgcgccaccgtccaccgacccctggctgcgacttctccagcccagtccccggagaccacccctctttgggcgactgctggaccctcttccaccacctttcaggcgccgctcggcccctcgccgaccacccctccggcggcggaacgcacttcgaccacctctcaggcgccgaccagacccgcgccgaccaccctttcgacgaccactggcccggcgccgaccacccctgtagcgaccaccgtaccggcgcccacgactccccggaccccgacccccgatctccccagcagcagcaacagcagcgtcctccccaccccacctgccaccgaggccccctcttcgcctcctccagagtatgtatgtaactgctctgtggttggaagcctgaatgtgaatcgctgcaaccagaccacagggcagtgtgagtgtcggccaggttatcaggggcttcactgtgaaacctgcaaagagggcttttacctaaattacacttctgggctctgtcagccatgtgactgtagtccacatggagctctcagcataccgtgcaacagttctgggaaatgccagtgcaaagtgggtgtcattggctctatatgtgaccgatgccaagatggatattatggctttagtaagaatggctgcttgccctgccaatgcaataatcggtctgccagttgcgatgccctcacaggtgcttgtttaaactgccaggaaaatagcaaaggaaatcactgtgaagaatgtaaagaaggattttatcagagtcctgatgccactaaagaatgtcttcgctgcccttgttcagcagtgacatctacaggcagctgctctataaaatcgagtgaattggaacctgaatgtgaccagtgtaaagatggttacataggcccgaactgcaataaatgtgaaaatggctattacaattttgacagcatctgtagaaagtgccaatgtcacggccatgtggacccagttaaaactccaaagatttgtaagcccgagagtggtgagtgcatcaactgcctccataacaccactgggttttggtgtgagaactgcctagaaggttatgttcacgacctcgagggaaattgcatcaagaaagaagttattcttccaacacctgaaggttctaccattttggtttccaatgcctctttgaccacatcagtgcccacccctgttataaatagtacttttacccctacaaccctgcagactatcttttcagtaagcacttctgaaaacagcacttcagctttagctgatgtatcatggacccaatttaacatcatcattttgacagtcatcatcattgttgtggtgctgctaatgggatttgtgggggctgtatatatgtaccgcgagtaccaaaaccggaaactcaatgcccccttttggaccatcgagctgaaagaagacaatatcagtttcagcagctaccatgacagcattcccaatgcagatgtttcgggattgttggaagatgatggcaatgaagtggctcccaatgggcagctgaccctgacgacgcccatacataactacaaagcctaaggagctagaactgttctgaattgttaaaccacagtgcttgctaagacagagtcagcccctgggccagacaaagcctggctagagtttgctgagaaagcaaaggcaaatagtgcatctgaaattttcaggtacaaatttgtaatgcgcttagcctatctattgctcttagttttcccatgaagatctgaagcgttcactgtcattaggacttgaagtaaagtatatttttgtaccaaaccacatgggagtatggaaaggctgaaccccatagtgcagcccaaaaccactttgacctccagatagactcctggggaagcattcaccaagccagtggtaacaagatgatgaatgtggagggggaaaagactgctggaagacttcatctccattcctgaaacattttttttaaaacagtgtcagggattatattcgttttactatacaaaaggacatcattgaggaaaagcttgtttctaggctgtatcacagtaaataatcttgattgtttctagaacaggggtagaaaagtcccaagatcttcagaagggcttggttttttcctcccaggattcttgctcagtgatgagttgaaagcacaggataagcttctaagggaggaaggcagcattggggagcaggaggctgatggtcctcctcagggtctcagtgtaaatgataaattgtctaaaaataaggaatattcctgcctctagagaaataaggtgtacatagttaatgtagcatatctggtcgacgttgtatttgtatctatttgtaaaaaaaaaatcatgtcatattttatcatctggaatttatttgtacagcagttaatggtgttgtaaaaagaaaaatatggggattgcttaaaatactgtaaaatagatggcaatattgctagagctgggactctggtgagcatccgtcatttttagtccttcttgaggacattgctgaaatttataagaggtcgaatgtttctttctttcctttctcagtctaaaagtagagttatatgctctttgacttactatgattcaagcaatagattttgaagtcagtaatcgttaagctgggacataggatgcattctccaaaaacattaatctaattagacattagccaccctatatattttacatagattaatataaaacatatcctcattaaaaaatgtttttcttgaatgtaaaagatagtcttccaaaggatagaaatattttagttccaagagaaaagccatcatattacttgggatctgtagttttcatgcctatgaaatatttataatcctccctcaccccaaataaaaaatctcctacatgtgaacatagcctgtcactcatttgccatgaggtatgtgccatctccctgcagtgctatagttctcccattgtcttcctgtctggttaatgagcagctttgtagatgggtgtgtctagttagttcttgctttttgatggagttttttcctagaggccaactactgttgctctcgtttattatgatattgacattttgggttaagcaaggtgggtgggaaaggtggtcagatgttaaatataacttattaggaggaacagtgaactgtgaagtggttagaaaaaaaataaaaacttcttattagattagacctaggaaattcaagctgacccctttgcctaacttccctagagaaaaacctagaacttggtcatccctttataggagacccctaagttgttctcagggtttggagatgatgttctggagggagtacaagcaaataatctacttctggtaatctgagggtgctttgcgtatttggccattgctcagaagaatagaggttacattatattacattatatgaaaattatttagtttttctatagccctttgtagtttgcaaagcacttttccatatgtgtgtcctctcttccacaccatagccccctgaggaagtaattgttgtccccattttatagatgaaaaggctgaggcacagaggagctaaatatcttgttcaaggctatacaatgtgtgtgattattaggcttggaatcagggcctctaactctaaagcacatgttttttcaactatatgcagaaattgcctagccatggacacaagaaagctgggaggaagagttctacttgtggatgtttttaattttttttaaatatcaggagcaatccagggccatacagctatgaagcacttagtgaaaagaacacaagaagatttactaactgaagttagtattagtgattagaaaacaaaactgccagtttgtgcttcattaaggtgaactcatctctccaagcaggaagggaaaatttgctttccctagcagttgctgcatatgtgtgtacagactgcacaattctaagaaattgtgcaaaatggcatacctgtctttctcccagatacaccgccccctgccccccccaaaaaaggtcaggattaaaggtggtgagaagtgaacatttattaaacagaagttaaaccaatagagagaaaggaggtttgttggagtctaagaggattttgaccatgtagaaattccttgaaacagaccttaaaaggtattgaaaaattgaatcacaaagaaagtttacctttaaatacttgttaatggctcctagatcatggttataatttttctcaatgggaaaaaaagtcttaaaatttgttttaaataagatcctctaatgtctcgagctttttgattctggaaataatttgctttaaaatataaatcaatcagaaagtgatctaccactgaaatcattctaggaaactagcatgggatgcactgcacaatgttctttcctctaaaggcatgggccccataaactgtggcatctggcagcaggatgccatcagtcctttagaaagcctaattttgggccgggtgcggtggctcacgcctgtaatcccagcactttgggaggccgaggcgggtggatcacaaggtcaggagttcgagaccagcctggtcaacatggcgaaatcccgtctctactaaaaacacaaaaattagccgggtgtacgtgcctgtagtctcagctacttgggaggctgaggcaggagaatcacttgaacctgggaggcagaggttacagtgagccgagatggcgccatttcactccagcctgggcgacagagcaagactctgtctcaaaaaaaaggaagaaaaagaaagcctaatattgggagaatgtttgtgtaaggattggaaatctgtttatttttaaataagatagcactgatgtgaatcttatttggaaattacagatactgccattaagcgatgcttttatcttcattaattcattttggtaagcgcctatgcatttctgatggttaggtgccctaggtagtgttaagtatgtccgtgtcctcccttactcccctctcgctccctctaccctctatcccctagggttcttttattaatggaatttctccagttatagagaaaaaaatgacatttgaaaactaaagctcatttatattaatactaaggtcctgtgggcctagtgcgttactcttcccagtgatacctagattttaagagtagagaacagaggaaacatgggatgagaggagagaggttttttagacaacatttgtagacacctcaaattatatcactgttctctagcgccaatattcccaggtaaattgaccattaaagcaatactcactgacctactagtttattttggtcagctgagtaccatcaggatatttaaccctttaagtgctgttttgggagtagaaaactaaagcaacaatacttcctcttgacagctttgattggaatggggttattagatcattcaccttggtcctacactttttaggatgcttggtgaacataacaccacttataatgaacatccctggttcctatattttgggctatgtgggtaggaattgttacttgttactgcagcagcagccctagaaagtaagcccagggcttcagatctaagttagtccaaaagctaaatgatttaaagtcaagttgtaatgctaggcataagcactctataatacattaaattataggccgagcaattagggaatgtttctgaaacattaaacttgtatttatgtcactaaaattctaacacaaacttaaaaaatgtgtctcatacatatgctgtactaggcttcatcatgcatttctaaatttgtgtatgatttgaatatatgaaagaatttatacaagagtgttatttaaaattattaaaaataaatgtatataatttgtacctattgtagatttgttgtttacttttttgtgtggtcagagttgtttcatgtcttcaaatacatgccaaggatcatttactttcagcccacttcataaaaatctttgaactctt

SEQ ID NO: 36741 - DNA, 6297 bp, Artificial Sequence
  derived and/or modified sequence
atgaggagcctgccgagcctgggcggcctcgccctgttgtgctgcgccgccgccgccgccgccgccgccgtcgcctcagccgcctcggcggggaatgtcaccggtggcggcggggccgcggggcaggtggacgcgtcgccgggccccgggttgcggggcgagcccagccaccccttccctagggcgacggctcccacggcccaggccccgaggaccgggcccccgcgcgccaccgtccaccgacccctggctgcgacttctccagcccagtccccggagaccacccctctttgggcgactgctggaccctcttccaccacctttcaggcgccgctcggcccctcgccgaccacccctccggcggcggaacgcacttcgaccacctctcaggcgccgaccagacccgcgccgaccaccctttcgacgaccactggcccggcgccgaccacccctgtagcgaccaccgtaccggcgcccacgactccccggaccccgacccccgatctccccagcagcagcaacagcagcgtcctccccaccccacctgccaccgaggccccctcttcgcctcctccagggcatcagtggcctgtggcaaagatgccccaaaagtatctaggaaaatatgcctgtgagagtaacctgaaaagcaagtacttgcctcttacacagccagtcatgaatcttagagtctcagaagctgttaaaacggagtatgtatgtaactgctctgtggttggaagcctgaatgtgaatcgctgcaaccagaccacagggcagtgtgagtgtcggccaggttatcaggggcttcactgtgaaacctgcaaagagggcttttacctaaattacacttctgggctctgtcagccatgtgactgtagtccacatggagctctcagcataccgtgcaacagttctgggaaatgccagtgcaaagtgggtgtcattggctctatatgtgaccgatgccaagatggatattatggctttagtaagaatggctgcttgccctgccaatgcaataatcggtctgccagttgcgatgccctcacaggtgcttgtttaaactgccaggaaaatagcaaaggaaatcactgtgaagaatgtaaagaaggattttatcagagtcctgatgccactaaagaatgtcttcgctgcccttgttcagcagtgacatctacaggcagctgctctataaaatcgagtgaattggaacctgaatgtgaccagtgtaaagatggttacataggcccgaactgcaataaatgtgaaaatggctattacaattttgacagcatctgtagaaagtgccaatgtcacggccatgtggacccagttaaaactccaaagatttgtaagcccgagagtggtgagtgcatcaactgcctccataacaccactgggttttggtgtgagaactgcctagaaggttatgttcacgacctcgagggaaattgcatcaagaaagaagttattcttccaacacctgaaggttctaccattttggtttccaatgcctctttgaccacatcagtgcccacccctgttataaatagtacttttacccctacaaccctgcagactatcttttcagtaagcacttctgaaaacagcacttcagctttagctgatgtatcatggacccaatttaacatcatcattttgacagtcatcatcattgttgtggtgctgctaatgggatttgtgggggctgtatatatgtaccgcgagtaccaaaaccggaaactcaatgcccccttttggaccatcgagctgaaagaagacaatatcagtttcagcagctaccatgacagcattcccaatgcagatgtttcgggattgttggaagatgatggcaatgaagtggctcccaatgggcagctgaccctgacgacgcccatacataactacaaagcctaaggagctagaactgttctgaattgttaaaccacagtgcttgctaagacagagtcagcccctgggccagacaaagcctggctagagtttgctgagaaagcaaaggcaaatagtgcatctgaaattttcaggtacaaatttgtaatgcgcttagcctatctattgctcttagttttcccatgaagatctgaagcgttcactgtcattaggacttgaagtaaagtatatttttgtaccaaaccacatgggagtatggaaaggctgaaccccatagtgcagcccaaaaccactttgacctccagatagactcctggggaagcattcaccaagccagtggtaacaagatgatgaatgtggagggggaaaagactgctggaagacttcatctccattcctgaaacattttttttaaaacagtgtcagggattatattcgttttactatacaaaaggacatcattgaggaaaagcttgtttctaggctgtatcacagtaaataatcttgattgtttctagaacaggggtagaaaagtcccaagatcttcagaagggcttggttttttcctcccaggattcttgctcagtgatgagttgaaagcacaggataagcttctaagggaggaaggcagcattggggagcaggaggctgatggtcctcctcagggtctcagtgtaaatgataaattgtctaaaaataaggaatattcctgcctctagagaaataaggtgtacatagttaatgtagcatatctggtcgacgttgtatttgtatctatttgtaaaaaaaaaatcatgtcatattttatcatctggaatttatttgtacagcagttaatggtgttgtaaaaagaaaaatatggggattgcttaaaatactgtaaaatagatggcaatattgctagagctgggactctggtgagcatccgtcatttttagtccttcttgaggacattgctgaaatttataagaggtcgaatgtttctttctttcctttctcagtctaaaagtagagttatatgctctttgacttactatgattcaagcaatagattttgaagtcagtaatcgttaagctgggacataggatgcattctccaaaaacattaatctaattagacattagccaccctatatattttacatagattaatataaaacatatcctcattaaaaaatgtttttcttgaatgtaaaagatagtcttccaaaggatagaaatattttagttccaagagaaaagccatcatattacttgggatctgtagttttcatgcctatgaaatatttataatcctccctcaccccaaataaaaaatctcctacatgtgaacatagcctgtcactcatttgccatgaggtatgtgccatctccctgcagtgctatagttctcccattgtcttcctgtctggttaatgagcagctttgtagatgggtgtgtctagttagttcttgctttttgatggagttttttcctagaggccaactactgttgctctcgtttattatgatattgacattttgggttaagcaaggtgggtgggaaaggtggtcagatgttaaatataacttattaggaggaacagtgaactgtgaagtggttagaaaaaaaataaaaacttcttattagattagacctaggaaattcaagctgacccctttgcctaacttccctagagaaaaacctagaacttggtcatccctttataggagacccctaagttgttctcagggtttggagatgatgttctggagggagtacaagcaaataatctacttctggtaatctgagggtgctttgcgtatttggccattgctcagaagaatagaggttacattatattacattatatgaaaattatttagtttttctatagccctttgtagtttgcaaagcacttttccatatgtgtgtcctctcttccacaccatagccccctgaggaagtaattgttgtccccattttatagatgaaaaggctgaggcacagaggagctaaatatcttgttcaaggctatacaatgtgtgtgattattaggcttggaatcagggcctctaactctaaagcacatgttttttcaactatatgcagaaattgcctagccatggacacaagaaagctgggaggaagagttctacttgtggatgtttttaattttttttaaatatcaggagcaatccagggccatacagctatgaagcacttagtgaaaagaacacaagaagatttactaactgaagttagtattagtgattagaaaacaaaactgccagtttgtgcttcattaaggtgaactcatctctccaagcaggaagggaaaatttgctttccctagcagttgctgcatatgtgtgtacagactgcacaattctaagaaattgtgcaaaatggcatacctgtctttctcccagatacaccgccccctgccccccccaaaaaaggtcaggattaaaggtggtgagaagtgaacatttattaaacagaagttaaaccaatagagagaaaggaggtttgttggagtctaagaggattttgaccatgtagaaattccttgaaacagaccttaaaaggtattgaaaaattgaatcacaaagaaagtttacctttaaatacttgttaatggctcctagatcatggttataatttttctcaatgggaaaaaaagtcttaaaatttgttttaaataagatcctctaatgtctcgagctttttgattctggaaataatttgctttaaaatataaatcaatcagaaagtgatctaccactgaaatcattctaggaaactagcatgggatgcactgcacaatgttctttcctctaaaggcatgggccccataaactgtggcatctggcagcaggatgccatcagtcctttagaaagcctaattttgggccgggtgcggtggctcacgcctgtaatcccagcactttgggaggccgaggcgggtggatcacaaggtcaggagttcgagaccagcctggtcaacatggcgaaatcccgtctctactaaaaacacaaaaattagccgggtgtacgtgcctgtagtctcagctacttgggaggctgaggcaggagaatcacttgaacctgggaggcagaggttacagtgagccgagatggcgccatttcactccagcctgggcgacagagcaagactctgtctcaaaaaaaaggaagaaaaagaaagcctaatattgggagaatgtttgtgtaaggattggaaatctgtttatttttaaataagatagcactgatgtgaatcttatttggaaattacagatactgccattaagcgatgcttttatcttcattaattcattttggtaagcgcctatgcatttctgatggttaggtgccctaggtagtgttaagtatgtccgtgtcctcccttactcccctctcgctccctctaccctctatcccctagggttcttttattaatggaatttctccagttatagagaaaaaaatgacatttgaaaactaaagctcatttatattaatactaaggtcctgtgggcctagtgcgttactcttcccagtgatacctagattttaagagtagagaacagaggaaacatgggatgagaggagagaggttttttagacaacatttgtagacacctcaaattatatcactgttctctagcgccaatattcccaggtaaattgaccattaaagcaatactcactgacctactagtttattttggtcagctgagtaccatcaggatatttaaccctttaagtgctgttttgggagtagaaaactaaagcaacaatacttcctcttgacagctttgattggaatggggttattagatcattcaccttggtcctacactttttaggatgcttggtgaacataacaccacttataatgaacatccctggttcctatattttgggctatgtgggtaggaattgttacttgttactgcagcagcagccctagaaagtaagcccagggcttcagatctaagttagtccaaaagctaaatgatttaaagtcaagttgtaatgctaggcataagcactctataatacattaaattataggccgagcaattagggaatgtttctgaaacattaaacttgtatttatgtcactaaaattctaacacaaacttaaaaaatgtgtctcatacatatgctgtactaggcttcatcatgcatttctaaatttgtgtatgatttgaatatatgaaagaatttatacaagagtgttatttaaaattattaaaaataaatgtatataatttgtacctattgtagatttgttgtttacttttttgtgtggtcagagttgtttcatgtcttcaaatacatgccaaggatcatttactttcagcccacttcataaaaatctttgaactctt

SEQ ID NO: 36742 - DNA, 1809 bp, Artificial Sequence
  derived and/or modified sequence
atgaacggcggcgccgagcgggccatgcggagcctgcccagcctgggtgggcttgcactcctctgttgtgcagctgcggcagctgccgccgcagtggccagcgctgcctctgcagggaacgtgacaggaggcggtggcgcagccggacaggtggacgcctcacccggtccaggcctgcgcggggaacctagccacccttttccccgggctaccgcaccaaccgcccaagcgccgaggacaggcccaccacgcgccaccgtgcaccgccctctggcagccacatctcccgctcaatctccagagacgactcctttatgggctactgccgggccatcgtccacaactttccaagccccattaggaccatcccccacaactccaccagccgccgaaaggacatcaaccacaagtcaagcacctactcggcctgcgccaaccacactgtccactactaccggtcccgctcctacgactccagtggcgactaccgtgcctgcgcctacgacacctcgcaccccgactcccgatctgccaagctccagcaacagtagcgtattgcctacgcctcccgctaccgaagcgccctcttctccacctccagagtacgtctgcaactgttccgtcgtcggcagtcttaatgttaatcgctgtaaccagactacaggccagtgtgaatgtaggcctggataccagggcctgcattgcgagacttgcaaggaaggcttttacctcaattatacatcaggcctttgccaaccctgcgactgcagcccccacggtgctttaagcataccctgcaattcttccgggaagtgtcagtgcaaagtcggcgtcattgggagtatctgcgatagatgccaggacggctattacggtttctcaaagaacggatgcctgccatgccagtgtaacaaccggtccgcgtcatgtgacgccttaacgggcgcgtgtctgaactgccaagagaacagtaagggaaaccactgcgaggagtgtaaggagggcttctaccaaagtcctgatgcgaccaaagagtgtctgagatgtccttgtagcgccgtcacgagcaccgggtcctgcagtattaaaagtagcgagcttgaacctgaatgtgatcagtgtaaggatggatatattggccccaactgtaacaaatgtgagaatggatattataacttcgatagtatctgccgaaagtgtcagtgccacggacacgtggatcctgtcaaaacccctaaaatctgcaaacccgagagtggtgaatgtattaactgtctgcacaacactacagggttttggtgcgaaaactgcttggaagggtatgtgcatgacctggaggggaactgtataaaaaaggaagtgattctccctacacccgaagggtccacgattctggtgagcaatgcatcgctgacaacaagtgtgcccacccctgtaatcaactcaactttcaccccaactaccctgcagacgatcttcagtgttagcacgtccgagaatagtaccagtgcattagctgatgtgtcctggacacagtttaatatcattattctcaccgtaattattatcgtggtggtgctgctcatgggatttgttggcgccgtttacatgtatagagaatatcaaaacaggaaacttaacgcccctttctggactattgaattaaaggaagataacatttctttttcttcatatcacgattccatccctaatgcagatgtgagcggtttgttagaagacgatggtaatgaggtagcccccaatggtcagctgactctgactactcctatccataattacaaagcttag

SEQ ID NO: 36743 - DNA, 1920 bp, Artificial Sequence
  derived and/or modified sequence
atgcggagcctgcccagcctgggcggcctggccctgctgtgctgcgccgccgctgcagcagctgccgccgtggctagtgcagcaagcgctggaaatgtgactggagggggtggagctgccggacaggtagacgcatcccccggacccgggctgaggggtgaacctagccacccgttccctcgggctacggcccccaccgcacaggcaccaaggacaggtccgcctagagcaacagtgcaccgccctctcgccgccacgtccccagcccagtcacccgaaactacacccctgtgggccaccgctggacccagctctacgactttccaggcaccattgggccctagccccaccacgcctccagcggcagagagaactagtacaacaagtcaggcaccaactcgacccgcgcctaccacgctcagtacaaccactgggccagctccaacgacccccgtcgctacaacagtaccagcacccaccacaccccgcacccccaccccggacctaccctcttcctcaaatagctcggtgctccccacccccccagctaccgaggccccctccagcccacccccagggcatcaatggccggtggcgaaaatgcctcaaaaatacctcggtaaatacgcatgtgagtccaacctgaaaagcaaatatcttccattgactcagcctgttatgaatctcagggtttcagaagcggtcaagacagagtacgtctgcaattgctcggtggtgggttcactcaatgtgaacaggtgtaaccaaaccacgggacagtgcgagtgccgtccagggtatcaaggattgcactgtgagacttgcaaggagggcttttacctcaactatacctctggcctgtgccaaccttgtgattgctcaccccacggagctctttccatcccttgcaattcttctggcaagtgtcagtgtaaagtaggggttatcggctccatatgcgaccggtgccaagatgggtattacggattctcgaaaaatggttgtctcccatgtcaatgcaataatcggtcagccagctgcgatgcactgacaggcgcatgcctcaattgccaggagaattccaagggtaatcactgtgaagagtgtaaagaaggattctaccagtctcccgacgctacgaaggaatgtttacggtgcccttgcagtgctgtcactagtacaggcagttgttccattaagtcctccgaactggagcctgagtgtgaccagtgtaaagacgggtacattggcccgaattgcaacaagtgcgaaaacgggtattacaactttgacagtatttgcagaaaatgccaatgccatggccacgtggatcccgtgaaaactccaaagatctgcaaacccgagagcggagagtgcatcaactgccttcacaacacaacgggtttctggtgcgaaaactgtctagaaggttacgtccatgatttagaaggtaactgcatcaagaaagaagtcattcttccgacgccagaggggtcaacaatccttgtcagcaatgcatccctgaccacatccgtgcccactcctgtaattaattctacttttacgcctactaccctgcagaccatcttttccgtgagtaccagtgaaaacagcacgtccgcacttgccgacgtctcttggacacaatttaatatcattattttgactgtgataatcatcgtggtggtcctgctgatgggatttgtgggagccgtgtacatgtatcgtgaataccagaaccgaaaattgaatgctcccttctggaccattgagctgaaggaagataatatttccttttcctcctaccatgacagcatcccgaacgcggatgtttctggtctccttgaagacgacggaaacgaggtggccccaaacgggcagttgacgcttaccacacccattcacaactacaaggcttag

SEQ ID NO: 36744 - DNA, 1809 bp, Artificial Sequence
  derived and/or modified sequence
atgaacggtggggctgaacgcgctatgagaagtttaccttctctgggaggcctagccctactatgctgcgccgctgccgcagcagccgctgccgtggcttccgcagcaagcgctggtaacgtaacaggtggcggaggcgcagcaggacaggttgacgccagtccagggccaggactgcgcggagaaccttctcatcccttcccccgagcaacagccccaactgctcaggccccaaggactgggccacccagggccacggtgcacagacctttggccgcaacttccccagctcagtcccccgagacaactccactgtgggccaccgctggtccctcaagtacaacattccaggctcccctgggcccaagtccaaccactcccccagcagctgaaagaacctctaccactagccaggccccaacaaggccggctcccacgacgctctctacaacgaccggacccgcaccgaccactccggttgcgaccacagttccagcaccaacaacgcctcgtaccccaacccccgatcttccaagctccagcaatagcagtgtgctgccgacaccaccggctaccgaggcaccctcttcaccaccccctgagtacgtgtgcaattgcagcgtggtgggtagccttaacgtaaatcgctgcaaccagaccactggtcagtgcgaatgccgcccaggataccaggggctgcattgtgagacttgcaaagagggcttttacctcaactatacatcaggcttgtgtcagccatgtgactgtagccctcatggagccctgagtattccctgcaactcatccggaaagtgccaatgcaaggtgggcgtcatcggatccatttgcgatagatgccaggatggatattatggattttccaaaaacggctgtctgccctgccagtgcaataatcggtctgcctcatgcgatgctttgaccggtgcctgcctgaattgccaagaaaattctaaaggcaaccactgtgaggaatgtaaagaggggttttatcagagtcccgacgccactaaggaatgcctgagatgtccatgttcagccgtgacatcgacaggttcgtgctctattaagagctctgaactggagcccgagtgcgatcagtgtaaggatgggtacatcggacccaactgtaataaatgcgaaaatggctactacaattttgattccatctgtagaaagtgtcagtgccatggacacgtggacccagtgaagacaccaaaaatctgtaagcccgaatccggagaatgtataaattgcttacataacactactggattctggtgcgagaattgtcttgagggttacgttcacgacttggaagggaactgtatcaagaaagaagtcatcctgccaacacctgagggcagcaccatcttagtgagcaacgcgagtcttacaacgtccgtcccgacacctgtgatcaacagtacattcaccccaaccacactccaaaccattttcagtgtgtcaacgtctgagaattcaacatcagctctggccgacgtctcatggacacagtttaacatcatcatcttaactgttataatcatcgtggtggtcctactcatgggttttgtgggtgccgtgtatatgtacagagagtaccaaaaccggaagctgaatgctcctttttggacaattgagctcaaagaggataacatctcattcagctcatatcatgattccattccaaacgctgacgtctccgggctgctagaagacgatggtaatgaggtggctcccaatggtcaactcacactgaccactcccatccataattataaggcctag

SEQ ID NO: 36745 - DNA, 1920 bp, Artificial Sequence
  derived and/or modified sequence
atgagatcgcttccctcattgggaggtcttgcattactttgctgcgcagcggctgccgcagccgcagctgtggcctcagctgcctctgccggaaatgtgaccggcggtgggggagccgctggtcaggttgacgcaagtccaggacctggcctgcgcggagagccaagtcacccttttccgcgtgcaacagccccaaccgcccaagctccgaggaccggcccaccaagagccacagtccatcgaccactggctgccacaagtccggctcaatcccctgagaccactcccctctgggctaccgccggtcccagcagcactaccttccaggctccactgggcccttccccaacaaccccaccagctgcggaaagaacatctacaacctcgcaggcacccacacgtccggcaccaacaaccctgtctactaccacagggccagcgccaactactcccgtggcaacaaccgtccctgcacctacaactccccgaacccctactcctgatctgccatcgagttccaatagcagtgtgttaccaacacccccagcaacagaagccccttcaagtcccccacccggacaccagtggcccgtggctaaaatgccgcagaaatatctgggtaagtacgcatgcgagtctaatctgaagtcaaaatacttgcctttaacccagcctgtaatgaacctacgagtgagcgaagccgtcaagaccgagtacgtgtgcaactgcagcgtcgtcggctctctcaacgtaaaccgttgcaatcaaacaacggggcaatgtgaatgcaggccgggataccagggtctgcattgcgagacctgcaaggaagggttctatttgaactacacaagcggtctttgtcagccctgcgactgctccccacatggcgcactgtctatcccttgcaactctagcggtaaatgtcagtgcaaggttggtgttattggatccatatgtgaccgctgtcaggacggttattacggcttctctaaaaatggatgcctcccgtgtcagtgcaacaatcggtcagcgagctgcgacgcactgacaggggcatgtctgaattgccaagaaaattccaaggggaaccactgtgaggagtgtaaggaaggattctaccagtctcctgatgctacaaaagaatgcctgcggtgtccgtgttcagccgtgactagcacaggctcctgcagtataaaatccagcgaactggagcctgaatgcgatcaatgtaaggatggttacattggacccaattgcaataagtgcgaaaatgggtactataactttgactccatatgccgtaagtgccagtgccatggccacgtggatccagtaaagactcctaagatctgcaagcctgagagtggcgagtgtataaattgtctgcacaatacaactggattttggtgtgaaaactgtttggaaggttatgtgcatgatctagaaggtaattgcatcaaaaaagaggtgattctccccacaccggagggcagtacaatactcgtgagcaacgcgagtttgactacgagcgtgcctactccagtcatcaattcaacattcactcccaccacactgcagactatattctccgtgtctacatcggagaacagtactagcgcccttgccgacgtctcttggacacagttcaatattattatccttaccgtcatcatcatcgtggtggtgctcctcatggggttcgtgggggcagtctacatgtaccgggaatatcagaacaggaagttgaacgcaccgttttggactatagaattgaaagaggataacattagcttcagctcttatcacgactcgatcccgaatgccgatgtttctggtcttctggaggatgacggcaatgaggtcgcaccaaatggccaactgacactcactaccccaattcacaactacaaagcctag

SEQ ID NO: 36746 - DNA, 1809 bp, Artificial Sequence
  derived and/or modified sequence
atgaacggcggcgccgagagagccatgagaagcctgcccagcctgggcggcctggccctgctgtgctgcgccgccgccgccgccgccgccgccgtggccagcgccgccagcgccggcaacgtgaccggcggcggcggcgccgccggccaggtggacgccagccccggccccggcctgagaggcgagcccagccaccccttccccagagccaccgcccccaccgcccaggcccccagaaccggcccccccagagccaccgtgcacagacccctggccgccaccagccccgcccagagccccgagaccacccccctgtgggccaccgccggccccagcagcaccaccttccaggcccccctgggccccagccccaccaccccccccgccgccgagagaaccagcaccaccagccaggcccccaccagacccgcccccaccaccctgagcaccaccaccggccccgcccccaccacccccgtggccaccaccgtgcccgcccccaccacccccagaacccccacccccgacctgcccagcagcagcaacagcagcgtgctgcccaccccccccgccaccgaggcccccagcagccccccccccgagtacgtgtgcaactgcagcgtggtgggcagcctgaacgtgaacagatgcaaccagaccaccggccagtgcgagtgcagacccggctaccagggcctgcactgcgagacctgcaaggagggcttctacctgaactacaccagcggcctgtgccagccctgcgactgcagcccccacggcgccctgagcatcccctgcaacagcagcggcaagtgccagtgcaaggtgggcgtgatcggcagcatctgcgacagatgccaggacggctactacggcttcagcaagaacggctgcctgccctgccagtgcaacaacagaagcgccagctgcgacgccctgaccggcgcctgcctgaactgccaggagaacagcaagggcaaccactgcgaggagtgcaaggagggcttctaccagagccccgacgccaccaaggagtgcctgagatgcccctgcagcgccgtgaccagcaccggcagctgcagcatcaagagcagcgagctggagcccgagtgcgaccagtgcaaggacggctacatcggccccaactgcaacaagtgcgagaacggctactacaacttcgacagcatctgcagaaagtgccagtgccacggccacgtggaccccgtgaagacccccaagatctgcaagcccgagagcggcgagtgcatcaactgcctgcacaacaccaccggcttctggtgcgagaactgcctggagggctacgtgcacgacctggagggcaactgcatcaagaaggaggtgatcctgcccacccccgagggcagcaccatcctggtgagcaacgccagcctgaccaccagcgtgcccacccccgtgatcaacagcaccttcacccccaccaccctgcagaccatcttcagcgtgagcaccagcgagaacagcaccagcgccctggccgacgtgagctggacccagttcaacatcatcatcctgaccgtgatcatcatcgtggtggtgctgctgatgggcttcgtgggcgccgtgtacatgtacagagagtaccagaacagaaagctgaacgcccccttctggaccatcgagctgaaggaggacaacatcagcttcagcagctaccacgacagcatccccaacgccgacgtgagcggcctgctggaggacgacggcaacgaggtggcccccaacggccagctgaccctgaccacccccatccacaactacaaggcctag

SEQ ID NO: 36747 - DNA, 1920 bp, Artificial Sequence
  derived and/or modified sequence
atgagaagcctgcccagcctgggcggcctggccctgctgtgctgcgccgccgccgccgccgccgccgccgtggccagcgccgccagcgccggcaacgtgaccggcggcggcggcgccgccggccaggtggacgccagccccggccccggcctgagaggcgagcccagccaccccttccccagagccaccgcccccaccgcccaggcccccagaaccggcccccccagagccaccgtgcacagacccctggccgccaccagccccgcccagagccccgagaccacccccctgtgggccaccgccggccccagcagcaccaccttccaggcccccctgggccccagccccaccaccccccccgccgccgagagaaccagcaccaccagccaggcccccaccagacccgcccccaccaccctgagcaccaccaccggccccgcccccaccacccccgtggccaccaccgtgcccgcccccaccacccccagaacccccacccccgacctgcccagcagcagcaacagcagcgtgctgcccaccccccccgccaccgaggcccccagcagccccccccccggccaccagtggcccgtggccaagatgccccagaagtacctgggcaagtacgcctgcgagagcaacctgaagagcaagtacctgcccctgacccagcccgtgatgaacctgagagtgagcgaggccgtgaagaccgagtacgtgtgcaactgcagcgtggtgggcagcctgaacgtgaacagatgcaaccagaccaccggccagtgcgagtgcagacccggctaccagggcctgcactgcgagacctgcaaggagggcttctacctgaactacaccagcggcctgtgccagccctgcgactgcagcccccacggcgccctgagcatcccctgcaacagcagcggcaagtgccagtgcaaggtgggcgtgatcggcagcatctgcgacagatgccaggacggctactacggcttcagcaagaacggctgcctgccctgccagtgcaacaacagaagcgccagctgcgacgccctgaccggcgcctgcctgaactgccaggagaacagcaagggcaaccactgcgaggagtgcaaggagggcttctaccagagccccgacgccaccaaggagtgcctgagatgcccctgcagcgccgtgaccagcaccggcagctgcagcatcaagagcagcgagctggagcccgagtgcgaccagtgcaaggacggctacatcggccccaactgcaacaagtgcgagaacggctactacaacttcgacagcatctgcagaaagtgccagtgccacggccacgtggaccccgtgaagacccccaagatctgcaagcccgagagcggcgagtgcatcaactgcctgcacaacaccaccggcttctggtgcgagaactgcctggagggctacgtgcacgacctggagggcaactgcatcaagaaggaggtgatcctgcccacccccgagggcagcaccatcctggtgagcaacgccagcctgaccaccagcgtgcccacccccgtgatcaacagcaccttcacccccaccaccctgcagaccatcttcagcgtgagcaccagcgagaacagcaccagcgccctggccgacgtgagctggacccagttcaacatcatcatcctgaccgtgatcatcatcgtggtggtgctgctgatgggcttcgtgggcgccgtgtacatgtacagagagtaccagaacagaaagctgaacgcccccttctggaccatcgagctgaaggaggacaacatcagcttcagcagctaccacgacagcatccccaacgccgacgtgagcggcctgctggaggacgacggcaacgaggtggcccccaacggccagctgaccctgaccacccccatccacaactacaaggcctag

SEQ ID NO: 36748 - protein, 238 aa, Artificial Sequence
  derived and/or modified sequence
MRALLALCLLLGWLRWGPAGAQQSGEYCHGWVDVQGNYHEGFQCPEDFDTLDATICCGSCALRYCCAAADARLEQGGCTNDRRELEHPGITAQPVYVPFLIVGSIFIAFIILGSVVAIYCCTCLRPKEPSQQPIRFSLRSYQTETLPMILTSTSPRAPSRQSSTATSSSSTGGSIRRFSFARAEPGCLVPSPPPPYTTSHSIHLAQPSGFLVSPQYFAYPLQQEPPLPGKSCPDFSSS

SEQ ID NO: 36749 - DNA, 717 bp, Artificial Sequence
  derived and/or modified sequence
atgagagccctgctggccctgtgcctgctgctgggctggctgagatggggccccgccggcgcccagcagagcggcgagtactgccacggctgggtggacgtgcagggcaactaccacgagggcttccagtgccccgaggacttcgacaccctggacgccaccatctgctgcggcagctgcgccctgagatactgctgcgccgccgccgacgccagactggagcagggcggctgcaccaacgacagaagagagctggagcaccccggcatcaccgcccagcccgtgtacgtgcccttcctgatcgtgggcagcatcttcatcgccttcatcatcctgggcagcgtggtggccatctactgctgcacctgcctgagacccaaggagcccagccagcagcccatcagattcagcctgagaagctaccagaccgagaccctgcccatgatcctgaccagcaccagccccagagcccccagcagacagagcagcaccgccaccagcagcagcagcaccggcggcagcatcagaagattcagcttcgccagagccgagcccggctgcctggtgcccagccccccccccccctacaccaccagccacagcatccacctggcccagcccagcggcttcctggtgagcccccagtacttcgcctaccccctgcagcaggagccccccctgcccggcaagagctgccccgacttcagcagcagctag

SEQ ID NO: 36750 - DNA, 717 bp, Artificial Sequence
  derived and/or modified sequence
atgagagctttgttggccctatgcctactgctggggtggttgagatggggcccagcgggcgcacagcagagcggggaatattgtcatggatgggtggatgttcagggcaactatcacgaaggatttcagtgtccagaagactttgatacgttggatgcgaccatctgctgcggttcttgcgcactgagatattgttgtgctgccgcagacgctcgtctggagcaggggggatgtacgaacgatagaagggagctggagcatcccggtatcacagctcaacccgtatatgtgcctttcctcatcgtgggctcaatattcatcgcctttatcatcctgggatcggtagtggcaatctactgctgcacgtgcttgagaccgaaggagccatcccaacagcctatacgattttccctgcgcagctatcagacagagaccctacctatgatcctgactagtacatcgccaagagctccttcacggcagagttcgacagcaacgtcgagctccagtaccgggggaagcatcagacggttttcattcgctagagccgagcccggctgcctagtccccagtccccctcccccctacacaacttcccattccattcacctcgcccaacccagtggctttctcgtttcaccacagtacttcgcctacccattgcaacaagaacctcccctgccggggaagtcatgccccgatttttcaagttcctag

SEQ ID NO: 36751 - DNA, 717 bp, Artificial Sequence
  derived and/or modified sequence
atgagggccctgctggccctgtgcctgctgctgggctggctgcgctggggccctgctggggcccagcagagcggggagtactgccacggctgggtggatgtgcagggcaactaccacgagggcttccagtgcccagaggactttgacaccctggatgccaccatctgctgcggcagctgtgccctgcgctactgctgtgccgctgctgatgcccggctggagcagggcggctgcaccaatgaccggcgggagctggagcaccctggcatcacagcccagcctgtgtatgtgcccttcctgattgtgggcagcatcttcatcgccttcatcatcctgggctctgtggtggccatctactgctgcacctgcctgcggcccaaggagcccagccagcagcccatccgcttcagcctgcggagctaccagacagagaccctgcccatgatcctgaccagcaccagcccccgggcccccagccggcagagcagcacagccaccagcagcagcagcactggaggcagcatccgccgcttctcctttgcccgggcagagcccggctgcctggtgcccagccccccaccaccctacaccaccagccacagcatccacctggcccagcccagcggcttcctggtgagcccccagtactttgcctaccccctgcagcaggagccccccctgcccgggaagagctgcccagacttcagcagcagctag

SEQ ID NO: 36752 - DNA, 717 bp, Artificial Sequence
  derived and/or modified sequence
atgcgggccctgctggccctgtgcctgctgctgggctggctgcggtggggccctgccggcgcgcaacagtctggagagtactgccatgggtgggtggatgttcaggggaattaccatgagggattccagtgtcccgaggactttgatacgctcgacgcaacaatatgctgtggatcttgtgccttaagatactgttgcgccgcggccgatgcccggttggagcagggcggatgtaccaacgaccgtagagagctagagcacccaggtatcaccgcccagccagtctacgtccccttcctaatcgttgggtcaatattcatagctttcattatcctggggtcagtagttgccatatattgttgcacctgcctgagacccaaagagccttcccagcagcctataaggttttcacttaggagctaccagacggagactctgcctatgatcctgactagtacatcccccagggcgcctagccgccaatcttcaactgctacgtcctcctcttcaaccggaggcagcattagacggttttcctttgcacgcgcggagcccgggtgtctggtgccttcccctccacccccctataccacatcacactcgattcatctggcgcagccaagcggattccttgtctctccccagtactttgcctatcctctgcagcaggagccgccactccctgggaagagttgtccagacttctcttcaagttag

SEQ ID NO: 36753 - DNA, 717 bp, Artificial Sequence
  derived and/or modified sequence
atgcgtgctctcttggccctctgtcttcttctcggatggcttcgctgggggccagccggagctcaacaaagcggagagtactgtcatggttgggtggatgtgcagggcaactaccacgagggctttcaatgtcctgaagattttgacactcttgatgcaaccatctgctgtggctcatgtgccttgcgctactgttgtgctgcagctgacgcaagattggaacaagggggatgtaccaatgatcgaagggagctggaacaccccggtatcaccgcacagcccgtatatgtccccttcctgattgtggggtcaattttcatcgccttcatcattctcggaagtgtcgtggcaatctattgctgtacttgcttgcgccctaaagagccctctcaacagcctatccggtttagcctccggtcctaccaaacggaaactctacctatgatcctgacatccaccagccctcgtgctccgtctcggcagtcttccaccgctacatcctcatcctcgaccggcggatctatcagacgcttttccttcgcccgtgccgaacctggatgtcttgtgccaagtcctcctcccccttataccacttctcattccatccatttagcccagccctccggattcctggtcagtccccaatattttgcctacccactgcagcaggaaccaccgttacctggaaaatcttgtcctgatttcagctcctcatag

SEQ ID NO: 36754 - DNA, 1971 bp, Artificial Sequence
  derived and/or modified sequence
cgcgcaccatgctgactcccggcctgcggaactcgtagtgcagcccctgtcgcctccccggcccctgctatcccacgcaggactggcttcggccgccggggccagcagcttgcgacgtgtccctggggaggcggaatcgctgtgcgccctgagcccgggctcagcccttcgctttccagctgcgtcctgctcccggccgcccagggagcccagtggcgatgagggcactgctggcgctttgccttctccttggctggctgcgctggggcccggcgggcgcccagcagtccggagagtactgccacggctgggtggacgtgcagggcaactaccacgagggcttccagtgcccagaggacttcgacacgctggacgctaccatctgctgcggctcctgcgcgctccgctactgttgcgccgcggccgacgccaggctggagcagggcggctgcaccaacgaccgccgcgaactggagcacccaggcatcactgcgcagcctgtctacgtcccctttctcatcgtcggctccatcttcattgcgttcatcatcctgggctctgtagtggctatttattgttgcacctgtttgagacccaaggagccctcgcagcagccaatccgcttctcactccgcagctatcagacagagaccctgcccatgatcctgacctccaccagccccagggcaccctcccggcagtccagcacagccacgagctccagctccacaggcggctccatccgcaggttctcctttgccagggctgagccgggctgcctggtgccctcaccgcccccgccatacaccaccagccactcaatccacctggctcagccatctggtttcctggtgtcaccccagtatttcgcttaccccctccagcaggagcccccactgcctgggaagagctgtccagacttcagttccagttgacacgcccaggccatgaatccacaactcagtcagatggcagacaggtggagccctgctcccattgccacatgcaattctgagaaaatttcccttgtaactgatcagtgtcatggaggagcatgctaggaaaacacagcaccttctaatttgaaagttcctgtctccaatcacagaaaggctaaaccagagaactgttttctggttttgcaaacatgtgatcattacatttcaatctatgctacttttattcaaaatatgcagcagtttgactttaaagttgcaaactggctaaaaacgttttactggacattcagctatattgcttagaaaagggctacatgtttctttttcatataagttgttcattgagttatgataggaatatattcataaataagcaaagaaaaatacctaattgtaattatcaaaggttcacttaaaaaattaactattaggtaaacttaagggggcagtgaaaaatctatttatgatttcgggagtaacctaaccatgaataatattagcataatgagaacatttactttttaaataaataactaaattttgtttacaatatgagtttttccagaatacaaggtttcaataatcacatgaggagtttaaagttttaaatatatactcagacattcattgtaacacagagtgtatgtaaaatcatttcccccactcactggagggagtatttattgcagactttttgttcagcaacatttagtgtttcagtgaaagttggacagttggggcttaaaacatttatttgtaaaatgagctatgttcaaatgtaaatatttgtaatttaatgtatttaccacattgactgtactaattatttagtagtcatactgtaatttttatgttaataataactggagttcaaagtctagctattggtataatcatctaatattatatatatctccagtgcccctgaattttatgtttgatgactatatatttgggcatatatcttgttggattagaataaataaaacactttatattttcatgaactcta

SEQ ID NO: 36755 - protein, 607 aa, Artificial Sequence
  derived and/or modified sequence
MAEKRRGSPCSMLSLKAHAFSVEALIGAEKQQQLQKKRRKLGAEEAAGAVDDGGCSRGGGAGEKGSSEGDEGAALPPPAGATSGPARSGADLERGAAGGCEDGFQQGASPLASPGGSPKGSPARSLARPGTPLPSPQAPRVDLQGAELWKRFHEIGTEMIITKAGRRMFPAMRVKISGLDPHQQYYIAMDIVPVDNKRYRYVYHSSKWMVAGNADSPVPPRVYIHPDSPASGETWMRQVISFDKLKLTNNELDDQGHIILHSMHKYQPRVHVIRKDCGDDLSPIKPVPSGEGVKAFSFPETVFTTVTAYQNQQITRLKIDRNPFAKGFRDSGRNRMGLEALVESYAFWRPSLRTLTFEDIPGIPKQGNASSSTLLQGTGNGVPATHPHLLSGSSCSSPAFHLGPNTSQLCSLAPADYSACARSGLTLNRYSTSLAETYNRLTNQAGETFAPPRTPSYVGVSSSTSVNMSMGGTDGDTFSCPQTSLSMQISGMSPQLQYIMPSPSSNAFATNQTHQGSYNTFRLHSPCALYGYNFSTSPKLAASPEKIVSSQGSFLGSSPSGTMTDRQMLPPVEGVHLLSSGGQQSFFDSRTLGSLTLSSSQVSAHMV

SEQ ID NO: 36756 - DNA, 1824 bp, Artificial Sequence
  derived and/or modified sequence
atggctgagaaaagacggggcagcccctgctccatgctctctcttaaggctcatgccttttctgtggaggctttaatcggtgccgagaaacagcagcaactccagaagaaacggcgcaaattaggtgcagaagaagcggccggtgctgtggacgacggaggttgtagtcgtggcgggggagcgggtgaaaagggctcaagtgagggagacgaaggagctgcactaccacctccagccggggcaacatctgggccagcccgatccggagccgaccttgagaggggtgcagctggtgggtgcgaggatggattccagcagggcgcatctcccctggcctccccaggagggagccctaagggcagcccggcacggtccttggcgcggcccggcacccctctccccagccctcaggcccctcgcgttgacctgcagggcgcagagttgtggaaaagattccacgaaattgggacggagatgattattacaaaagccggacgccggatgttccctgcaatgcgagtgaagatttcaggactcgacccacaccagcaatactatatcgctatggacatagtgccagttgataacaaacggtaccgctatgtataccattcctctaaatggatggtcgcaggcaacgctgatagtcctgtgccacccagagtgtacatacatccagattcccccgcttctggggagacatggatgcggcaagtcatctcattcgataaattaaagttaacaaataacgaacttgatgatcagggccacatcattttacatagtatgcataaataccagccacgggtacacgttatccgaaaggactgtggagatgacctgagccccatcaagccagtgccctctggcgaaggggttaaagctttcagcttccctgaaacagtgtttaccacggtgacagcgtaccagaaccagcagatcaccagactaaagatagaccggaaccctttcgcgaagggattccgcgattccggcaggaatcgtatgggcctagaggccctcgtagagtcttacgcattctggcgtccgagtctgcggaccctgaccttcgaggacattcctggcatccccaaacagggaaatgcatcatcttcaacacttctgcaggggacaggaaatggcgtgcccgcaactcacccgcacctgttgagtggctcctcctgctcttccccagcctttcatctgggaccaaatacgagtcaattgtgtagcctggcacctgccgattattcagcttgtgcccggagcggactcaccctcaacagatacagcacctctcttgcagagacctacaatagactaactaaccaggccggagagacattcgccccacctaggaccccttcatacgtcggtgtgagttcctccacctctgtcaacatgtccatgggagggacggacggggatacattttcatgccctcagacaagcctgagcatgcagatttctggtatgagtcctcaactgcagtatataatgccgtccccatctagcaatgcctttgccaccaaccagactcatcagggcagttacaacaccttccgacttcatagtccatgtgccctttatgggtacaactttagcacaagcccgaaactcgctgcatctcccgaaaagattgtcagttcccagggtagcttcctcggatcaagtccatcaggaaccatgaccgacagacagatgttgcccccagttgagggagtccacctgcttagtagcggcggccagcagtcttttttcgacagccggacgttgggttctctcactctctcttcctctcaagtgagtgcccatatggtctag

SEQ ID NO: 36757 - DNA, 1824 bp, Artificial Sequence
  derived and/or modified sequence
atggccgagaagagaagaggcagcccctgcagcatgctgagcctgaaggcccacgccttctctgtggaggccctgattggagctgagaagcagcagcagctgcagaagaagaggaggaagctgggcgctgaggaggccgccggggctgtggatgatggcggctgcagccggggcggcggggccggggagaagggcagcagtgaaggagatgagggcgccgccctgcccccacctgctggggccaccagcggccctgcccggagcggggctgacctggagagaggagctgctgggggctgtgaagatggcttccagcagggcgccagccccctggccagccctgggggcagccccaagggcagccctgcccggagcctggcccggcccggcacccccctgcccagcccccaggccccccgggtggacctgcagggcgctgagctgtggaagcgcttccatgaaattggaacagagatgatcatcaccaaggccggccgcaggatgtttcctgccatgagggtgaagatcagcggcctggacccccaccagcagtactacatcgccatggacatcgtgcctgtggacaacaagcgctaccgctacgtgtaccacagcagcaagtggatggtggccggaaatgctgacagccctgtgcccccccgggtgtacatccacccagacagccctgccagcggggagacctggatgaggcaggtgatcagctttgacaagctgaagctgaccaacaatgagctggatgaccagggccacatcatcctgcacagcatgcacaagtaccagccccgggtgcacgtgatcaggaaggactgtggagatgacctgagccccatcaagcctgtgcccagcggggagggcgtgaaggccttctccttccctgagaccgtcttcaccaccgtgacagcctaccagaaccagcagatcacccggctgaagattgacaggaacccctttgccaagggcttccgggacagcggcaggaacaggatgggcctggaggccctggtggagagctatgccttctggaggcccagcctgcggaccctgacctttgaggacatccctggcatccccaagcagggcaatgccagcagcagcaccctgctgcagggcactggaaatggagtgcctgccacccacccccacctgctgagcggcagcagctgcagcagccctgccttccacctgggccccaacaccagccagctgtgcagcctggccccagctgactacagcgcctgtgcccggagcggcctgaccctgaaccgctacagcaccagcctggccgagacctacaaccggctgaccaaccaggccggggagacctttgccccacccaggacccccagctatgtgggcgtgagcagcagcacctctgtgaacatgtccatgggcggcacagatggagacaccttcagctgcccccagaccagcctgtccatgcagatcagcggcatgagcccccagctgcagtacatcatgcccagccccagcagcaatgcctttgccaccaaccagacccaccagggcagctacaacaccttccggctgcacagcccctgtgccctgtatggctacaacttcagcaccagccccaagctggccgccagccctgagaagatcgtgagcagccagggcagcttcctgggcagcagccccagcggcaccatgacagaccggcagatgctgccccctgtggagggcgtgcacctgctgagcagcggcggccagcagagcttctttgacagcaggaccctgggcagcctgaccctgagcagcagccaggtgtctgcccacatggtgtag

SEQ ID NO: 36758 - DNA, 1824 bp, Artificial Sequence
  derived and/or modified sequence
atggccgagaagcggcggggcagcccctgcagcatgctgagcctgaaagcccatgctttcagcgtggaagccctgattggagcagaaaaacagcagcagctccagaaaaaacgtcgcaagctgggagccgaggaggctgccggcgcagtggatgacggaggctgctctcgtggcggtggcgcaggcgaaaaaggaagctccgaaggcgatgagggcgccgccctgcctcccccagcgggcgccacctccggccccgcccggtccggcgccgacctcgaacggggagccgccggcgggtgtgaggacggctttcagcaaggggcctcaccactcgcctctccagggggctccccaaagggaagccccgcgcgtagcctggctcgaccagggaccccactgccctctccgcaggctccacgcgtcgatttgcagggcgctgagctctggaagcgcttccatgagatcggaaccgagatgataattacaaaggcgggtagacgcatgttcccggcaatgcgcgttaaaatcagtgggctcgacccccatcagcaatattacattgcaatggatatcgtgcctgttgataataagcggtatcgttacgtgtaccattccagcaagtggatggtcgctggcaacgcagactcccctgtgccaccgcgggtgtacatacaccccgactcccctgcctccggggagacctggatgcgacaagtgatctcatttgataaactgaagctcactaacaacgagctggacgatcagggacacatcattctgcacagcatgcacaagtatcagcccagagtccacgtgattcgaaaggactgtggggatgacctttcccctataaaaccggtccccagtggagaaggcgtcaaggcattttcatttcctgaaaccgtgttcacaactgttactgcctatcagaatcaacaaattacccggctgaaaatcgatagaaatccttttgcaaaggggttccgcgattcgggacggaaccgcatggggctggaggcgctggtggagtcttatgccttttggcggccaagcctgagaacactgaccttcgaggacattccaggtattcccaagcaaggcaatgcatcctcttccaccctcctgcagggtacaggcaacggcgtccctgctactcatcctcatttgctaagcggttcttcttgctcatcccccgcttttcacttagggccaaacacatcacagttatgctcattagcccccgcagactactccgcttgcgctcggagcgggctgaccctgaatagatactctaccagcctcgccgaaacgtacaatagactaacaaaccaggctggcgagaccttcgcacctcctagaactccgagctacgtgggagtctccagttcaaccagtgttaacatgagcatgggcggcaccgatggcgacaccttctcatgcccacaaaccagccttagcatgcaaatttccgggatgtctccccagctccagtatatcatgccgtccccttcatccaacgcctttgccaccaaccagacccaccaaggtagttacaacacctttaggctccactctccgtgtgctctttacggctacaacttcagtacgtctcctaagctcgccgcttcgcccgagaagatcgtgtcgtcccagggctcttttctgggatccagtccgtcaggtaccatgacagaccgccagatgctgcccccagtcgaaggggtgcacctgctgagtagtggcggccagcagagcttcttcgattcaaggaccctgggtagtttgaccctgagctcatcgcaggtctctgcccacatggtttag

SEQ ID NO: 36759 - DNA, 4408 bp, Artificial Sequence
  derived and/or modified sequence
ttttttacccatgttagtcctctctggcgcatcagttgaggcagacctcggagcagcaggaggaggtggaaggggtgggagcaaaggagtgcatcagtgagagagcgcgcgagagagacccaggaaaggagacttggccggcgcgtcgccggttcctggatcccaacacaagcgagaaagcggaaacgccaaatctgttttttgcccgcggtggggaagggggcagatctcgggaggccccgagagccttttagtttttggtgggggaagagcgagagcgcgcgtgtgcccgcgtgagtgtatatgagagaggggcgggcgggcgcggggcgggggggatggccgagaagcgaaggggctcgccgtgcagcatgctaagcctcaaggcgcacgctttctcggtggaggcgctgatcggcgccgagaagcagcaacagcttcagaagaagcggcgaaaactgggcgccgaagaggcggcgggggccgtggacgacggaggctgcagccgcggcggcggcgcgggcgaaaagggttcttctgagggagacgaaggcgctgcgctcccgccgccggctggggcgacgtctgggccggctcggagtggcgcagacctggagcgcggagccgcgggcggctgtgaggacggcttccagcagggagcttcccctctggcgtcaccgggaggctcccccaaggggtctccggcgcgctccctggcccggcccgggacccctctgccctcgccgcaggccccgcgggtggatctgcagggagccgagctctggaagcgctttcatgagataggcactgagatgatcatcaccaaggccggcaggcgcatgtttccagcaatgagagtgaagatctctggattagatcctcaccagcaatattacattgccatggatattgtaccagtggacaacaaaagatacaggtatgtttaccacagttcgaaatggatggtggcaggtaatgctgactcgcctgtgccaccccgtgtgtacattcatccagactcgcctgcctcgggggagacttggatgagacaagttatcagcttcgacaagctgaagctcaccaacaatgaactggatgaccaaggccatattattcttcattctatgcacaaataccaaccgcgagtgcacgtcatccgtaaagactgtggagacgatctttctcccatcaagcctgttccatccggggagggagtaaaggcattctcctttccagaaactgtcttcacaaccgtcactgcctatcagaatcagcagattactcgcctgaagatagataggaatccatttgctaaaggcttccgagactccgggcgcaacagaatgggtttggaagccttggtggaatcatatgcattctggcgaccatcactacggactctgacctttgaagatatccctggaattcccaagcaaggcaatgcaagttcctccaccttgctccaaggtactgggaatggcgttcctgccactcaccctcaccttttgtctggctcctcttgctcctctcctgccttccatctggggcccaacaccagccagctgtgtagtctggcccctgctgactattctgcctgtgcccgctcaggcctcaccctcaaccgatacagcacatctttggcagagacctacaacaggctcaccaaccaggctggtgagacctttgccccgcccaggactccctcctatgtgggcgtgagcagcagcacctccgtgaacatgtccatgggtggcactgatggggacaccttcagctgcccacagaccagcttatccatgcagatttcgggaatgtccccccagctccagtatatcatgccatcaccctccagcaatgccttcgccactaaccagacccatcagggttcctataatacttttagattacacagcccctgtgcactatatggatataacttctccacatcccccaaactggctgccagtcctgagaaaattgtttcttcccaaggaagtttcttggggtcctcaccgagtgggaccatgacggatcggcagatgttgccccctgtggaaggagtgcacctgcttagcagtgggggtcagcagagtttctttgactctaggaccctaggaagcttaactctgtcatcatctcaagtatctgcacatatggtctgatgaagcctttaagttaaatgacatttggatctgtctaacatattttctttttcttttttaaaagctatgtggaaagaaactctctgtggtttataaaatgtacatataatagaaaatgaaggctcactgggttttttgactttatcatggtgagattgtaattatctatggtatatatgtatgctgtatatacatagcacatggagtatcacggcccctattgttcccctgtttcatccagttgcacggagtattggcatgcgtgtagtatgtttaagcaaagttctcagactcttttaaaaacaagatggtaaacttaaaacttggcaattatactatccagaagaacacttataacttaatttatcagaaaaatgctctaaacggtttcatacttgatgtattgataaccagcagtaaccagcatgtagagtcttgtgatttctgttattcttggacacagtgtgagaatctaaaatacaaaagccagttgaagtcttagtgttagtcctgaggtatttgtaatcatgaaggatcagctttttcattcctgcttattatttaccacacatactatatgaccttgggtctataaaaaaatcataacccataataattgttattttcttaaggaaggtaaaggagaggcttgtgatttttttttttacactttccattgggcacataagaggttcttattcatctgtagagaacaaatttccagtattttcgattttttgcttattttatatatcaaatagaccattaaagaatgttctataaacatttttaaattccaattttcaccaggggaggaatatgtgatatgagtggaatggcaaaaggaaaataaatccacctcaaattcattgattccaatgagaaatgtctatcttttaaatcaagagtaatactattgttaactataccttatgtttttgtatagtttgtttttaaatttagaatattttttccatcttgctctgagcttcctgaccgatagtatataagtaaaaaaaatgcatttatgctacttatttatatcttgtaattcctacacattgaacccttttccccttcttaaccttgtccgtctgcctgagtctttcccaaaacagatagttcctaggcctgtatggtgttaaataacacggtgaggaatttcagtaggttatctccagcaatctgtcttttgggagctatagtgcaaaggccaaagcccattactataaagaccctcttggaggactaagaaggaagatactaattatgataaaggaactataaaacttttaacctcaacagaatttgtaatgtcagaactggagaaattaaaatcagtattaaattttttaattcctaaaataatatatgcatggttgaagagttaaaaacaagtaactttgagagcacagtatgagataaataaaaaaggctaagaatacatgatgaggcacattccccttctgaggagaaagcgaaataacatgtctgtgcattgacccattcattacatttcatgtatcttaagcaaaagagcatgattttctctcattgctaaaaagagttgctttaactcatccctggatttggtggggaaagggtacaactcctgatttgctgtttcactttgaaacaacacaatttgttagatacttagggagatatactgttgaatttgcacaggatgtgactctgtttatacatattaacaaatttccttttggattccttagcagttcatcaaattagtattaaatttttaaatttaaaactagcatgaagggacatgaaatatttgcagtaggtggatctatgtaagatgtttgggtatggcattaatagcttgacaaagatttggggaaaggtgttaagaatgagtccatctcagccaatagtgcttggtgtataattcaagaacagagagttttccatcttgaaaaaacatggaaagtaatgctctatacccatatgtattaataagagcattttccttcttgccgttgatcatttcagatgataccacaatatgagtataattttttattaatcttttttctggtaaaattttagcaatattgtacaaatgctttttttaggttttactgtaaatattaatcaccacgtcacttcagagactagccttttattgctgaattaaatgacatgcatacattgataattatatatctgtattttattaaaaagtacttaaaattatattaaaatatgttattaaacccttt

SEQ ID NO: 36760 - DNA, 1824 bp, Artificial Sequence
  derived and/or modified sequence
atggccgaaaaacggaggggtagtccctgctctatgctgtcactcaaagcacatgctttttctgtggaagctctgatcggagccgagaagcagcagcagctgcagaaaaagcgacgaaaactaggtgcggaggaggccgcaggcgctgtggacgatggtggctgttcaagaggtggaggagcaggtgaaaagggttcttctgagggagatgagggtgccgcacttcctcctcctgcaggcgcaacgtctgggcctgccagaagtggggcagatttggaacggggtgcggcagggggatgcgaggacggcttccagcagggggcttctcctctggcctctcccggaggaagccccaagggcagccccgcaaggagtctggcacgcccaggcacacccctgccttctccgcaggccccaagggtcgatctgcagggggctgagctttggaagcggttccacgaaatcgggactgaaatgatcatcacaaaggccggtcggcgaatgttccccgcaatgagggttaaaatttctggattagaccctcatcagcagtattacattgcaatggatattgtgcccgttgacaacaagaggtatagatatgtgtatcatagtagcaagtggatggtggcaggaaatgccgattctccagtgcctcccagggtctatatccatcctgatagtccagcttcgggagaaacgtggatgcgccaggtgatctcattcgacaaattgaaactgaccaacaacgagctggacgaccaagggcacatcatcctccacagtatgcacaaatatcagccacgagtgcacgtgattcgcaaggattgtggtgatgacttgtctcccataaagcccgtgccatcaggcgagggcgtcaaagcatttagcttccccgaaacagtctttactaccgtgacagcgtaccagaaccagcaaatcacaaggctgaaaattgaccggaaccctttcgccaaggggttccgggactctgggcgtaacagaatgggactggaggctttggttgagtcctatgccttctggcggccaagtctgagaaccctaacatttgaggacattccaggtatacctaagcagggaaacgccagctcgagcactctgttgcaggggaccggcaatggcgtaccagccacccacccacacctgctgtcaggttctagctgttctagcccagccttccatctggggcctaacacatcgcagctgtgttctctggctcccgcagactactcagcatgtgccaggtctggcctgacgcttaatcgttactctactagccttgcagagacttataatcgcctgactaatcaggcaggagagactttcgcccctccccgaacaccctcatacgtcggagttagttcaagcactagcgtcaacatgtcaatgggtggtaccgatggcgatactttcagctgtccccagacaagcctgtcgatgcagatcagcggaatgagccctcagttgcagtatatcatgccttccccctcctcaaacgctttcgccactaatcagacccaccaaggatcttataacaccttcaggttgcactccccttgcgccttgtacggctataacttttctacttctcctaagctggctgcatccccggagaaaattgtgtcctctcagggaagcttcctggggagtagccccagtggaacaatgaccgacaggcagatgttgccaccagttgagggggtacatctgctgtcctcaggtggtcagcagagcttcttcgattcccgaactctcggtagcctgacactgtcttcaagtcaagtgagcgcacatatggtgtag

SEQ ID NO: 36761 - DNA, 1824 bp, Artificial Sequence
  derived and/or modified sequence
atggccgagaagagaagaggcagcccctgcagcatgctgagcctgaaggcccacgccttcagcgtggaggccctgatcggcgccgagaagcagcagcagctgcagaagaagagaagaaagctgggcgccgaggaggccgccggcgccgtggacgacggcggctgcagcagaggcggcggcgccggcgagaagggcagcagcgagggcgacgagggcgccgccctgcccccccccgccggcgccaccagcggccccgccagaagcggcgccgacctggagagaggcgccgccggcggctgcgaggacggcttccagcagggcgccagccccctggccagccccggcggcagccccaagggcagccccgccagaagcctggccagacccggcacccccctgcccagcccccaggcccccagagtggacctgcagggcgccgagctgtggaagagattccacgagatcggcaccgagatgatcatcaccaaggccggcagaagaatgttccccgccatgagagtgaagatcagcggcctggacccccaccagcagtactacatcgccatggacatcgtgcccgtggacaacaagagatacagatacgtgtaccacagcagcaagtggatggtggccggcaacgccgacagccccgtgccccccagagtgtacatccaccccgacagccccgccagcggcgagacctggatgagacaggtgatcagcttcgacaagctgaagctgaccaacaacgagctggacgaccagggccacatcatcctgcacagcatgcacaagtaccagcccagagtgcacgtgatcagaaaggactgcggcgacgacctgagccccatcaagcccgtgcccagcggcgagggcgtgaaggccttcagcttccccgagaccgtgttcaccaccgtgaccgcctaccagaaccagcagatcaccagactgaagatcgacagaaaccccttcgccaagggcttcagagacagcggcagaaacagaatgggcctggaggccctggtggagagctacgccttctggagacccagcctgagaaccctgaccttcgaggacatccccggcatccccaagcagggcaacgccagcagcagcaccctgctgcagggcaccggcaacggcgtgcccgccacccacccccacctgctgagcggcagcagctgcagcagccccgccttccacctgggccccaacaccagccagctgtgcagcctggcccccgccgactacagcgcctgcgccagaagcggcctgaccctgaacagatacagcaccagcctggccgagacctacaacagactgaccaaccaggccggcgagaccttcgccccccccagaacccccagctacgtgggcgtgagcagcagcaccagcgtgaacatgagcatgggcggcaccgacggcgacaccttcagctgcccccagaccagcctgagcatgcagatcagcggcatgagcccccagctgcagtacatcatgcccagccccagcagcaacgccttcgccaccaaccagacccaccagggcagctacaacaccttcagactgcacagcccctgcgccctgtacggctacaacttcagcaccagccccaagctggccgccagccccgagaagatcgtgagcagccagggcagcttcctgggcagcagccccagcggcaccatgaccgacagacagatgctgccccccgtggagggcgtgcacctgctgagcagcggcggccagcagagcttcttcgacagcagaaccctgggcagcctgaccctgagcagcagccaggtgagcgcccacatggtgtag

SEQ ID NO: 36762 - protein, 214 aa, Artificial Sequence
  derived and/or modified sequence
MEPAREPPSRARPPPPLAARPAPAPAAPRPRSPAEAEARGPEGLLRRSGSGYEGSTSWKAALEDTTTRLLLGAIAVLLFAILVVMSILASKGCIKCEAPCPEDWLLYGRKCYFFSEEPRDWNTGRQYCHTHEAVLAVIQSQKELEFMFKFTRREPWIGLRRVGDEFHWVNGDPFDPDTFTIAGPGECVFVEPTRLVSTECLMTRPWVCSKMAYT

SEQ ID NO: 36763 - DNA, 645 bp, Artificial Sequence
  derived and/or modified sequence
atggagcccgccagagagccccccagcagagccagaccccccccccccctggccgccagacccgcccccgcccccgccgcccccagacccagaagccccgccgaggccgaggccagaggccccgagggcctgctgagaagaagcggcagcggctacgagggcagcaccagctggaaggccgccctggaggacaccaccaccagactgctgctgggcgccatcgccgtgctgctgttcgccatcctggtggtgatgagcatcctggccagcaagggctgcatcaagtgcgaggccccctgccccgaggactggctgctgtacggcagaaagtgctacttcttcagcgaggagcccagagactggaacaccggcagacagtactgccacacccacgaggccgtgctggccgtgatccagagccagaaggagctggagttcatgttcaagttcaccagaagagagccctggatcggcctgagaagagtgggcgacgagttccactgggtgaacggcgaccccttcgaccccgacaccttcaccatcgccggccccggcgagtgcgtgttcgtggagcccaccagactggtgagcaccgagtgcctgatgaccagaccctgggtgtgcagcaagatggcctacacctag

SEQ ID NO: 36764 - DNA, 1359 bp, Artificial Sequence
  derived and/or modified sequence
gccgagtgcgcgtcgggctgggccccgcaccccggtgcaggagcgcgggcgcggcgcggcggagcgccccgcatggagccggcccgggagcccccctcgcgggcccggccgccgccgcccctcgccgcgcgccccgcgcccgcccccgccgcccccaggccgcgttcgcccgcagaggctgaggcccgcggccccgaggggctgctgcggcgatccgggtcgggctacgagggcagcaccagctggaaggcggccttggaggacaccaccacacgcctcctgctgggtgccatcgcggtccttctgttcgccatcttggtggtgatgagcatcttggcttccaagggctgcatcaagtgcgaagcgccctgcccggaggactggctgctctacggaaggaagtgctacttcttttccgaggaacccagagactggaacacaggcaggcagtactgccacacccacgaggcggtgctggctgtgattcagagccagaaggagctggaatttatgttcaagttcacgcggagggagccctggattggactacgcagagttggggacgaattccactgggtcaacggggacccgtttgatccggacacgttcaccatcgcaggtccaggggagtgtgtcttcgtggagcccaccaggctggtgtcgacggagtgtctgatgacccggccctgggtgtgcagcaagatggcctatacttgaggtgggtggggccagaggtggccccgcccctaggcctgtgggaggtgtctggtgtctgctcaagacctgcttccagcggagccgcctgccctctgcaaggcgaagcggtgggtgcgtggcctccgccccaggcccctctcccaggccctggcgctctgagtccctggttcctggcctcctttgtctgcaggcaggtcgtgtggctcagcagttaaatcccatatgctaggtagtgtaggcatctgcccacctacacacacacacatgcataggtacacgcacgcacagacgctgtcccttctgaagctcagtgtccatcctgagccaccccacagatctctctccggccccctagaagccctctcctcactgcagccctggtgctctggggaaggaggggcattgacaggtggtttgactgttcacccagcagccccgcttccccactggtttctctcctggctgccggcggaggtaggctgggaaagcttccccctcacctaggccgggccagccccgccccgggccccagaggtcccctgcatcccccttctttgccttgcctgggttctcaggcagggcccctgctgtgtccgtggtgctgttgtattggtcactaacggaataaagagttaatatctc

SEQ ID NO: 36765 - DNA, 645 bp, Artificial Sequence
  derived and/or modified sequence
atggagcctgccagagagccaccatccagagcaagacctcccccgccgctggccgcccgccccgcccctgctccagcagcaccacgccccagatcacctgccgaagcagaggcacgggggcccgagggcctgttacggaggagtgggagcggctacgagggctcaacctcctggaaggccgctctggaggacactactacaagactgctactgggcgcaattgctgtgctgcttttcgccatcctggtcgtaatgtcaattctagcgtccaagggctgtataaagtgcgaggctccctgcccagaggattggctgctgtatgggagaaagtgttatttctttagtgaggagccaagagattggaacactgggcgtcagtactgccacacccacgaagcggtccttgccgtcattcaaagtcagaaagaactggagttcatgtttaagttcacaaggcgggagccctggataggccttcggcgagtcggggatgaatttcactgggtgaatggggaccccttcgatcccgataccttcaccatcgccgggcccggcgaatgcgtgttcgtggagccaactcggctagtatccaccgagtgtcttatgactcggccttgggtatgttcaaaaatggcatacacgtag

SEQ ID NO: 36766 - DNA, 645 bp, Artificial Sequence
  derived and/or modified sequence
atggagcccgcccgggagccccccagccgggcccggcccccaccacccctggccgcccggcctgccccagccccagctgccccccggcccaggagccctgctgaggccgaggcccggggccctgagggcctgctgcggcgcagcggcagcggctatgagggcagcacctcctggaaggccgccctggaggacaccaccacccggctgctgctgggcgccatcgctgtgctgctgtttgccatcctggtggtgatgagcatcctggccagcaagggctgcatcaagtgtgaggccccctgcccagaggactggctgctgtatggcaggaagtgctacttcttcagcgaggagccccgggactggaacacaggccggcagtactgccacacccatgaagctgtgctggccgtcatccagagccagaaggagctggagttcatgttcaagttcacccggcgggagccctggattggcctgcggcgggtgggagatgagttccactgggtgaatggagacccctttgatcctgacaccttcaccatcgccggccctggagaatgtgtgtttgtggagcccacccggctggtgtccacagaatgtctgatgacccggccctgggtgtgcagcaagatggcctacacctag

SEQ ID NO: 36767 - DNA, 645 bp, Artificial Sequence
  derived and/or modified sequence
atggagcccgcccgggagccccccagccgggcccggccccccccccccctggcagcgagacctgcgcctgctcctgcggcccctagacccaggtccccagctgaagcagaggctcggggacctgagggtctgctaaggcgctctggaagcggctacgagggatccacaagttggaaggccgcattggaggacactacaactcgcctgctcctcggagctattgcggtgctgttgttcgccattctggtggtcatgagtatcctggccagcaagggttgtattaagtgcgaggctccttgtcccgaggattggctgctgtatggacggaagtgctacttcttctccgaggaaccccgggactggaacacaggccggcaatactgtcatacccacgaagcagtattagcggtgatccagtcccaaaaggaactggagtttatgtttaagtttaccagaagagagccttggattggacttaggcgggtgggggatgaattccattgggtgaatggagacccatttgacccggatacatttaccattgccgggcccggagagtgcgttttcgtggaacccactcggctggtctcaaccgagtgcctaatgacccggccttgggtttgttcgaagatggcctacacatag

SEQ ID NO: 36768 - DNA, 645 bp, Artificial Sequence
  derived and/or modified sequence
atggaaccggctcgggaacctccttctagagcaagaccacccccaccccttgctgcacgtccagcccctgcacccgctgcccctcgccctaggtcccccgctgaggctgaagccagagggccagaaggcttactgcgacggagtggtagcggttacgaggggtctacatcctggaaggcagccctggaggataccactaccagactcctgctcggggctattgcagttctgttattcgccatactcgtggtgatgtcaatcctcgcaagtaaggggtgtataaagtgcgaagccccttgccccgaggactggcttttgtacggcagaaagtgttactttttcagtgaggagcctcgagattggaacacgggcaggcaatattgtcatacgcacgaagcagtgctcgcagtgatccagagccaaaaagaattagagtttatgttcaaatttactaggagagagccatggattgggctgagacgcgtcggcgacgaattccactgggtcaatggggacccattcgatccagatactttcactatcgccggacccggagagtgtgtcttcgtggagcctacgaggctggtgtccaccgaatgtcttatgacacgtccctgggtgtgttcaaagatggcctacacctag

SEQ ID NO: 36769 - protein, 974 aa, Artificial Sequence
  derived and/or modified sequence
MAAQGEPGYLAAQSDPGSNSERSTDSPVPGSEDDLVAGATLHSPEWSEERFRVDRKKLEAMLQAAAEGKGRSGEDFFQKIMEETNTQIAWPSKLKIGAKSKKDPHIKVSGKKEDVKEAKEMIMSVLDTKSNRVTLKMDVSHTEHSHVIGKGGNNIKKVMEETGCHIHFPDSNRNNQAEKSNQVSIAGQPAGVESARVRIRELLPLVLMFELPIAGILQPVPDPNSPSIQHISQTYNISVSFKQRSRMYGATVIVRGSQNNTSAVKEGTAMLLEHLAGSLASAIPVSTQLDIAAQHHLFMMGRNGSNIKHIMQRTGAQIHFPDPSNPQKKSTVYLQGTIESVCLARQYLMGCLPLVLMFDMKEEIEVDPQFIAQLMEQLDVFISIKPKPKQPSKSVIVKSVERNALNMYEARKCLLGLESSGVTIATSPSPASCPAGLACPSLDILASAGLGLTGLGLLGPTTLSLNTSTTPNSLLNALNSSVSPLQSPSSGTPSPTLWAPPLANTSSATGFSAIPHLMIPSTAQATLTNILLSGVPTYGHTAPSPPPGLTPVDVHINSMQTEGKKISAALNGHAQSPDIKYGAISTSSLGEKVLSANHGDPSIQTSGSEQTSPKSSPTEGCNDAFVEVGMPRSPSHSGNAGDLKQMMCPSKVSCAKRQTVELLQGTKNSHLHSTDRLLSDPELSATESPLADKKAPGSERAAERAAAAQQNSERAHLAPRSSYVNMQAFDYEQKKLLATKAMLKKPVVTEVRTPTNTWSGLGFSKSMPAETIKELRRANHVSYKPTMTTTYEGSSMSLSRSNSREHLGGGSESDNWRDRNGIGPGSHSEFAASIGSPKRKQNKSTEHYLSSSNYMDCISSLTGSNGCNLNSSFKGSDLPELFSKLGLGKYTDVFQQQEIDLQTFLTLTDQDLKELGITTFGARRKMLLAISELNKNRRKLFESPNARTSFLEGGASGRLPRQYHSDIASVSGRW

SEQ ID NO: 36770 - DNA, 2925 bp, Artificial Sequence
  derived and/or modified sequence
atggccgcacagggggaacctggttatctggccgcccagtccgatcccggttctaatagtgaacggtctaccgattctcccgttccaggctctgaagatgatctggtcgcaggcgctactcttcattcccctgagtggagtgaagaacgattccgggtggacaggaaaaagctggaggctatgctgcaggctgctgccgagggcaaaggtcgctccggcgaggacttcttccaaaaaatcatggaggagaccaacacgcagatcgcatggccgtcgaagctgaaaattggagcgaaatctaaaaaagatccccatatcaaggttagcggaaagaaagaggacgtcaaggaagccaaagagatgataatgtctgtccttgacacaaagagcaaccgggttaccctaaaaatggacgtgagccatacggaacactcccatgtgattggcaaaggcggaaacaacattaaaaaagtgatggaagagactgggtgccacatccatttcccggattctaacaggaataaccaagccgaaaaatcaaaccaggtctccattgcagggcaacctgcgggcgtggagtcagctagggtcagaatcagagagctgttacccctggttttgatgtttgagcttcctattgctggcatactgcagccagtccctgatcctaacagcccatcaatccagcatatttcacagacttataacatcagcgtttcctttaagcagcgctcccggatgtatggagctacagtgattgtgaggggcagccagaataacacgtctgcagtgaaggagggcactgcgatgctgcttgagcatctcgctggctctttggctagcgctatacctgttagcacgcagctagatattgccgctcagcaccacttgttcatgatgggaaggaatggatcaaatataaagcacatcatgcaacggactggcgcccagattcacttcccagatccatcaaaccctcagaaaaaaagtaccgtataccttcagggcacgattgaatccgtatgcttggcacggcaatatctcatgggatgcttgcccctcgttcttatgttcgatatgaaggaagagatagaagtcgacccacaattcattgcacagttaatggagcagttggatgtcttcattagcatcaagccaaaacctaagcagccaagtaagagcgtcatcgttaagtctgtagaacgaaatgcattgaatatgtatgaggctagaaaatgcctgttgggtctcgaaagctcaggagtcacaatcgccacgtcacccagccctgccagttgtccagcagggttggcatgccccagcctggacattctagcatctgccggccttggcctcacaggtttgggtctcttaggcccaactacgctcagcctaaatactagcaccactcccaacagcctgttgaatgcgctaaacagtagcgtctcgcctttgcagtctccctcctcaggcacccccagccccaccctgtgggctcccccattagccaataccagtagcgcaacaggcttcagcgccattccccatctgatgattccgagcacggcgcaggctacattaactaacattctgctcagcggcgtccctacctatggtcacaccgcacccagtccaccacccgggctgactcctgtcgacgtgcatatcaattctatgcaaacagagggaaaaaagatctcagctgcccttaatggtcatgcccagagccccgacattaagtacggcgcaatctccaccagctcactcggggaaaaagtgctctcggcgaaccacggagatccgagtattcagacaagtggtagtgaacagacttcacccaaatcttctcctacagaggggtgtaacgacgcatttgtcgaagtaggcatgcctagaagtccttcgcattccgggaatgctggagacttgaagcaaatgatgtgtcctagtaaggtgagttgtgctaagcgacagacagtggagctgcttcagggaactaagaattcgcaccttcatagcacagacaggctgctaagcgaccccgagctgtcagctactgaaagtccccttgccgacaaaaaagcacccggaagcgagcgagccgcggaaagggctgctgccgcacaacagaattcagaaagggctcacctggccccccgatcatcttatgtgaacatgcaagcgttcgattatgaacagaagaagttacttgctacaaaagccatgctgaaaaagcctgtcgtgacagaagtgagaacccccacaaacacctggtcagggctaggattctccaaatccatgcccgccgaaaccatcaaggaactcagacgcgcaaaccatgttagttataagcctacaatgaccaccacatacgaggggtcctctatgtcacttagtcgttcgaactctagggagcatctcgggggagggtccgagtccgacaactggcgggatcgcaatggaatcggcccaggctctcacagcgagtttgccgcctctatcgggtccccaaagaggaagcagaataaaagtactgagcattacctgtcttcatccaactacatggactgcatatctagccttacgggaagcaacggttgtaacctcaattccagtttcaaagggtctgatctgcccgagctgttctccaaactaggactagggaagtatacagacgtgtttcagcagcaggagatcgatctgcagaccttcctgacccttactgaccaggatctgaaggagctggggattaccacattcggggctagaaggaaaatgttgttggcgatcagcgagctgaacaagaataggagaaaactgtttgaaagtcccaacgcccggacttccttcctggagggcggagcttcaggtaggctgccaaggcagtaccactccgacatcgcttctgtgtcgggaaggtggtag

SEQ ID NO: 36771 - DNA, 2925 bp, Artificial Sequence
  derived and/or modified sequence
atggccgcccagggcgagcccggctacctggccgcccagagcgaccccggcagcaacagcgagaggagcacagacagccctgtgcccggctctgaagatgacctggtggccggggccaccctgcacagccctgagtggagcgaggagcgcttccgggtggacaggaagaagctggaggccatgctgcaggccgctgctgagggcaagggccgcagcggggaggacttcttccagaagatcatggaggagaccaacacccagatcgcctggcccagcaagctgaagatcggggccaagagcaagaaggacccccacatcaaggtgtctgggaagaaggaggatgtgaaggaggccaaggagatgatcatgtctgtgctggacaccaagagcaacagagtgaccctgaagatggatgtgagccacacagagcacagccacgtgattggcaagggcggcaacaacatcaagaaggtgatggaggagaccggctgccacatccacttcccagacagcaacagaaacaaccaggccgagaagagcaaccaggtgtccattgctggccagcctgctggggtggagagcgcccgggtgcgcatccgggagctgctgcccctggtgctgatgtttgagctgcccatcgccggcatcctgcagcctgtgcctgaccccaacagccccagcatccagcacatcagccagacctacaacatctctgtgtccttcaagcagaggagcaggatgtacggggccaccgtgattgtgcggggcagccagaacaacaccagcgctgtgaaggagggcacagccatgctgctggagcacctggccggcagcctggccagcgccatccctgtgtccacccagctggacattgctgcccagcaccacctgttcatgatgggcagaaatggcagcaacatcaagcacatcatgcagaggactggagcccagatccacttcccagaccccagcaacccccagaagaagagcacagtgtacctgcagggcaccatcgagagcgtgtgcctggcccggcagtacctgatgggctgcctgcccctggtgctgatgtttgacatgaaggaggagattgaggtggacccccagttcatcgcccagctgatggagcagctggatgtgttcatcagcatcaagcccaagcccaagcagcccagcaagagcgtcatcgtgaagtctgtggagagaaatgccctgaacatgtatgaggccaggaagtgcctgctgggcctggagagcagcggcgtgaccatcgccaccagccccagccctgccagctgcccagctggcctggcctgccccagcctggacatcctggccagcgctggcctgggcctgaccggcctgggcctgctgggccccaccaccctgagcctgaacaccagcaccacccccaacagcctgctgaatgccctgaacagctctgtgagccccctgcagagccccagcagcggcacccccagccccaccctgtgggccccacccctggccaacaccagcagcgccaccggcttcagcgccatcccccacctgatgatccccagcacagcccaggccaccctgaccaacatcctgctgtctggagtgcccacctacggccacacagcccccagccccccacctggcctgacccctgtggatgtgcacatcaacagcatgcagacagagggcaagaagatctctgctgccctgaatggacatgcccagagcccagacatcaagtatggagccatcagcaccagcagcctgggggagaaggtgctgagcgccaaccacggggaccccagcatccagaccagcggcagcgagcagaccagccccaagagcagccccacagagggctgcaatgatgcctttgtggaggtgggcatgcccaggagccccagccacagcggaaatgctggggacctgaagcagatgatgtgccccagcaaggtgtcctgtgccaagaggcagacagtggagctgctgcagggcaccaagaacagccacctgcacagcacagaccggctgctgagtgaccctgagctgagcgccacagagagccccctggccgacaagaaggcccctggcagcgagagagctgctgagagagctgctgctgcccagcagaacagcgagcgggcccacctggcccccaggagcagctatgtgaacatgcaggcctttgattatgagcagaagaagctgctggccaccaaggccatgctgaagaagcctgtggtgacagaggtgaggacccccaccaacacctggagcggcctgggcttcagcaagtccatgcctgctgagaccatcaaggagctgcggcgggccaaccacgtgtcctacaagcccaccatgaccaccacctatgagggcagctccatgagcctgagccgcagcaacagccgggagcacctgggcggcggcagcgagagtgacaactggagggacagaaatggcatcggccctggcagccacagcgagtttgctgccagcatcggcagccccaagaggaagcagaacaagagcacagagcactacctgagcagcagcaactacatggactgcatcagcagcctgaccggcagcaatggctgcaacctgaacagcagcttcaagggcagtgacctgcctgagctgttcagcaagctgggcctgggcaagtacacagatgtgttccagcagcaggagattgacctgcagaccttcctgaccctgacagaccaggacctgaaggagctgggcatcaccaccttcggggcccggaggaagatgctgctggccatcagcgagctgaacaagaacagaaggaagctgtttgagagccccaatgcccggaccagcttcctggagggcggggccagcggccgcctgccccggcagtaccacagcgacatcgcctctgtgtctggccgctggtag

SEQ ID NO: 36772 - DNA, 2925 bp, Artificial Sequence
  derived and/or modified sequence
atggccgcccagggcgagcccggctacctggccgcccagagcgaccctggaagcaatagtgagcggagtacagattctcccgtccctggcagcgaggatgacctggtggctggggcaaccctgcactcacctgagtggtccgaagaacggttccgcgtcgatagaaaaaagttagaggccatgctccaagcggccgccgaaggaaaaggtcgcagtggcgaggacttcttccagaaaattatggaggaaactaacactcagattgcgtggcccagcaagctgaagataggcgccaaatctaagaaagacccacacattaaagtctctggaaagaaagaggatgtgaaagaagccaaggaaatgattatgtccgtgctggatacaaagtcaaacagggtgactttaaagatggacgtgtcccacacagagcacagccacgtgattggcaaaggtggtaataatattaaaaaagtgatggaagaaaccggttgtcacatacattttcctgattctaaccgcaataaccaagccgaaaagagtaatcaggtttctatcgccggtcaacctgcgggcgtggaaagcgccagagtacgaattcgtgaactgctccccctcgttctgatgtttgaactacctattgctggaatactccagcccgttcccgacccaaattccccgagcatccagcatatttcacagacgtataatatatcagtgtcctttaaacagcggtcaagaatgtatggggccacggtgatagtccgcggatctcagaacaacactagtgcggttaaagaaggcaccgccatgcttctggagcacctggctgggtccttggcaagcgcgatccccgtttccacacagctggacatcgctgcccagcaccacttgttcatgatgggacgtaacggcagtaatataaaacacatcatgcagagaactggcgcacagatacacttccctgatccctctaacccccagaagaaatctacagtgtacttacagggaactatcgagtccgtatgcctggctcgccagtatctgatgggctgtttacccctggtgctgatgttcgacatgaaagaagaaatagaagtggacccacagtttatagcgcagctgatggaacagctcgacgtgttcatttctattaagccaaagcctaaacagccttcaaagagcgttatcgtaaagtctgtggagcggaatgctctgaatatgtatgaagcaagaaaatgcctgcttggacttgagtccagcggggtgactattgccacttcccccagtcctgccagctgcccagccggattggcctgtcctagcctcgatattttggcttcagctgggttaggactcaccggcttgggcctgctcggacccaccaccctttctctgaacacctcaactacacctaacagtcttctgaacgcactgaattcgtcagtgtcacctctgcaatctccatcctcaggaacgcccagtccgacactgtgggcccctcctctggctaatacaagctccgcgaccggcttcagcgcgatccctcacctgatgatccccagcaccgcccaggcgacccttacaaatattcttttgagtggagtaccaacttatggccacacggctccaagcccgccacctggcctgacccctgtggacgtacatatcaactcaatgcaaacggaaggtaagaaaattagtgctgcccttaacgggcatgctcagtcccccgatattaaatacggagctattagcacctcctctttaggtgagaaagtgcttagcgccaaccacggcgatccttcaattcagacttctggtagtgaacagacgtctcccaagtcctctcctacggagggttgcaatgacgcgttcgtggaagtgggcatgccaaggtcaccctctcactctggtaacgccggagacctgaagcaaatgatgtgtccatctaaggtgagttgtgccaaacggcaaacggtggagctccttcagggcaccaagaatagccatctgcactcaactgaccgcttgctttccgaccccgagttgagcgcaaccgaaagccctctcgctgacaaaaaggcacccggatccgagcgggcagcggaacgggccgccgccgctcaacagaactccgaacgggcccacctggccccccggagctcgtatgtcaatatgcaggcattcgattacgagcagaagaaacttctggccaccaaggcaatgctgaagaaaccagtcgtaacagaagttcgcacccccaccaatacgtggtccggcctgggattcagcaagtctatgcccgcggaaactatcaaagagttgcgaagggcaaaccacgtaagctataaacccaccatgacaacaacctatgagggatcaagtatgtccctgagcagatctaacagcagagaacacctgggaggggggagtgagtctgacaattggcgcgaccggaatggcatcggtcctgggtctcattccgaattcgccgcaagtatcggcagcccaaagagaaagcaaaataaaagcaccgaacattacctaagttcaagcaactacatggactgcattagtagtttgacaggttccaacgggtgcaacctgaacagttctttcaaaggctccgatcttccagagctttttagcaagttaggccttgggaaatacactgacgttttccaacagcaggaaatcgacttacagactttcctgaccctgactgaccaggaccttaaggagttgggcatcaccacatttggcgcccgtcgcaagatgctgcttgccatatcagaactgaataaaaaccgacggaagctgtttgagagccccaacgccagaacgtcattcctggagggcggtgcaagtggtaggctgccccgtcaatatcattccgatatcgcgagcgtgtccggacgatggtag

SEQ ID NO: 36773 - DNA, 2925 bp, Artificial Sequence
  derived and/or modified sequence
atggcagctcaaggggagcctggctacttagccgctcagagtgatcccggatcaaacagcgagcggtctaccgactcaccagttcctggctccgaggacgatttagtggccggtgccactctccattccccagaatggagcgaggaacggttcagagtggatcgtaagaaacttgaggctatgttgcaggcggctgccgagggtaagggccgatctggagaggatttcttccagaagattatggaggagacaaatacccagattgcatggccgtccaagcttaagatcggcgcaaagtccaagaaggatcctcacattaaggtgtcaggcaaaaaagaggacgtgaaagaagccaaagagatgattatgtcagttctggatactaagtcaaaccgggtgacacttaaaatggacgtgtcccacacagaacactcccatgtgattggaaaaggtggaaacaacatcaagaaagtcatggaagagacaggatgtcatatacatttccccgactccaacagaaataatcaagccgaaaaaagcaaccaagtgagtattgcaggtcagccagctggggtcgagtctgctagggtaaggatacgagagttactgcctctcgtactgatgttcgagctgcccatcgctggcatcttacagcccgtgccagacccaaattccccaagcattcagcacatatcccagacctacaatatatccgtgagcttcaagcagcggagcagaatgtatggcgctactgtcattgttcggggttctcagaacaacacctccgctgtcaaagagggcacagcaatgctcctggagcatctggccggatcccttgctagcgctatacctgtgtccacccagctggatatcgccgctcagcaccacctgttcatgatgggacgcaatggctccaatatcaaacatatcatgcagaggaccggtgcacaaattcatttccctgacccctccaaccctcagaagaagtctacagtttatctgcaaggcaccattgagtctgtgtgcctggcccgacaatatctgatgggctgtctgcccctggtactaatgtttgacatgaaagaggagattgaagtggatccacaatttatcgcacagttgatggagcagttagacgtcttcatctcaattaagccaaagcctaagcaaccctcgaagagtgtcattgtgaagtccgtcgaacgtaacgccctcaatatgtatgaggcaaggaagtgtctcctgggcctggagtcctccggtgtgactatcgcaacttcgccttctccagctagttgtccagccggactggcgtgccccagtctcgatatccttgcttccgctggccttggtctgacagggctgggactgctcggtcccacaacattgagtttaaatacatcaaccacacccaattcccttttaaatgctctgaacagttcagtttccccactgcaaagcccatcttccggaaccccaagcccgactctgtgggcgcctcccctagctaacacttctagcgctacggggtttagcgcaattccccatctcatgatcccgtccaccgcgcaagcgacactgactaatatactgctgagcggggttcccacgtacggtcacactgcacctagtcccccacccggacttactccagtggatgtgcacattaactcaatgcagaccgaaggcaagaagatttcggcggctctgaacggtcatgcccagtctcctgatatcaaatatggggctatcagcacatccagtctcggcgaaaaggtgctatcagcaaaccacggagacccatctattcaaacatccgggtcggagcagacctctccgaagtcctcccctacagaaggctgcaacgacgcttttgtcgaggtcggaatgcctagatccccgtcccacagcggcaatgctggggatctaaagcaaatgatgtgcccatccaaagtcagttgtgctaagagacagacagtggagctgttgcaaggcaccaagaattcacatctccattccacggaccgcctgctcagtgaccccgagttaagcgccacagagagcccactagcagataaaaaggccccaggctccgagcgcgctgcggagagagccgcagcggctcagcaaaactcggagcgcgctcatctggctccaagaagctcctacgtcaacatgcaggccttcgactacgaacagaagaagctcctggccaccaaggcaatgctgaagaagcctgtcgtcacagaagtgcgtacaccaacaaacacgtggagcgggctcggcttctctaagtctatgcccgcagaaaccattaaggaactgagacgtgccaaccacgtgagctacaagcccaccatgactacaacatacgaaggctccagcatgagcctaagtagaagcaattctcgggagcacctggggggagggtccgagagcgacaactggagagatcgtaatgggatcggtcctggaagccatagcgagttcgccgcaagtattgggtcccccaaacggaagcagaataagagcaccgaacactacctatcttcatctaattacatggattgcattagcagtttaacagggtcaaatggctgtaatctgaactccagcttcaaaggttccgacctgcccgagctgttctcaaagctcgggttagggaaatatacagatgtgttccagcagcaggaaatcgacctgcagacattcctcactctgactgatcaggacctgaaagagttgggtataacaacattcggggctagaagaaagatgctgctcgccatcagtgagctaaataaaaatcgacggaaacttttcgagtctccgaacgccagaacctccttccttgaaggcggagccagtggtagactccctcggcagtatcactccgatattgcctctgtctccgggcgatggtag

SEQ ID NO: 36774 - DNA, 5473 bp, Artificial Sequence
  derived and/or modified sequence
caccatggccgcccagggagagcccggctacctggcggcgcagtcggaccccggctccaacagcgagcgcagcaccgactccccagtgcccggctccgaggacgacttggtcgccggggcgaccctgcacagcccggagtggagcgaggagcgcttccgcgtggacaggaagaaacttgaggccatgttacaagctgctgctgaagggaaaggcagaagtggggaagacttttttcaaaagatcatggaggaaacaaatacgcagattgcttggccatcaaaactgaagatcggagccaaatccaagaaagatccccatattaaggtttctggaaagaaagaagatgttaaagaagccaaggaaatgatcatgtctgtcttagacacaaaaagcaatcgagtcacactgaagatggatgtttcacatacagaacattcacatgtaatcggcaaaggtggcaacaatattaaaaaagtgatggaagaaaccggatgccatatccactttccagattccaacaggaataaccaagcagaaaaaagcaaccaggtatctatagcgggacaaccagcaggagtagaatctgcccgagttagaattcgggagctgcttcctttggtgctgatgtttgagctaccaattgctggaattcttcaaccggttcctgatcctaattccccctctattcagcatatatcacaaacgtacaatatttcagtatcatttaaacagcgttcccgaatgtatggtgctactgtcatagtacgagggtctcagaataacactagtgctgtgaaggaaggaactgccatgctgttagaacatcttgctgggagcttagcatcagctattcctgtgagcacacaactagatattgcagctcaacatcatctctttatgatgggtcgaaatgggagcaacatcaaacatatcatgcagagaacaggtgctcagatccactttcctgatcccagtaatccacaaaagaaatctaccgtctacctccagggcaccattgagtctgtctgtcttgcaaggcaatatctcatgggttgtcttcctcttgtgttgatgtttgatatgaaggaagaaattgaagtagatccacaattcattgcgcagttgatggaacagcttgatgtcttcatcagtattaaaccaaagcccaaacagccaagcaagtctgtgattgtgaaaagtgttgagcgaaatgccttaaatatgtatgaagcaaggaaatgtctcctcggacttgaaagcagtggggttaccatagcaaccagtccatccccagcatcctgccctgccggcctggcatgtcccagcctggatatcttagcttcagcaggccttggactcactggactaggtcttttgggacccaccaccttatctctgaacacttcaacaaccccaaactcactcttgaatgctcttaatagctcagtcagtcctttgcaaagtccaagttctggtacacccagccccacattatgggcacccccacttgctaatacttcaagtgccacaggtttttctgctataccacaccttatgattccatctactgcccaagccacattaactaatattttgttgtctggagtgcccacctatgggcacacagctccatctccccctcctggcttgactcctgttgatgtccatatcaacagtatgcagaccgaaggcaaaaaaatctctgctgctttaaatggacatgcacagtctccagatataaaatatggtgcaatatccacttcatcacttggagaaaaagtgctgagtgcaaatcacggggatccgtccatccagacaagtgggtctgagcagacatctcccaaatcaagccccactgaaggttgtaatgatgcttttgttgaagtaggcatgcctcgaagtccttcccattctgggaatgctggtgacttgaaacagatgatgtgtccctccaaggtttcctgtgccaaaaggcagacagtggaactattgcaaggcacgaaaaactcacacttacacagcactgacaggttgctctcagaccctgaactgagtgctaccgaaagccctttggctgacaagaaggctccagggagtgagcgcgctgcagagagggcagcagctgcccagcaaaactccgaaagggcccaccttgctccacggtcatcatatgtcaacatgcaggcatttgactatgaacagaagaagctattagccaccaaagctatgttaaagaaaccagtggtgacggaggtcagaacgcccacaaatacctggagtggcctgggtttttctaaatccatgccagctgaaactatcaaggagttgagaagggccaatcatgtgtcctataagcccacaatgacaaccacttatgagggctcatccatgtccctttcacggtccaacagtcgtgagcacttgggaggtggaagcgaatctgataactggagagaccgaaatggaattggacctggaagtcatagtgaatttgcagcttctattggcagccctaagcgtaaacaaaacaaatcaacggaacactatctcagcagtagcaattacatggactgcatttcctcgctgacaggaagcaatggctgtaacttaaatagctctttcaaaggttctgacctccctgagctcttcagcaaactgggcctgggcaaatacacagatgttttccagcaacaagagatcgatcttcagacattcctcactctcacagatcaggatctgaaggagctgggaataactacttttggtgccaggaggaaaatgctgcttgcaatttcagaactaaataaaaaccgaagaaagctttttgaatcgccaaatgcacgcacctctttcctggaaggtggagcgagtggaaggctaccccgtcagtatcactcagacattgctagtgtcagtggccgctggtagcagcaccctcttggcacatgcccgctgactaactgtaaagtggacacaggagatgtatgaacagccttcacagcacaccatccttagcactctgggtgtctggtatcaggaccaaagcattttattcgcacctgtactttatggcaaaaaggaagaagagagagaagatgttcttatgatgtcatacagaacaccaaatatggattacttttttaaaatggcagttggacagaatttgcaatataaggatagggctttatttcctgtttttatttacctatataacatatgcactgatgatttttttttttttttttttttttttttttttacttaaaatgaaggatgaattgacatctgggatgccagaagacttagaagttattttgtttgcttgttttgtttgggtatttggggatttttaaaaaataatcaaagtggaattttctggtactgctttaaaataattattgtggtctttcagcactttacacgttctaatttcttgtcctatggaagttctcgctgtctccatctctctcatttttgtgtcacctaatatgttggtacagataagagttagtcacatttttctgactgcatcaaacttttatttgaaatggtactggatcttagtttctgtgcagaatattctgtgattttgggaaatgtaagtgagtccacttgcttctggaccaattctgtttcatgtatgttagcatcctagaaacacctagcaatggacctagttcacagtaataggtgcaaagaaagaccaaatggactttgcagtattaaccctttgcagtcgtcatacttagctgctgcctgtaatgctaaaatgattttaatggttgtctggaggcaaagggctgttttttagtatattgccactaaaggacatttatttatatcaaacttttatttttagatattataagcatacagtacataattgatgaaattgatatttactagagatttatggtagagaatggacgacattcaataactggagcccgagattgtcactttatttaaaaagacaaataatcatctgacaagacagcactgttgccattataaggagaaatagattacaatccttatcatgtacacgttagctatgttccgtatggccacaggactttcctgaaaccgtatctgtctgcttgaagtagacttatgtttgttgagaatgaacaggcttatttgagcctccagggtggcagttcataaagacagctaagttctgaaggaaaaaaaaaatatatctttttaagtggctagagtcattattacaatcttatactgtgaaagtccaagaaatcaggcaacattgtttcctgggtcttttcagagatcttatagatttatgaagtgtttttaatccatgaagaaacactaaagtgcctttctttcttcaaagcaatattatttccaagtatattaatttgttagaaaactttcccataggaaatgttgtcaagttacctgtactgtaaagagttatttatgttcagtagtcaagattttctacatggacataaaccactctcacgtgctctcagcagaaggcattagataagcatatacaagaattgggtacttttatacaaatatgggataagaaatacttgcctgacacttttccatggctgagtctgaccattacagtaagaacaagaattgaagaggcattttgcacacagaaacattctcactttaaaaaatggtattggttaccttgaaggcatagataatgggcctgtcataaaattatcaattataactggcaccgagggactgccctttttaagctaaactaagccttatctgcttaaggatgttgaactgaatcactccctttactcatcctgtgcatatgtgtacaaatggtcatgtggatcatgtgatgatcatccatcttatttgattgtattaatgcatcatgctaaacatgtagtacaggttaacaataccagatttatgtcctgttcaacaactcagtactctaaatgttgttatgcttttaataagaccttcccagataataatcttggagctcttttcccagctgtctaccatgcatttgcaacaggaggaagatgtaatgaatatgcagtattaagttgatttatgaacagtgctttgatatgccaaagggaaaactgtcccacttaaattagattaagtagggtggctaaaaataaataaaaacactggaaattctttctctcactttctcttgatgcaatgaagggaatatgacactacagtatacagagttgttgttatatgatgcacaaaatattttgatgatttgaataaatgttaacttttaatctgcgccttaataatgactggttatctgtaaatatagaacagatacagattgtatttttctgtgggtttttgtccttttagtgatttttttccaaaaacgagagatggaattaacattgaaaatgggaaatttttctaactgaatcaattgttacatgaaaaataaatttatataacccctttgtattgctcttgcta

SEQ ID NO: 36775 - DNA, 2925 bp, Artificial Sequence
  derived and/or modified sequence
atggccgcccagggcgagcccggctacctggccgcccagagcgaccccggcagcaacagcgagagaagcaccgacagccccgtgcccggcagcgaggacgacctggtggccggcgccaccctgcacagccccgagtggagcgaggagagattcagagtggacagaaagaagctggaggccatgctgcaggccgccgccgagggcaagggcagaagcggcgaggacttcttccagaagatcatggaggagaccaacacccagatcgcctggcccagcaagctgaagatcggcgccaagagcaagaaggacccccacatcaaggtgagcggcaagaaggaggacgtgaaggaggccaaggagatgatcatgagcgtgctggacaccaagagcaacagagtgaccctgaagatggacgtgagccacaccgagcacagccacgtgatcggcaagggcggcaacaacatcaagaaggtgatggaggagaccggctgccacatccacttccccgacagcaacagaaacaaccaggccgagaagagcaaccaggtgagcatcgccggccagcccgccggcgtggagagcgccagagtgagaatcagagagctgctgcccctggtgctgatgttcgagctgcccatcgccggcatcctgcagcccgtgcccgaccccaacagccccagcatccagcacatcagccagacctacaacatcagcgtgagcttcaagcagagaagcagaatgtacggcgccaccgtgatcgtgagaggcagccagaacaacaccagcgccgtgaaggagggcaccgccatgctgctggagcacctggccggcagcctggccagcgccatccccgtgagcacccagctggacatcgccgcccagcaccacctgttcatgatgggcagaaacggcagcaacatcaagcacatcatgcagagaaccggcgcccagatccacttccccgaccccagcaacccccagaagaagagcaccgtgtacctgcagggcaccatcgagagcgtgtgcctggccagacagtacctgatgggctgcctgcccctggtgctgatgttcgacatgaaggaggagatcgaggtggacccccagttcatcgcccagctgatggagcagctggacgtgttcatcagcatcaagcccaagcccaagcagcccagcaagagcgtgatcgtgaagagcgtggagagaaacgccctgaacatgtacgaggccagaaagtgcctgctgggcctggagagcagcggcgtgaccatcgccaccagccccagccccgccagctgccccgccggcctggcctgccccagcctggacatcctggccagcgccggcctgggcctgaccggcctgggcctgctgggccccaccaccctgagcctgaacaccagcaccacccccaacagcctgctgaacgccctgaacagcagcgtgagccccctgcagagccccagcagcggcacccccagccccaccctgtgggccccccccctggccaacaccagcagcgccaccggcttcagcgccatcccccacctgatgatccccagcaccgcccaggccaccctgaccaacatcctgctgagcggcgtgcccacctacggccacaccgcccccagccccccccccggcctgacccccgtggacgtgcacatcaacagcatgcagaccgagggcaagaagatcagcgccgccctgaacggccacgcccagagccccgacatcaagtacggcgccatcagcaccagcagcctgggcgagaaggtgctgagcgccaaccacggcgaccccagcatccagaccagcggcagcgagcagaccagccccaagagcagccccaccgagggctgcaacgacgccttcgtggaggtgggcatgcccagaagccccagccacagcggcaacgccggcgacctgaagcagatgatgtgccccagcaaggtgagctgcgccaagagacagaccgtggagctgctgcagggcaccaagaacagccacctgcacagcaccgacagactgctgagcgaccccgagctgagcgccaccgagagccccctggccgacaagaaggcccccggcagcgagagagccgccgagagagccgccgccgcccagcagaacagcgagagagcccacctggcccccagaagcagctacgtgaacatgcaggccttcgactacgagcagaagaagctgctggccaccaaggccatgctgaagaagcccgtggtgaccgaggtgagaacccccaccaacacctggagcggcctgggcttcagcaagagcatgcccgccgagaccatcaaggagctgagaagagccaaccacgtgagctacaagcccaccatgaccaccacctacgagggcagcagcatgagcctgagcagaagcaacagcagagagcacctgggcggcggcagcgagagcgacaactggagagacagaaacggcatcggccccggcagccacagcgagttcgccgccagcatcggcagccccaagagaaagcagaacaagagcaccgagcactacctgagcagcagcaactacatggactgcatcagcagcctgaccggcagcaacggctgcaacctgaacagcagcttcaagggcagcgacctgcccgagctgttcagcaagctgggcctgggcaagtacaccgacgtgttccagcagcaggagatcgacctgcagaccttcctgaccctgaccgaccaggacctgaaggagctgggcatcaccaccttcggcgccagaagaaagatgctgctggccatcagcgagctgaacaagaacagaagaaagctgttcgagagccccaacgccagaaccagcttcctggagggcggcgccagcggcagactgcccagacagtaccacagcgacatcgccagcgtgagcggcagatggtag

SEQ ID NO: 36776 - protein, 166 aa, Artificial Sequence
  derived and/or modified sequence
MTAGTVVITGGILATVILLCIIAVLCYCRLQYYCCKKDESEEDEEEPDFAVHSHLPPLHSNRNLVLTNGPALYPTASTSFSQKSPQARALCRSCSHCEPPTFFLQEPPEEEEDVLNGGERVLYKSVSQEDVELPPGGFGGLQALNPNRLSAMREAFARSRSISTDV

SEQ ID NO: 36777 - protein, 166 aa, Artificial Sequence
  derived and/or modified sequence
MTAGTVVITGGILATVILLCIIAVLCYCRLQYYCCKKDESEEDEEEPDFAVHSHLPPLHSNRNLVLTNGPALYPTASTSFSQKSPQARALCRSCSHCEPPTFFLQEPPEEEEDVLNGGERVLYKSVSQEDVELPRGAFGGLQALNPNRLSAMREAFARSRSISTDV

SEQ ID NO: 36778 - DNA, 501 bp, Artificial Sequence
  derived and/or modified sequence
atgaccgccggcaccgtggtgatcaccggcggcatcctggccaccgtgatcctgctgtgcatcatcgccgtgctgtgctactgcagactgcagtactactgctgcaagaaggacgagagcgaggaggacgaggaggagcccgacttcgccgtgcacagccacctgccccccctgcacagcaacagaaacctggtgctgaccaacggccccgccctgtaccccaccgccagcaccagcttcagccagaagagcccccaggccagagccctgtgcagaagctgcagccactgcgagccccccaccttcttcctgcaggagccccccgaggaggaggaggacgtgctgaacggcggcgagagagtgctgtacaagagcgtgagccaggaggacgtggagctgccccccggcggcttcggcggcctgcaggccctgaaccccaacagactgagcgccatgagagaggccttcgccagaagcagaagcatcagcaccgacgtgtag

SEQ ID NO: 36779 - DNA, 589 bp, Artificial Sequence
  derived and/or modified sequence
gctgttgatggagaagggggcggatgacagccgggaccgtggtcatcaccgggggcatcttggcgactgtgattttgctctgcatcatcgctgttctgtgctactgccggctccagtactactgctgcaagaaggacgagtcggaggaggacgaggaggaaccagacttcgccgttcactcgcacctgcccccgctgcactccaaccgcaacctggtgctgaccaacgggccggcgctctaccccaccgcctccacctccttcagccagaagtccccgcaggcccgcgccctctgccgcagctgctcccactgcgagccccccaccttcttcctgcaggagccgccggaggaggaagaggacgtgctgaacggcggggagcgcgtgctctacaagagcgtgagccaggaggacgtggagctgcccccggggggcttcgggggcctgcaggcgctcaaccccaaccgcctctcagccatgcgggaggccttcgccaggagccgcagcatcagcaccgacgtgtgacctgggcccgcccccgggatcctggccttgaaggtcctgagacaatggggggattcctttggcac

SEQ ID NO: 36780 - DNA, 811 bp, Artificial Sequence
  derived and/or modified sequence
cccttctgccagcccacccccagccgggctctggataacatctcggagaccaaccgcggcagcacagggcagccgagcacttcctcgtctgtttattactgaacgcaggcatctgggagcccgcggagcatgaaattaggaacaaatgtgcaggaggtctagacaggaactctgcgggctgctctcctccgatcgaggacgccggggcccttgggcttccaggctgttgatggagaagggggcggatgacagccgggaccgtggtcatcaccgggggcatcttggcgactgtgattttgctctgcatcatcgctgttctgtgctactgccggctccagtactactgctgcaagaaggacgagtcggaggaggacgaggaggaaccagacttcgccgttcactcgcacctgcccccgctgcactccaaccgcaacctggtgctgaccaacgggccggcgctctaccccaccgcctccacctccttcagccagaagtccccgcaggcccgcgccctctgccgcagctgctcccactgcgagccccccaccttcttcctgcaggagccgccggaggaggaagaggacgtgctgaacggcggggagcgcgtgctctacaagagcgtgagccaggaggacgtggagctgcccccggggggcttcgggggcctgcaggcgctcaaccccaaccgcctctcagccatgcgggaggccttcgccaggagccgcagcatcagcaccgacgtgtgacctgggcccgcccccgggatcctggccttgaaggtcctgagacaatggggggattcctttggcac

SEQ ID NO: 36781 - DNA, 501 bp, Artificial Sequence
  derived and/or modified sequence
atgaccgccggtacagttgtaatcacgggagggattctggccacagtgatcctgttgtgcattattgcggtgctctgttattgccgactgcaatactattgttgcaaaaaggacgaaagcgaagaagatgaagaggagcctgactttgccgtccattcacacctccctcccttgcacagtaatagaaacctcgtactcaccaatggaccagccctctacccgaccgccagcacgtctttctcacagaagagcccacaagccagggcgctgtgcagaagttgctctcattgcgagcccccaaccttctttctccaggagccccccgaagaagaggaggacgtgttaaacggaggcgagagggttctgtacaagagtgtgagccaggaagacgttgagctccctccaggggggtttggcgggctacaggccctcaacccaaacaggctgagcgcaatgcgggaggcgttcgctaggtccaggagcatctctacagatgtttag

SEQ ID NO: 36782 - DNA, 501 bp, Artificial Sequence
  derived and/or modified sequence
atgacagccggcactgtagtcatcacaggaggcatactggccacagtgatattactctgcatcattgctgtactgtgctactgcaggcttcagtattactgctgcaaaaaagacgagagcgaagaggatgaagaggaaccagacttcgctgttcattcacacctcccgcccctgcacagcaaccggaacttggtgctgacgaacggacccgctttgtatccaacagcctctactagcttctctcagaaaagcccgcaggctcgggccctttgtcgaagctgttctcactgcgagcctcctacattctttttgcaggagccacccgaagaggaagaagacgtgctgaatggcggcgaacgcgtcctctataaaagtgtcagtcaggaagacgtggaattgccacctggcggatttggtggtctacaggccctgaaccccaatagactgagtgcaatgcgcgaagcctttgcaaggtcacgcagtatcagtactgatgtctag

SEQ ID NO: 36783 - DNA, 501 bp, Artificial Sequence
  derived and/or modified sequence
atgacagctggcaccgtggtgatcactggaggcatcctggccaccgtcatcctgctgtgcatcatcgctgtgctgtgctactgccgcctgcagtactactgctgcaagaaggatgagagcgaggaggatgaggaggagccagactttgctgtgcacagccacctgccccccctgcacagcaacagaaacctggtgctgaccaacggccctgccctgtaccccacagccagcaccagcttcagccagaagagcccccaggcccgggccctgtgccgcagctgcagccactgtgagccccccaccttcttcctgcaggagcccccagaggaggaggaggatgtgctgaatggaggagagcgggtgctgtacaagtctgtgtcccaggaggatgtggagctgcccccaggcggctttggaggcctgcaggccctgaaccccaaccggctgagcgccatgagggaggcctttgcccggagccgcagcatcagcacagatgtgtag

SEQ ID NO: 36784 - DNA, 501 bp, Artificial Sequence
  derived and/or modified sequence
atgaccgccggcaccgtggtgatcaccggcggcatcctggccaccgtcatcctgctgtgcatcatagccgtgctgtgttattgccggcttcagtattattgctgcaagaaggacgagagcgaggaggacgaagaagagcccgatttcgcggtgcattcccatctgcctccattacactctaacaggaacctcgttcttacaaacggaccggctttgtaccccactgcatccactagctttagccagaaaagcccccaggctcgtgcactgtgtcggtcatgtagtcattgcgaaccccccaccttttttctgcaggagccccccgaggaagaagaagacgtgttgaatgggggcgaaagggtgctctacaagagcgtatcccaagaagatgtcgagctccctcccggtggattcggcggcctgcaggctctgaacccaaaccgcctctcagccatgcgagaggcttttgccagatcacgtagtatttccaccgacgtttag

SEQ ID NO: 36785 - DNA, 501 bp, Artificial Sequence
  derived and/or modified sequence
atgaccgccggcaccgtggtgatcaccggcggcatcctggccaccgtgattctgctctgcataatcgccgtgctatgctattgtaggctccagtattactgttgcaagaaggatgaatccgaagaggatgaagaggagcccgatttcgcggtccattctcacctgcccccattacactcaaatcgtaacctagtactcacgaacgggcccgctctgtaccccaccgccagcacctccttttcccagaaaagccctcaggctcgcgctctgtgccgcagctgcagccattgcgaaccaccaacattcttccttcaggagccacccgaggaagaggaggatgttctcaatggaggcgaacgggtcctgtataagagcgtgtcccaggaagatgtggagttgccacccgggggcttcggcggactccaggctctgaacccaaacagactcagcgccatgcgggaagcctttgcacgaagccggtctatcagcactgacgtgtag

SEQ ID NO: 36786 - DNA, 501 bp, Artificial Sequence
  derived and/or modified sequence
atgacagcaggaactgtggttatcaccggaggtatattggcgacagttatcttgctgtgtatcattgccgtcctttgctactgtcgccttcaatattactgttgcaaaaaggatgaatccgaagaagacgaggaagagcctgactttgcagtccacagtcacctgccccctctccactctaaccggaaccttgtgctgacaaatggccctgctctctatcctacagcctcaaccagtttcagtcagaaatctccccaggcccgtgctctgtgccggtcttgttcccattgtgagccgcctacgttctttttgcaagagcctcccgaagaggaggaagacgtccttaacggtggcgagcgggtgctgtataaatctgtcagccaggaagatgtggagctcccaccaggaggatttgggggtctgcaagctttaaaccctaaccgcctgtccgcgatgcgagaagcattcgctcggtcacggtctatcagcactgacgtctag

SEQ ID NO: 36787 - DNA, 501 bp, Artificial Sequence
  derived and/or modified sequence
atgaccgccggaaccgtggtgatcacggggggaatattagccacagtgatactgctctgtatcatagccgtgctgtgttattgcagactccaatactactgttgtaagaaggatgagtctgaggaggacgaagaagagccggatttcgcggtgcattcccatctaccgccacttcattccaatcgcaacctggtactcactaacggccctgccctctatcccactgcaagcacatcgttttcccagaagagtccccaggcgagggctctgtgccggagttgtagccactgtgaaccgcctaccttctttctccaggagccacccgaggaggaggaggatgtcctaaacgggggtgaacgagtcctatataaaagcgtatcacaagaggatgttgagttgccgcctggaggcttcgggggtctccaggctctgaaccccaatagactgtccgccatgcgtgaggcgttcgccaggagccggagcatctcaacagacgtgtag

SEQ ID NO: 36788 - DNA, 501 bp, Artificial Sequence
  derived and/or modified sequence
atgaccgccggcaccgtggtgatcaccggcggcatcctggccaccgtgatcctgctgtgcatcatcgccgtgctgtgctactgcagactgcagtactactgctgcaagaaggacgagagcgaggaggacgaggaggagcccgacttcgccgtgcacagccacctgccccccctgcacagcaacagaaacctggtgctgaccaacggccccgccctgtaccccaccgccagcaccagcttcagccagaagagcccccaggccagagccctgtgcagaagctgcagccactgcgagccccccaccttcttcctgcaggagccccccgaggaggaggaggacgtgctgaacggcggcgagagagtgctgtacaagagcgtgagccaggaggacgtggagctgcccagaggcgccttcggcggcctgcaggccctgaaccccaacagactgagcgccatgagagaggccttcgccagaagcagaagcatcagcaccgacgtgtag

SEQ ID NO: 36789 - DNA, 501 bp, Artificial Sequence
  derived and/or modified sequence
atgacagctggtacagtggtaattaccggcggcatcttagcaactgtgattcttctgtgtatcatcgcagtactgtgctattgtaggctccagtactactgttgcaagaaagatgagtctgaagaagacgaggaggaacccgatttcgctgtccacagccacctcccacccctgcacagtaacaggaacctggttctcactaatggacccgccctgtacccgacagctagtacatctttctcacagaaaagcccgcaagccagagcgctgtgccggtcttgttcccattgcgaacccccgaccttcttccttcaagagcccccagaagaggaggaggacgtgctcaacgggggagagcgtgttctttacaagtccgtttcgcaggaagatgtggagctccctaggggagccttcggcggactgcaggctctgaatccaaacaggctctcagccatgagagaggcctttgctcgcagccggtctataagtaccgatgtgtag

SEQ ID NO: 36790 - DNA, 501 bp, Artificial Sequence
  derived and/or modified sequence
atgacagctggcaccgtggtgatcactggaggcatcctggccaccgtcatcctgctgtgcatcatcgctgtgctgtgctactgccgcctgcagtactactgctgcaagaaggatgagagcgaggaggatgaggaggagccagactttgctgtgcacagccacctgccccccctgcacagcaacagaaacctggtgctgaccaacggccctgccctgtaccccacagccagcaccagcttcagccagaagagcccccaggcccgggccctgtgccgcagctgcagccactgtgagccccccaccttcttcctgcaggagcccccagaggaggaggaggatgtgctgaatggaggagagcgggtgctgtacaagtctgtgtcccaggaggatgtggagctgcccaggggggccttcggcggcctgcaggccctgaaccccaaccggctgagcgccatgagggaggcctttgcccggagccgcagcatcagcacagatgtgtag

SEQ ID NO: 36791 - DNA, 501 bp, Artificial Sequence
  derived and/or modified sequence
atgaccgccggcaccgtggtgatcaccggcggcatcctggccaccgtgattctcctctgcatcatcgccgttctctgctactgcagactgcagtactactgctgcaaaaaagacgagagcgaggaagacgaggaggaacccgatttcgccgttcactctcaccttccacccctccactccaaccggaatcttgttctgaccaacggtcctgctttgtatcctacagcctctacttctttctcccagaaatcaccccaggctagggctctgtgtcgtagctgctctcattgcgagccccctacgttcttccttcaagagcctcctgaggaagaagaagatgtactgaacggtggcgagcgagttctgtacaagagtgtatctcaggaggacgtggaactgccaaggggtgccttcggcgggctgcaggccttgaatccaaatcggctttctgctatgcgcgaggccttcgcacggtccagatccatctccaccgatgtttag

SEQ ID NO: 36792 - DNA, 501 bp, Artificial Sequence
  derived and/or modified sequence
atgactgcgggtactgtggttattactggcggtatattggcaacagtgatcctcctgtgtattatagcagtgctgtgttactgcaggctgcagtactactgttgcaaaaaagacgaatctgaagaagacgaggaggagcctgatttcgccgtgcattcgcacctcccaccgctccactcaaatcggaaccttgtcctgacgaacggcccagctctgtaccccactgcatcgaccagttttagtcaaaaatcaccacaggccagggccttgtgcaggagctgttcccactgtgagcccccaaccttcttcctacaagagccacccgaggaagaagaggatgtgctgaatgggggagagcgggtcctgtacaaatccgtgtcacaggaagatgtagaacttcccaggggtgcctttggagggcttcaggccctaaaccccaacaggctcagcgccatgcgtgaggccttcgcaaggtctcgctcaatcagtacagacgtgtag

SEQ ID NO: 36793 - DNA, 589 bp, Artificial Sequence
  derived and/or modified sequence
gctgttgatggagaagggggcggatgacagccgggaccgtggtcatcaccgggggcatcttggcgactgtgattttgctctgcatcatcgctgttctgtgctactgccggctccagtactactgctgcaagaaggacgagtcggaggaggacgaggaggaaccagacttcgccgttcactcgcacctgcccccgctgcactccaaccgcaacctggtgctgaccaacgggccggcgctctaccccaccgcctccacctccttcagccagaagtccccgcaggcccgcgccctctgccgcagctgctcccactgcgagccccccaccttcttcctgcaggagccgccggaggaggaagaggacgtgctgaacggcggggagcgcgtgctctacaagagcgtgagccaggaggacgtggagctgccccggggggctttcgggggcctgcaggcgctcaaccccaaccgcctctcagccatgcgggaggccttcgccaggagccgcagcatcagcaccgacgtgtgacctgggcccgcccccgggatcctggccttgaaggtcctgagacaatggggggattcctttggcac

SEQ ID NO: 36794 - protein, 1442 aa, Artificial Sequence
  derived and/or modified sequence
MSIAIPLGVTTSDTSYSDMAAGSDPESVEASPAVNEKSVYSTHNYGTTQRHGCRGLPYATIIPRSDLNGLPSPVEERCGDSPNSEGETVPTWCPCGLSQDGFLLNCDKCRGMSRGKVIRLHRRKQDNISGGDSSATESWDEELSPSTVLYTATQHTPTSITLTVRRTKPKKRKKSPEKGRAAPKTKKIKNSPSEAQNLDENTTEGWENRIRLWTDQYEEAFTNQYSADVQNALEQHLHSSKEFVGKPTILDTINKTELACNNTVIGSQMQLQLGRVTRVQKHRKILRAARDLALDTLIIEYRGKVMLRQQFEVNGHFFKKPYPFVLFYSKFNGVEMCVDARTFGNDARFIRRSCTPNAEVRHMIADGMIHLCIYAVSAITKDAEVTIAFDYEYSNCNYKVDCACHKGNRNCPIQKRNPNATELPLLPPPPSLPTIGAETRRRKARRKELEMEQQNEASEENNDQQSQEVPEKVTVSSDHEEVDNPEEKPEEEKEEVIDDQENLAHSRRTREDRKVEAIMHAFENLEKRKKRRDQPLEQSNSDVEITTTTSETPVGEETKTEAPESEVSNSVSNVTIPSTPQSVGVNTRRSSQAGDIAAEKLVPKPPPAKPSRPRPKSRISRYRTSSAQRLKRQKQANAQQAELSQAALEEGGSNSLVTPTEAGSLDSSGENRPLTGSDPTVVSITGSHVNRAASKYPKTKKYLVTEWLNDKAEKQECPVECPLRITTDPTVLATTLNMLPGLIHSPLICTTPKHYIRFGSPFIPERRRRPLLPDGTFSSCKKRWIKQALEEGMTQTSSVPQETRTQHLYQSNENSSSSSICKDNADLLSPLKKWKSRYLMEQNVTKLLRPLSPVTPPPPNSGSKSPQLATPGSSHPGEEECRNGYSLMFSPVTSLTTASRCNTPLQFELCHRKDLDLAKVGYLDSNTNSCADRPSLLNSGHSDLAPHPSLGPTSETGFPSRSGDGHQTLVRNSDQAFRTEFNLMYAYSPLNAMPRADGLYRGSPLVGDRKPLHLDGGYCSPAEGFSSRYEHGLMKDLSRGSLSPGGERACEGVPSAPQNPPQRKKVSLLEYRKRKQEAKENSAGGGGDSAQSKSKSAGAGQGSSNSVSDTGAHGVQGSSARTPSSPHKKFSPSHSSMSHLEAVSPSDSRGTSSSHCRPQENISSRWMVPTSVERLREGGSIPKVLRSSVRVAQKGEPSPTWESNITEKDSDPADGEGPETLSSALSKGATVYSPSRYSYQLLQCDSPRTESQSLLQQSSSPFRGHPTQSPGYSYRTTALRPGNPPSHGSSESSLSSTSYSSPAHPVSTDSLAPFTGTPGYFSSQPHSGNSTGSNLPRRSCPSSAASPTLQGPSDSPTSDSVSQSSTGTLSSTSFPQNSRSSLPSDLRTISLPSAGQSAVYQASRVSAVSNSQHYPHRGSGGVHQYRLQPLQGSGVKTQTGLS

SEQ ID NO: 36795 - DNA, 4329 bp, Artificial Sequence
  derived and/or modified sequence
atgagcatcgccatccccctgggcgtgaccaccagcgacaccagctacagcgacatggccgccggcagcgaccccgagagcgtggaggccagccccgccgtgaacgagaagagcgtgtacagcacccacaactacggcaccacccagagacacggctgcagaggcctgccctacgccaccatcatccccagaagcgacctgaacggcctgcccagccccgtggaggagagatgcggcgacagccccaacagcgagggcgagaccgtgcccacctggtgcccctgcggcctgagccaggacggcttcctgctgaactgcgacaagtgcagaggcatgagcagaggcaaggtgatcagactgcacagaagaaagcaggacaacatcagcggcggcgacagcagcgccaccgagagctgggacgaggagctgagccccagcaccgtgctgtacaccgccacccagcacacccccaccagcatcaccctgaccgtgagaagaaccaagcccaagaagagaaagaagagccccgagaagggcagagccgcccccaagaccaagaagatcaagaacagccccagcgaggcccagaacctggacgagaacaccaccgagggctgggagaacagaatcagactgtggaccgaccagtacgaggaggccttcaccaaccagtacagcgccgacgtgcagaacgccctggagcagcacctgcacagcagcaaggagttcgtgggcaagcccaccatcctggacaccatcaacaagaccgagctggcctgcaacaacaccgtgatcggcagccagatgcagctgcagctgggcagagtgaccagagtgcagaagcacagaaagatcctgagagccgccagagacctggccctggacaccctgatcatcgagtacagaggcaaggtgatgctgagacagcagttcgaggtgaacggccacttcttcaagaagccctaccccttcgtgctgttctacagcaagttcaacggcgtggagatgtgcgtggacgccagaaccttcggcaacgacgccagattcatcagaagaagctgcacccccaacgccgaggtgagacacatgatcgccgacggcatgatccacctgtgcatctacgccgtgagcgccatcaccaaggacgccgaggtgaccatcgccttcgactacgagtacagcaactgcaactacaaggtggactgcgcctgccacaagggcaacagaaactgccccatccagaagagaaaccccaacgccaccgagctgcccctgctgccccccccccccagcctgcccaccatcggcgccgagaccagaagaagaaaggccagaagaaaggagctggagatggagcagcagaacgaggccagcgaggagaacaacgaccagcagagccaggaggtgcccgagaaggtgaccgtgagcagcgaccacgaggaggtggacaaccccgaggagaagcccgaggaggagaaggaggaggtgatcgacgaccaggagaacctggcccacagcagaagaaccagagaggacagaaaggtggaggccatcatgcacgccttcgagaacctggagaagagaaagaagagaagagaccagcccctggagcagagcaacagcgacgtggagatcaccaccaccaccagcgagacccccgtgggcgaggagaccaagaccgaggcccccgagagcgaggtgagcaacagcgtgagcaacgtgaccatccccagcaccccccagagcgtgggcgtgaacaccagaagaagcagccaggccggcgacatcgccgccgagaagctggtgcccaagcccccccccgccaagcccagcagacccagacccaagagcagaatcagcagatacagaaccagcagcgcccagagactgaagagacagaagcaggccaacgcccagcaggccgagctgagccaggccgccctggaggagggcggcagcaacagcctggtgacccccaccgaggccggcagcctggacagcagcggcgagaacagacccctgaccggcagcgaccccaccgtggtgagcatcaccggcagccacgtgaacagagccgccagcaagtaccccaagaccaagaagtacctggtgaccgagtggctgaacgacaaggccgagaagcaggagtgccccgtggagtgccccctgagaatcaccaccgaccccaccgtgctggccaccaccctgaacatgctgcccggcctgatccacagccccctgatctgcaccacccccaagcactacatcagattcggcagccccttcatccccgagagaagaagaagacccctgctgcccgacggcaccttcagcagctgcaagaagagatggatcaagcaggccctggaggagggcatgacccagaccagcagcgtgccccaggagaccagaacccagcacctgtaccagagcaacgagaacagcagcagcagcagcatctgcaaggacaacgccgacctgctgagccccctgaagaagtggaagagcagatacctgatggagcagaacgtgaccaagctgctgagacccctgagccccgtgaccccccccccccccaacagcggcagcaagagcccccagctggccacccccggcagcagccaccccggcgaggaggagtgcagaaacggctacagcctgatgttcagccccgtgaccagcctgaccaccgccagcagatgcaacacccccctgcagttcgagctgtgccacagaaaggacctggacctggccaaggtgggctacctggacagcaacaccaacagctgcgccgacagacccagcctgctgaacagcggccacagcgacctggccccccaccccagcctgggccccaccagcgagaccggcttccccagcagaagcggcgacggccaccagaccctggtgagaaacagcgaccaggccttcagaaccgagttcaacctgatgtacgcctacagccccctgaacgccatgcccagagccgacggcctgtacagaggcagccccctggtgggcgacagaaagcccctgcacctggacggcggctactgcagccccgccgagggcttcagcagcagatacgagcacggcctgatgaaggacctgagcagaggcagcctgagccccggcggcgagagagcctgcgagggcgtgcccagcgccccccagaaccccccccagagaaagaaggtgagcctgctggagtacagaaagagaaagcaggaggccaaggagaacagcgccggcggcggcggcgacagcgcccagagcaagagcaagagcgccggcgccggccagggcagcagcaacagcgtgagcgacaccggcgcccacggcgtgcagggcagcagcgccagaacccccagcagcccccacaagaagttcagccccagccacagcagcatgagccacctggaggccgtgagccccagcgacagcagaggcaccagcagcagccactgcagaccccaggagaacatcagcagcagatggatggtgcccaccagcgtggagagactgagagagggcggcagcatccccaaggtgctgagaagcagcgtgagagtggcccagaagggcgagcccagccccacctgggagagcaacatcaccgagaaggacagcgaccccgccgacggcgagggccccgagaccctgagcagcgccctgagcaagggcgccaccgtgtacagccccagcagatacagctaccagctgctgcagtgcgacagccccagaaccgagagccagagcctgctgcagcagagcagcagccccttcagaggccaccccacccagagccccggctacagctacagaaccaccgccctgagacccggcaacccccccagccacggcagcagcgagagcagcctgagcagcaccagctacagcagccccgcccaccccgtgagcaccgacagcctggcccccttcaccggcacccccggctacttcagcagccagccccacagcggcaacagcaccggcagcaacctgcccagaagaagctgccccagcagcgccgccagccccaccctgcagggccccagcgacagccccaccagcgacagcgtgagccagagcagcaccggcaccctgagcagcaccagcttcccccagaacagcagaagcagcctgcccagcgacctgagaaccatcagcctgcccagcgccggccagagcgccgtgtaccaggccagcagagtgagcgccgtgagcaacagccagcactacccccacagaggcagcggcggcgtgcaccagtacagactgcagcccctgcagggcagcggcgtgaagacccagaccggcctgagctag

SEQ ID NO: 36796 - DNA, 489 bp, Artificial Sequence
  derived and/or modified sequence
atgagcatcgccatccccctgggcgtgaccaccagcgacaccagctacagcgacatggccgccggcagcgaccccgagagcgtggaggccagccccgccgtgaacgagaagagcgtgtacagcacccacaactacggcaccacccagagacacggctgcagaggcctgccctacgccaccatcatccccagaagcgacctgaacggcctgcccagccccgtggaggagagatgcggcgacagccccaacagcgagggcgagaccgtgcccacctggtgcccctgcggcctgagccaggacggcttcctgctgaactgcgacaagtgcagaggcatgagcagaggcaaggtgatcagactgcacagaagaaagcaggacaacatcagcggcggcgacagcagcgccaccgagagctgggacgaggagctgagccccagcaccgtgctgtacaccgccacccagcacacccccaccagcatcaccctgtag

SEQ ID NO: 36797 - DNA, 4329 bp, Artificial Sequence
  derived and/or modified sequence
atgtctatcgcgatccctcttggcgtgaccacgtctgacaccagttactcggacatggcagctggcagcgacccggagagcgttgaggccagccccgccgtgaatgagaaaagtgtgtacagtacacacaactacggcactacacagcgccacggctgccggggcctaccttatgctacaatcatacctcggtcagatctcaatggactgccctcccctgtggaggaaagatgtggggattcacccaactcagagggagaaacagttccaacctggtgtccttgcgggctatcacaagatgggttcctgttgaattgtgacaagtgtcgcggcatgtcgcgaggcaaggtgattagattgcatcggaggaagcaggacaatatttctggaggcgactcgtccgcaaccgagtcttgggacgaggaattgtcccccagcaccgtattatatacagcaacacagcatacccctacaagcattaccttaactgttaggcggactaagccaaagaagaggaagaaatccccagaaaaaggcagggcagcacctaaaacaaagaaaataaaaaacagcccctctgaagctcaaaacctggacgagaacaccaccgagggctgggaaaaccggattcgcctgtggactgaccaatacgaggaagctttcaccaaccagtactctgccgacgtacagaacgccttggagcagcacttgcactctagtaaagagttcgtcgggaagcctacaatcctcgataccattaacaagactgaactcgcctgcaataacacagtgattggcagtcagatgcagttacaactaggccgcgtaacccgagtacagaaacaccgaaaaatcctacgcgcggcgcgagacctggcactcgacacactgattatcgaatacagggggaaagtgatgctgagacagcagtttgaagtgaacggccactttttcaagaaaccctacccttttgttctgttttactctaagtttaacggtgtggagatgtgtgttgacgctcggactttcggcaatgacgctcgatttatacggagatcttgcacacccaatgcggaggtacgacacatgattgcagatggaatgatccatctgtgcatttacgccgtttctgcgattaccaaggacgctgaggtcactattgcgtttgactacgaatattctaactgcaactataaagtcgactgcgcatgtcacaagggaaacagaaactgtccgattcagaagaggaaccccaacgcaaccgagcttcccctgttgccacccccgccgtctctccctactatcggcgcggagacccggagacgtaaggccaggaggaaggagctagaaatggaacagcagaacgaggccagtgaagagaataacgaccagcagagtcaagaggtgcctgaaaaagttaccgtttcttctgaccatgaagaagtggacaatcctgaagaaaaaccagaagaagagaaagaagaagtaattgacgaccaggagaacctcgcccatagcaggagaaccagggaagaccgaaaggtagaggcgatcatgcatgccttcgaaaatctggaaaaacggaaaaaacgacgcgatcagccgctggaacaatcgaacagtgacgttgaaatcactaccaccacctcagagaccccagttggtgaagagactaaaaccgaagcccccgaatccgaagttagcaactctgtctcgaacgtcactattccatccactccacagagcgtgggcgttaatacccggagaagctcacaggcaggtgatatcgctgccgagaagttggtcccgaaaccaccgcctgctaagcccagccgcccaaggcccaaatcaaggatctcccggtaccgaacaagctcagcccagaggcttaaacggcaaaagcaggctaacgcccagcaggcagaattatctcaggctgccctcgaagaagggggttccaattccttggtgaccccaacagaggctggttctctagattccagtggggaaaaccgtcctctgactggatccgacccgacagtggtctcgattaccggctctcacgtgaatagagcagcatccaaatatcccaagactaaaaagtatctggtcactgaatggctgaatgataaagcagaaaagcaggaatgtcccgtggagtgtcctctgaggatcacaacagacccaacagtgctcgccactaccctgaatatgctgccgggcctgatccattcaccgctcatatgtaccacgcctaagcactatatccgcttcggcagcccctttataccggagcgaaggcggcgacctttgctccctgatgggacgttctcctcttgtaagaaaaggtggattaaacaggccctggaagagggaatgacccagacctctagcgtacctcaggaaacacggacacagcatttataccagtccaatgaaaatagcagctcttctagtatctgcaaagacaacgccgatttactttcaccactgaagaaatggaaaagtcggtacctgatggaacagaacgtgactaagctcctgcgcccgctcagcccagtgactcctccacctccgaactcaggctccaaatctcctcaattggctacaccggggtctagtcaccccggagaggaggaatgtcgaaacggatatagccttatgttttcccctgtgactagcttgacaacagcctctagatgcaatactcctcttcagtttgaactgtgccaccggaaggacctcgatttggccaaggtgggctacctggattcaaataccaattcctgtgctgaccgaccatccttattgaatagtggacactcagacctcgccccccatcccagcctgggaccaacctctgaaaccggtttcccaagcagaagcggggatggacatcagacactggtaagaaacagcgatcaggcgtttcgcacggaatttaatctgatgtacgcatattcccctcttaacgccatgccacgcgccgatggactgtatcgcgggtccccgctggttggagatcgtaagccactgcacctggatgggggctattgttcacctgccgaaggcttcagcagtagatatgagcatggtctgatgaaagacctgagccgcgggagtctgtctcctggcggtgagcgagcgtgcgaaggagtcccctctgcaccccagaaccccccccagcgtaagaaggtgtccctgctggaataccgaaaaagaaagcaagaagccaaggaaaatagtgctggcggtggcggggatagtgctcaaagcaaatctaagtcagccggcgctgggcagggatcatcaaatagcgtgagtgacacgggggcccacggagtccaaggcagcagcgctagaaccccctccagcccccacaagaagtttagccccagtcatagctcaatgtcacacctcgaggccgtatcgccatctgatagcagaggaactagctcgtctcattgtcgtccccaggagaacatttcaagcaggtggatggtccctacatcggttgagaggctgagggaagggggcagtattcctaaggtgctccgatcttcagttcgtgtggcccaaaaaggcgaaccttctccaacgtgggaaagtaacatcacagagaaggacagcgaccccgcagatggggagggccccgagacactgtccagcgccctgagcaaaggagcgaccgtctatagcccttctagatactcctaccagctactgcaatgtgatagtcctaggacggagtctcagagcctccttcaacagagctcctcaccctttaggggtcacccaacccagtccccaggatattcttaccgaaccaccgctctcaggccgggaaacccaccctcccacggctcatctgagagttcgctctctagcaccagttactcctctcctgcgcatccggtgagtactgatagtctggcccctttcactgggacaccaggatatttttcgagtcagccacattccggcaacagcacgggctcaaacctcccccgacggagctgtccatcctctgccgcctctccaacgctgcagggcccgagcgactcacctacaagcgactctgtgtcccagtcatccaccgggacgctgtcttcgacctcttttccacagaattccaggagtagtcttccgtctgacctccgcaccatttctctgccctcggcaggacaaagtgcagtgtaccaggcttcacgagtaagtgccgttagcaattcgcaacactatcctcaccggggttcaggaggagtgcaccagtacagactgcagcccttgcaaggatccggtgttaagactcagactgggctatcttag

SEQ ID NO: 36798 - DNA, 4329 bp, Artificial Sequence
  derived and/or modified sequence
atgtcgattgccatccctctgggggttaccacctcagacacgagttattctgacatggccgcaggctccgaccctgaaagcgtggaggcctcccccgccgtcaatgaaaagtccgtctactccacccataactacgggacaacacagagacatggttgcagaggtctcccctatgcaacaataattccacgcagtgaccttaatggactgccctctccagtggaggagcgctgtggagactcgccaaattcggagggcgaaaccgttccaacctggtgcccttgcggtctgtctcaggatggattcttgctgaattgcgataagtgtcggggaatgagccgcggaaaggtgattagattacatagacgtaagcaggacaatatctcgggcggagacagtagcgcaacagagtcttgggatgaagaactgtcaccaagcaccgtgctctatacggcaacccaacatacacccacttccattacacttacagttagaagaactaaaccaaaaaagcggaagaagtctcctgagaaaggccgggcggctcccaaaacaaagaagatcaagaacagcccctctgaggctcagaacctggacgaaaacactactgaaggatgggaaaatcgtatccgattatggaccgaccaatacgaagaggcctttactaaccaatattctgccgacgttcaaaacgcccttgagcaacacttgcatagctctaaagaattcgtaggtaaaccaacgattctggacacaattaataagaccgaacttgcgtgtaacaacacggtaatcgggtctcagatgcagctacagctcgggcgcgtgactagagtccaaaaacatcggaagattttaagggcagctcgagatttagcactggatacgctgatcattgagtaccggggaaaggtgatgttgaggcagcagttcgaagtaaatggacacttcttcaaaaaaccctatcctttcgtattattctattccaaattcaatggagtggagatgtgtgtggacgctcgaactttcggcaatgacgcacgcttcatccgacgcagctgcactcccaacgcagaggttcgtcatatgatcgccgacggcatgatccacttgtgcatttatgctgtatccgctattacaaaagacgctgaggtgactatcgctttcgactacgaatactcaaattgcaactataaggtggattgtgcatgtcacaaggggaacaggaactgtcccatacaaaagcgcaaccccaatgcaaccgaattgccattgctgccacctcctccatctctgcctactataggagctgaaaccaggcgcagaaaagcaagaagaaaggagctggagatggagcagcagaacgaagccagtgaagagaataatgatcagcagtcacaggaagtgccagaaaaagtaactgtaagtagcgatcatgaagaggtggacaaccctgaggagaaacctgaggaggagaaagaagaagtgatcgacgatcaggagaatctcgcccatagcagaaggacaagagaggatagaaaagttgaggccatcatgcatgcgtttgagaacctcgaaaagcgcaagaagcggagagatcagcctctggagcagtccaattctgatgttgagattaccacaaccaccagtgagacccccgtgggagaggaaacgaagacagaagcccccgaatctgaagtctcgaattccgtgagtaacgttaccataccatccacgccccagtccgtgggggttaacacgaggcggagttcacaggcaggcgacatcgctgcagagaaattagttcccaagccacctccagcaaagccatctaggcctagacccaagagtaggatcagtcggtatcggactagcagcgcccagcgcctgaagcggcagaaacaagctaacgcccagcaagcggagctgagccaggcggctctggaggaaggcggatctaacagcctggtcacccccacagaggccgggtcactggattcttcaggagaaaatcggccacttacaggctctgatcctacggtcgtgtcaattaccgggtcccatgtaaatagagcagcctccaagtatcctaagactaaaaaataccttgttacagaatggcttaacgacaaagctgaaaaacaggagtgccccgtagaatgcccgctgcgaatcaccaccgaccctacagtcttggcaacaaccttaaatatgctgcctggccttattcactctcctctcatttgcactacaccaaaacattacatccgctttgggtccccatttatccctgaacgaaggaggagaccactgctgcccgatggcacgtttagctcatgtaaaaagcgctggatcaaacaagctttggaagaaggcatgacccagacatccagtgtgccccaggagactcgtacccagcacctgtaccagagcaatgaaaactcgtcctcatcttccatatgcaaggacaatgctgacctgctgtcacctcttaagaagtggaaaagccggtacctgatggagcagaacgtgactaagctcttacggccactgtcgccggtcactcccccgccaccaaattcaggatccaagtccccccaactcgccacccccggctcttcccaccccggagaggaggaatgtcggaatggttatagtctgatgttctcacccgttacaagcctgactaccgcctctcggtgtaatacacccctccagttcgagctgtgccacaggaaagatctcgatctcgcaaaggtgggatacctggactcaaatacaaacagctgcgccgaccgtccttcgcttcttaactccggtcactctgatctcgcaccccacccttcgttagggcctactagtgagactggattcccgtctagaagcggagatggccatcaaacactggtgcgtaacagcgaccaagcgttcagaacagagtttaacttgatgtatgcttactctcccctcaacgctatgccaagagctgacggcctgtacagagggtcaccactcgtaggcgaccgaaaaccattacacttagacggtgggtattgctcgcctgcagaaggattcagttctcgttacgagcatggtctgatgaaagacttatccaggggtagcctgagccctggaggcgaacgagcttgtgagggcgtgccaagcgctccacaaaatcctccccagcggaagaaggtaagtctcctggagtataggaaaagaaagcaggaggccaaagaaaattcggctggtggtggtggcgatagtgcccagtccaagtcaaagtcagcaggcgctggacagggatcctccaacagcgtgtcagacaccggtgctcatggggtacagggcagtagtgccaggaccccatcctcaccgcacaagaagtttagccctagtcactcatcaatgagtcatcttgaagccgtgagcccgagcgactctcggggaacctctagttctcattgtcgcccccaggagaacattagcagccgctggatggtacctacatccgttgaaagactgcgggaggggggatcaatccctaaagtgctccgcagctcagtgagggtagcccaaaaaggtgagccctcacccacttgggaaagcaacattacagaaaaggacagcgatcccgctgatggcgaaggcccggaaactcttagctccgcattgtctaaaggcgcgacagtttactctccgagccgctacagctatcagctcttgcaatgtgattcccccagaaccgagagccaatctctcctccagcagagctccagtccatttcgcggccatcctactcagagccccggatattcatatcgcaccacagccttacgccccggcaatcccccaagccatggcagttctgagtcctccttgtcttccacgagctactcctctcctgcccacccagttagtactgacagcttggcccccttcacgggtaccccaggatacttttcctcccagcctcattcgggaaactccaccggttcaaacctgccacgccgatcttgcccatcctcggccgcaagtcccacgttacaggggccatcggactctccgacatctgattcagtgtctcaatccagtactggaactctgtcatccactagctttccccagaatagccgctcaagtctgccatcggatctcaggacaattagcttgcccagcgctgggcaaagcgcagtgtatcaagcaagtagagtcagtgcagttagcaattcacagcactatcctcatcgcggatcaggcggagtgcaccagtacagactgcagcctctacaagggtcaggggtcaagacccaaacaggcctgagttag

SEQ ID NO: 36799 - DNA, 489 bp, Artificial Sequence
  derived and/or modified sequence
atgtcaattgctattccgctcggagtgaccaccagcgacacgtcctactctgatatggctgcaggctcagaccccgagagcgttgaagcttcccctgctgttaatgagaagtctgtgtactcgacccataattacggcacgacacagaggcacggatgtcggggtctgccctacgccaccatcattccaaggagcgacctcaatggtctccccagcccggttgaggagagatgcggggattcgccaaattccgagggcgaaaccgtgccaacttggtgcccctgcggactctctcaggacggttttcttctgaactgtgataagtgcagaggcatgtcccggggtaaggttatacggctccacagaaggaaacaggataacatctccgggggggattcttctgcgaccgaatcatgggatgaggagttgagcccttcaaccgtactgtacacagccacacagcacacacctacgtccatcacactttag

SEQ ID NO: 36800 - DNA, 4329 bp, Artificial Sequence
  derived and/or modified sequence
atgagcatcgccatccccctgggcgtgaccaccagtgacaccagctacagcgacatggctgctggcagtgaccctgagagcgtggaggccagccctgctgtgaatgagaagtctgtgtacagcacccacaactacggcaccacccagagacatggctgccggggcctgccctatgccaccatcatccccaggagtgacctgaatggcctgcccagccctgtggaggagcgctgtggggacagccccaacagcgagggggagaccgtgcccacctggtgcccctgtggcctgagccaggacggcttcctgctgaactgtgacaagtgccggggcatgagccggggcaaggtgatccggctgcacaggaggaagcaggacaacatctctggaggagacagcagcgccacagagagctgggatgaggagctgagccccagcacagtgctgtacacagccacccagcacacccccaccagcatcaccctgactgtgcggaggaccaagcccaagaagaggaagaagagccctgagaagggccgggccgcccccaagaccaagaagatcaagaacagccccagcgaggcccagaacctggatgagaacaccacagagggctgggagaaccgcatccggctgtggacagaccagtatgaggaggccttcaccaaccagtacagcgcagatgtgcagaatgccctggagcagcacctgcacagcagcaaggagtttgtgggcaagcccaccatcctggacaccatcaacaagacagagctggcctgcaacaacacagtgattggcagccagatgcagctgcagctgggccgggtgaccagggtgcagaagcacaggaagatcctgcgggccgcccgggacctggccctggacaccctcatcatcgagtaccggggcaaggtgatgctgcggcagcagtttgaggtgaatggccacttcttcaagaagccctacccctttgtgctcttctacagcaagttcaacggggtggagatgtgtgtggatgcccggacctttggaaatgatgcccgcttcatcagaagaagctgcaccccaaatgctgaggtgcgccacatgattgctgatggcatgatccacctgtgcatctatgctgtgtctgccatcaccaaggatgctgaggtgaccatcgcctttgattatgagtacagcaactgcaactacaaggtggactgtgcctgccacaagggcaacagaaactgccccatccagaagaggaaccccaatgccacagagctgcccctgctgcccccaccacccagcctgcccaccatcggggctgagaccaggaggaggaaggcccggaggaaggagctggagatggagcagcagaatgaggccagcgaggagaacaatgaccagcagagccaggaggtgcctgagaaggtgacagtgtccagtgaccacgaggaggtggacaaccctgaggagaagccagaggaggagaaggaggaggtgattgatgaccaggagaacctggcccacagcaggaggacccgggaggacaggaaggtggaggccatcatgcacgcctttgagaacctggagaagaggaagaagagaagagaccagcccctggagcagagcaacagtgatgtggagatcaccaccaccaccagcgagacccctgtgggggaggagaccaagacagaggcccctgagagcgaggtgagcaacagcgtgtccaatgtgaccatccccagcaccccccagagcgtgggcgtgaacacccggcgcagcagccaggccggggacattgctgctgagaagctggtgcccaagcccccaccagccaagcccagccggccccggcccaagagccgcatcagccgctaccgcaccagcagcgcccagaggctgaagaggcagaagcaggccaatgcccagcaggccgagctgagccaggccgccctggaggagggcggcagcaacagcctggtgacccccacagaggccggcagcctggacagcagcggggagaaccggcccctgactggaagtgaccccaccgtggtgtccatcaccggcagccacgtgaacagagctgccagcaagtaccccaagaccaagaagtacctggtgacagagtggctgaatgacaaggccgagaagcaggagtgccctgtggagtgccccctgcgcatcaccacagaccccaccgtgctggccaccaccctgaacatgctgcccggcctcatccacagccccctcatctgcaccacccccaagcactacatccgcttcggcagccccttcatccctgagaggagaagaagacccctgctgcctgatggcaccttcagcagctgcaagaagcgctggatcaagcaggccctggaggagggcatgacccagaccagctctgtgccccaggagaccaggacccagcacctgtaccagagcaatgaaaacagcagcagcagcagcatctgcaaggacaatgctgacctgctgagccccctgaagaagtggaagagccgctacctgatggagcagaatgtgaccaagctgctgcggcccctgagccctgtgaccccacctccacccaacagcggcagcaagagcccccagctggccaccccaggcagcagccaccctggagaggaggagtgcagaaatggctacagcctgatgttcagccctgtgaccagcctgaccacagccagccgctgcaacacccccctgcagtttgagctgtgccacaggaaggacctggacctggccaaggtgggctacctggacagcaacaccaacagctgtgccgaccggcccagcctgctgaacagcggccacagcgacctggccccccaccccagcctgggccccaccagcgagaccggcttccccagccgctctggagatggccaccagaccctggtgaggaacagcgaccaggccttcagaacagagttcaacctgatgtatgcctacagccccctgaatgccatgcccagggcagatggcctgtaccggggcagccccctggtgggggacaggaagcccctgcacctggatggcggctactgcagccctgctgagggcttcagcagccgctatgaacatggcctgatgaaggacctgagccggggcagcctgagccctggaggagagcgggcctgtgagggcgtgcccagcgccccccagaaccccccccagaggaagaaggtgtccctgctggagtacaggaagaggaagcaggaggccaaggagaacagcgctgggggcggcggggacagcgcccagagcaagagcaagtctgctggagctggccagggcagcagcaacagcgtgtctgacaccggggcccatggagtgcagggcagcagcgcccggacccccagcagcccccacaagaagttcagccccagccacagctccatgagccacctggaggccgtgagccccagcgacagccggggcaccagcagcagccactgccggccccaggagaacatcagcagccgctggatggtgcccacctctgtggagcggctgcgggagggcggcagcatccccaaggtgctgcggagctctgtgcgggtggcccagaagggggagcccagccccacctgggagagcaacatcacagagaaggacagcgaccctgcagatggagagggccctgagaccctgagcagcgccctgagcaaaggagccaccgtgtacagccccagccgctacagctaccagctgctgcagtgtgacagccccaggacagagagccagagcctgctgcagcagagcagcagccccttccggggccaccccacccagagccctggctacagctaccgcaccacagccctgcggcccggcaacccccccagccacggcagcagcgagagcagcctgagcagcaccagctacagcagccctgcccaccctgtgtccacagacagcctggcccccttcaccggcaccccaggctacttcagcagccagccccacagcggcaacagcacaggcagcaacctgcccaggaggagctgccccagcagcgctgccagccccaccctgcagggccccagcgacagccccaccagtgacagcgtgtcccagagcagcacaggcaccctgagcagcaccagcttcccccagaacagccgcagcagcctgcccagcgacctgcggaccatcagcctgcccagcgctggccagagcgctgtgtaccaggccagccgggtgtctgctgtgagcaacagccagcactacccccaccggggcagcggaggagtgcaccagtaccgcctgcagcccctgcagggcagcggcgtgaagacccagacaggcctgtcctag

SEQ ID NO: 36801 - DNA, 489 bp, Artificial Sequence
  derived and/or modified sequence
atgagcatcgccatccccctgggcgtgaccaccagtgacaccagctacagcgacatggctgctggcagtgaccctgagagcgtggaggccagccctgctgtgaatgagaagtctgtgtacagcacccacaactacggcaccacccagagacatggctgccggggcctgccctatgccaccatcatccccaggagtgacctgaatggcctgcccagccctgtggaggagcgctgtggggacagccccaacagcgagggggagaccgtgcccacctggtgcccctgtggcctgagccaggacggcttcctgctgaactgtgacaagtgccggggcatgagccggggcaaggtgatccggctgcacaggaggaagcaggacaacatctctggaggagacagcagcgccacagagagctgggatgaggagctgagccccagcacagtgctgtacacagccacccagcacacccccaccagcatcaccctgtag

SEQ ID NO: 36802 - DNA, 4329 bp, Artificial Sequence
  derived and/or modified sequence
atgagcatcgccatccccctgggcgtgaccaccagcgacaccagctactctgacatggccgctggttctgatccagagagcgtggaggcaagtccagccgtcaatgaaaagagtgtgtacagcactcacaattacggaacaactcagcgccacggctgcaggggccttccatacgcaacgatcattcccagaagcgatctcaatggactgccctctcctgtggaagagcgctgtggagactccccgaactctgagggcgagaccgtgcctacttggtgtccatgcggcctcagtcaagacggattcctgctgaactgtgacaagtgccgggggatgtcaagaggaaaggtaatcaggcttcatcggcgaaagcaggacaacatttcaggcggggacagctctgccactgagtcctgggatgaagaactgtctccctccacagtcctttacacagccacgcagcacacacccacatccattacattaacggtgcgacgcacaaaacctaaaaagagaaagaagtcgccagaaaagggtagagccgctcccaaaaccaaaaaaattaagaactcaccttctgaggcacagaacctggacgagaacacaaccgaggggtgggaaaaccgtatcaggctgtggaccgatcaatatgaggaagccttcaccaaccaatactccgccgacgtccagaacgctttagagcagcaccttcactcatcaaaagagtttgtggggaaaccgaccatcttggacactattaacaaaacggaactggcatgtaataacacggtgatcggctctcaaatgcaactgcagctgggccgcgtgacacgggtccagaagcataggaagatcctgagagcagcgagagatctcgccttggacacgcttattatcgaataccgaggcaaggtgatgttaaggcagcagtttgaggtgaacggccatttcttcaagaaaccatacccctttgtgcttttctactctaaattcaacggggtggagatgtgcgtggatgcccggacattcgggaacgacgccaggttcataagaaggagctgtactcccaatgccgaagtgcgccacatgattgctgatggcatgattcatctgtgtatctatgcggtctcggccatcaccaaggatgcagaggtgacaattgcttttgactacgagtactccaactgcaactataaagtggactgcgcctgtcataaggggaacaggaactgtccaatccagaaaagaaatcccaacgcgacggaacttccactcctcccacccccacctagtttgcccaccataggcgctgagacccggcggcgcaaagccaggaggaaggagttggagatggaacagcagaacgaagcttctgaagagaacaatgatcaacagtctcaggaagtgcctgaaaaggtgaccgtgtcaagcgatcatgaggaggtggataaccctgaagagaagcccgaggaggagaaggaggaggtcattgacgaccaggagaatctggcccacagcagacggaccagggaagatagaaaagtggaggccattatgcacgcattcgaaaatctcgagaaaagaaaaaagcgccgagaccagccactggagcagtcaaactctgacgtggaaattaccaccactacatcagagacacccgtaggtgaggagacaaaaactgaggcccccgaatccgaagtaagcaactctgtaagtaatgtcacgatcccgagtacaccacaatccgtgggagtgaacacacgccggtcgagccaggctggtgatatcgccgccgaaaagctcgtccccaagcccccgccagctaagccctcaaggcccaggcccaaaagccgtatttctcgttaccgcacttcctccgcccagagactgaagagacagaaacaagccaacgctcagcaggctgaactgtcccaggccgccctggaggagggagggtctaactccctggtgacgccgaccgaagcaggctccttggacagctcaggggagaaccgtccattgactgggagcgaccctacagtcgtgtctattaccggatcccacgtcaaccgggcggcctcaaaatatccaaaaaccaagaagtacctggtgaccgagtggttgaatgacaaggccgagaagcaggaatgcccagtcgagtgtcccctgagaattaccactgatccgacagtcctcgcgaccacacttaatatgctccctggtttgatacatagccctctgatctgtacaacccctaaacactacatccgattcgggtccccgttcataccagaacgccgtagacggcctctgcttcccgatggcaccttcagtagttgcaagaaacgctggatcaagcaggcgctcgaggaagggatgacacagacatcctcagtgcctcaggaaacccgaacacagcacctgtaccagtccaacgaaaattcatctagctccagtatttgtaaggataatgccgacctcctgtctcccctgaagaagtggaagtctcggtacctgatggagcagaacgtcacaaaactgttgcgacctttgtcccccgtgactccccccccacccaactctggctcaaaatcaccacaattagccacaccagggagttcccaccctggcgaagaggaatgcagaaacggctattcccttatgttctctccagtgacttctctgactaccgctagccgctgtaatacaccactccagtttgaactctgccataggaaggatttagacctggcaaaggttggctatttggacagtaacaccaacagctgcgccgaccggccaagtctgctgaacagcgggcattccgacctagccccacacccatccttagggcccacgtctgagactgggttcccatcacgcagcggagatggccatcagacgctggtgagaaactctgaccaggctttccgaaccgagtttaacctgatgtacgcctattctcccttaaatgctatgccacgggccgacggattgtatcgtggatctcctctggtcggggatcgtaagcccctacatctggacggcggatactgctcgcccgccgagggattctcatcccggtatgagcatggtttgatgaaggacctctctcgaggctccttgtctcctggcggagaacgagcgtgcgaaggagtacccagcgctccacagaaccccccccagagaaaaaaggttagcctgttagagtatagaaagagaaaacaggaggctaaggaaaattccgcaggtggtgggggtgactcagcccagtcaaaaagcaagtctgccggcgctggccaaggttcttcaaactctgtgtctgatacaggagcacacggtgtgcaaggctcgagcgcaagaaccccttcatctccacacaagaagttcagccctagccattcatctatgtctcatttggaggcagtgtctccctcggacagcaggggaacttcctccagccattgccgaccccaggagaacattagcagcaggtggatggtaccgacctcggtggagagactacgcgagggggggtctatacccaaagtgctgaggagctcagtcagggtggcccagaaaggtgagcctagcccaacatgggagagcaatatcactgaaaaggattcagacccagcagacggcgaaggtccagagactctgagcagtgcattgtcgaagggtgcaacggtctactctccatctcgctattcataccagctgttgcaatgcgacagtcccaggacggaatcccaatctctactccaacaatcgtctagtcctttcagagggcacccaacgcagagccctggttattcctatcggaccaccgcccttaggcctggaaatcccccaagccacggctcatccgaatctagcctctcctcaacgagctacagctcccccgcccaccccgtatctactgacagcctggcgccttttaccggaacacctggttatttcagttcacaacctcatagtggcaatagcaccgggtccaatctgcctcgtcggtcgtgtccgagttctgcagccagccccactcttcaagggcctagtgacagccccactagtgacagcgtcagccagtcgagcactgggacattgagtagcacatccttcccacagaattcacgcagcagcctgccttccgacctccgaaccatttctttgccaagcgcaggacaatctgctgtctaccaagcaagtcgtgtgtctgcagtgtccaactcccagcattacccccacagagggagtggcggagtgcatcagtatagattgcagcccctgcagggctcgggggtcaagacacagaccggtttatcctag

SEQ ID NO: 36803 - DNA, 4329 bp, Artificial Sequence
  derived and/or modified sequence
atgagcatcgccatccccctgggcgtgaccaccagcgacaccagctattctgacatggccgctggaagtgaccctgagtccgtggaagcctctcccgcagtgaacgaaaagtcagtgtactcgacccataattatggtactacacagcgacatggttgccggggcttgccctacgccaccatcataccccgctccgacctcaacggcctccccagtcctgtggaagaaaggtgcggagatagtcccaatagcgagggggaaaccgtgcctacttggtgcccgtgcggcctgagtcaggatggatttctgcttaactgcgacaaatgcaggggtatgtcccgcggcaaggtgattagactccatagacggaagcaagacaacatctctggtggcgattcctccgcaaccgagagctgggacgaagagctgtctccatctaccgttctgtacaccgccacccaacacacacctacttcgatcacacttactgtgcgaaggacaaaacccaagaagcggaagaaatcacctgaaaaggggcgagcggcccccaagaccaagaaaatcaaaaacagtccttccgaggctcaaaacctggatgagaacaccactgagggatgggaaaataggattcggctatggaccgaccagtatgaagaggcatttaccaatcagtatagcgctgacgtccagaatgccctcgaacaacacttacacagctctaaagaattcgtgggcaagcccacgatactcgacacaattaacaagactgaactcgcctgcaacaataccgtgataggcagccagatgcaactgcaactaggccgagtgacacgcgtccagaaacaccggaagatcttacgggccgcacgcgacctggccctcgacacactcattatcgagtaccgggggaaggtgatgcttagacaacagtttgaggtcaatggacacttcttcaaaaaaccttatccctttgtgctcttctacagtaagtttaatggcgtcgaaatgtgcgttgacgccaggactttcggcaatgacgctagatttatccgccgatcttgcacccctaatgcagaggtgagacatatgatcgcagatggcatgatacacctgtgcatatatgccgttagcgcgattaccaaggatgctgaggtcactatcgcattcgattatgagtactcaaattgcaactacaaggtagattgtgcctgtcacaagggcaaccgcaactgtcctattcagaaacggaaccctaatgccacagagctacctttgctgccccccccgccctcgctacccacgattggtgccgagaccagacgtcgcaaagcgagacggaaggagctggagatggaacagcagaacgaggcatctgaagagaataacgaccaacaaagtcaggaagtgccggagaaggtcaccgtgtcaagtgatcacgaggaggtggacaatccagaagaaaagccagaagaggagaaggaagaggtcatagacgaccaggagaatctggcccacagcaggcgaaccagggaggaccggaaggtggaagcaataatgcacgcattcgagaacttggagaaacgcaagaagaggagagatcagcctctcgagcaatccaatagtgatgtggaaataacgaccaccacctccgagacgcccgttggtgaagagactaaaactgaagcacccgaatccgaagtgtcaaatagtgtgagcaacgtgaccatcccttccacccctcagtcggtgggcgtaaacactagacgcagtagtcaggcaggtgatatcgctgctgaaaagttagtaccaaagcctcctccagcaaagccgtcacgacctaggcccaagtccaggatcagccggtacaggaccagttccgcacaacgcctgaagcgccaaaagcaggccaatgcgcaacaagcagagcttagccaggctgctttggaagaaggagggtctaactctctggtgacacctaccgaggcgggcagcctcgacagttcgggtgaaaataggcccctcactggcagcgacccaacagttgtgtctattaccgggagccatgtgaatcgcgcagctagcaaatatcctaagaccaaaaagtacctggtcaccgagtggctaaatgacaaggccgaaaagcaggagtgtcctgtggaatgcccactgagaatcactacagacccaactgtgctggcgacaactctgaatatgctgcctggactcatccattccccactcatttgtactacacccaagcactacattcgatttggaagtcccttcatccccgagagacggaggaggcccctgctgcctgatgggactttttcctcatgcaagaagcgatggatcaagcaggcccttgaggagggtatgacgcagacgtcatccgtgccccaggagacccgaacacagcatctgtaccagagcaatgaaaattcgtcctccagctctatctgcaaggataatgcggacctgctgtcaccgctaaagaagtggaagagtcggtatctaatggagcagaatgtgacgaagctcttgagaccattgagccctgtgactcccccccctcctaatagcgggtcaaaatcaccccagcttgcgaccccaggatcatcgcacccaggggaggaggagtgcaggaatgggtactctctcatgttttcacctgtaacttccttgacaaccgcctcccgttgcaatacaccactccagttcgagctctgccaccgcaaagacctggacctcgcgaaggtcgggtacctggatagtaatacaaactcctgtgccgatagacctagcctcctgaactccggccattcggaccttgctcctcacccctcattaggccccacctctgagacaggttttccatctcggagcggcgacggacatcagacgctggtccggaactcggaccaggctttcagaacggagttcaacttaatgtatgcttactcaccattaaatgcaatgccacgcgccgacggtctctacagaggatctccccttgtgggagacagaaaaccgctgcaccttgatggcggatactgcagccccgccgaaggcttttcgagcaggtacgagcatgggttaatgaaagacttgagcagaggctcattgagtcctggaggcgaacgcgcatgtgagggcgtaccgtcagcacctcagaatccgccacagagaaagaaggtctcactactagaatataggaagaggaagcaagaagccaaagaaaatagcgccggcggaggcggtgatagcgcccagtctaagtccaagtctgccggcgccgggcagggatcttccaatagtgtgtctgacaccggtgcccacggtgtccaaggatcctccgctcggactcctagctccccacataagaagtttagtccatcacacagctcgatgagtcatcttgaggcagtaagtcctagcgactctcggggcacctccagttctcactgtcggcctcaggaaaacatttcttctcgatggatggtgccgacgagcgtggagcggctgagagaaggtggctccatacccaaggtcctgagatcaagtgtgagagtggctcagaagggcgagccaagccctacatgggagtctaatataactgagaaggactcagaccccgctgacggggagggtcccgaaaccctgagctctgcgttgagtaaaggagccacagtttacagcccatcgagatattcttatcaactactgcagtgtgattcaccacgaacggaatctcagagcctgctccagcagtccagctcccccttccgtggacacccaactcagtctcctgggtattcctacagaacaaccgctcttcggccagggaatcctccatctcatggctcctctgaaagctctttaagtagcaccagttactcaagtcccgctcaccccgtgtctacagacagcctggctccatttactggcactcccggctattttagttcccagccacatagcggaaacagcaccggaagcaatctgcccaggcgtagctgtccaagttccgccgcatcccctacactgcaggggccgtctgactcccctacctcagattccgtgtcgcaatcaagcacaggtacacttagtagcacgtcatttccacagaattccaggtcttctctccctagcgacttgagaactatttcattaccttctgccggccagtcagccgtgtatcaggcgagccgagtgagcgctgtctcaaacagccagcattatccccatcggggcagtggaggagtgcaccagtatcgcctgcaacctctccaaggatcgggtgtgaagacccaaacggggctgagctag

SEQ ID NO: 36804 - DNA, 489 bp, Artificial Sequence
  derived and/or modified sequence
atgagcatcgccatccccctgggcgtgaccaccagcgacaccagctattcagatatggccgctggcagtgatcctgagtctgtggaagcatcaccggcagttaatgagaagagcgtgtacagcacccataactatgggaccacacagcgccacggctgccgggggttgccatatgcaacaatcatcccccgatccgatttaaacggtctgccctcgccagtggaggagcggtgtggcgattcacccaattctgagggagaaactgtccctacctggtgcccctgcgggttgagccaggatggctttctcttgaattgcgataaatgccgcgggatgtctcggggcaaagtgatccgcctgcaccgtcggaagcaagacaatattagtgggggagatagcagtgctaccgaatcctgggatgaggagctctcaccgtcgacagtgctgtatacagcaacccagcacaccccaacatctattacactgtag

SEQ ID NO: 36805 - DNA, 4329 bp, Artificial Sequence
  derived and/or modified sequence
atgagcatcgccatacccctaggtgtgacaacctctgacacctcttatagcgatatggccgctggctcagatccggagtcagtcgaagctagtcctgccgtgaatgagaaatccgtgtattcaactcacaactatgggactacgcagagacatgggtgtcgtggactcccatacgccaccatcattccccgatccgatctgaacggccttccctctcctgtagaggaaaggtgtggcgattcaccaaattcagaaggcgagacagtgcctacctggtgtccttgcgggttgtctcaggacggattccttttaaattgcgataagtgtagaggcatgtcacgtggtaaagtgatcagactgcacaggcgaaaacaggacaacatttctggcggagacagcagcgccactgaaagctgggacgaggaactgagtccctctaccgtgttatacaccgcaacacagcacacacccacaagcatcacccttacagtcagacggaccaaaccaaaaaaacggaagaagagtcccgaaaagggtcgcgcagcccctaagacaaagaaaatcaagaactccccgagcgaagctcagaaccttgatgaaaacacgaccgagggatgggagaatcggatacgcctatggaccgaccaatacgaggaggccttcaccaatcagtactcagcagacgtccagaacgcgctcgagcagcacctgcattccagcaaggagttcgtcggcaagccaacaatactcgacacgattaataaaactgaactggcatgcaacaacacggtcataggctcacagatgcagctgcagctcggtcgagtaactagggtccagaagcacagaaagatcctgagagctgcccgagatctggcgctggacaccctcatcattgaatataggggcaaggtgatgcttcgccagcagtttgaagttaatggacacttttttaaaaagccttatcccttcgtgcttttttactcaaagtttaatggggtagagatgtgtgtggacgccaggacctttggaaacgacgcaaggttcattcgccgttcatgcacacccaacgcagaagttagacatatgatagccgacgggatgatccacctgtgtatctacgctgtgagcgctatcacaaaggatgctgaagtcaccatcgcatttgattatgagtacagtaactgtaattacaaagttgactgcgcttgtcataaaggcaatcgcaattgtccaatccagaaacgcaacccaaacgccaccgagctgcctctcctgcctccccctccctctctccccaccatcggcgcagagacacggagacggaaagcccgacggaaggaactcgaaatggagcagcagaacgaagctagtgaagagaacaacgatcagcagtcccaagaggttccagaaaaggtcactgtaagttccgatcatgaggaggtcgataatcccgaggagaagccagaagaggagaaagaggaggtaatcgacgatcaagagaacctagcccattcaaggagaacccgcgaggaccggaaggtagaagccataatgcacgcctttgaaaacctggaaaaacggaagaagcggcgagaccagccacttgaacagtccaattctgacgttgaaatcaccaccacaacaagtgagacgcccgtgggggaggagaccaagacagaggctcccgaatccgaggtttcaaacagcgtgagcaacgtaacgatcccctccactccgcaatctgtaggggttaatacaaggaggagttctcaggcgggagacatcgcagctgaaaagctcgtgcccaagcctcctcctgccaagcctagtagaccacgaccaaagagccggatatcccggtacagaacaagttccgcacagaggttgaaaaggcagaaacaagccaacgctcaacaggccgagctgtcacaggcggcactcgaggagggcggatcgaacagtcttgtgaccccaaccgaggccggatctttggacagctccggcgagaaccgcccactcaccggttctgaccctactgtggtctcgatcaccggtagccacgtgaatagggcagcctccaagtaccccaaaaccaagaaatatttagttacagagtggttgaacgacaaagccgagaagcaggaatgtcctgtcgaatgcccactgagaattacgaccgacccgacagtgctggccaccaccctgaacatgctgcccggacttattcattctcccttgatctgcacaactccgaagcactacatcaggttcggcagtcctttcatcccagaacgcaggcgaaggcccctcttgccagatggcacattttcatcctgtaaaaaaagatggatcaagcaggcccttgaggaggggatgacacagacttcatctgttccccaagagactcgtacccagcacttgtatcagagcaatgaaaattcttcttcttccagcatttgcaaggacaatgccgatctgctgtctcccctgaaaaaatggaagtcaagatacctcatggagcagaatgtcacgaagctccttcggccattgtctccagtgaccccgcctcccccaaattcaggaagcaagagtccccagctcgccacccctgggagcagccaccctggagaagaggaatgccggaacgggtactctctgatgttttctcctgtgacttcgcttacaacagcatcgagatgcaatacacccctccagttcgagctgtgtcaccggaaagacctggatctggctaaggttggttacctcgatagtaatacaaattcctgcgcagatcggccaagcctactgaactcgggtcatagtgacctggcaccgcacccttccctcggtcccactagtgaaacggggttcccatcgcgcagcggcgatggccatcagacgcttgttcgaaacagcgatcaggcttttcggaccgagttcaacctcatgtatgcctactctcctctaaatgccatgccaagggcggacggcctctaccgcggttccccattggtaggcgaccggaaacccctccacctggatggagggtactgtagtcctgccgagggctttagctctcgttacgagcacggtctaatgaaggatttgtccaggggatcactgagcccgggaggagagagagcctgcgagggggtgccctcagcccctcaaaaccccccacagcgaaaaaaggtttctcttctggaataccggaagaggaaacaggaagcgaaggagaactcagcgggaggtggaggagatagtgcccagagcaagagcaaatctgccggagcagggcaagggtcctccaacagtgtgagtgatactggagcccacggggttcaaggcagctcggctcgtacaccgtcttctcctcataagaaattctccccgagccattcatctatgtctcacctggaggcagtgagcccaagtgatagtcggggaacctctagtagtcactgcaggccccaggaaaacatatccagtaggtggatggttccaacctcagtcgaacgcctgagagaggggggatctatacctaaagtgcttcggtcatccgtacgggtcgcacagaaaggcgagcctagcccaacatgggagagcaacatcacggaaaaggatagcgaccctgctgacggggaggggccagagaccctgtcctctgcgttatctaaaggagccaccgtttatagtccgtcccggtattcctaccagctcctgcagtgtgattctcccaggactgagtcccagtctctcttacagcagtccagctctccattccgaggccatcccacccagagtcccggatatagctatcgtactaccgccctccgtcctggcaaccctccatcccatggctctagcgaatccagtttgtcttccacctcttactcaagtcccgcacaccccgtgtccaccgattctttggcacctttcactgggaccccagggtactttagtagccagccacactccggaaactcaactggatccaacctgccccgaaggtcgtgtccctcaagtgctgctagcccaaccttgcagggacctagcgattccccaacaagcgactctgtgtcgcaaagctctacgggaacactatcaagcacctcgtttcctcagaattcgaggtcctcactaccgagtgacctcagaacgatttcgctccctagtgccggacagagcgctgtgtaccaggcctccagagtgtcagctgtatccaattcacagcactaccctcaccgcggttctggtggagtacaccagtaccgccttcaaccactccaggggagcggcgtcaaaactcagaccggcctgagttag

SEQ ID NO: 36806 - DNA, 4329 bp, Artificial Sequence
  derived and/or modified sequence
atgagcattgccattcccctcggggttaccacttccgacacgtcttatagcgacatggctgctggctctgatcccgagtcagtcgaggcatcacccgcagtgaatgaaaagagcgtgtactcgactcacaattacggcaccacccaaagacacggctgcagagggttgccctatgccacaatcattccacgttcggacttaaacggcctcccaagtccggtcgaggagcgttgcggagattcaccaaattccgagggcgagacagtccctacttggtgtccctgcggattgtctcaggacggctttcttttaaactgcgacaagtgcagaggcatgagtaggggcaaggtcatcagacttcaccgaaggaaacaggacaatatctctggtggggattcgtctgccactgagagctgggacgaagagctcagcccaagcactgtgctatataccgccacgcagcatactcctacttctattacattgactgtgagaagaacaaagccgaaaaagcggaaaaagagtcctgagaagggccgtgctgcaccaaaaactaagaagatcaagaatagtccttctgaagctcagaatctggatgagaatacaactgaagggtgggaaaatcgtatccggctatggactgaccaatacgaggaagcgtttactaaccagtattctgcagacgtccagaatgcactagagcaacacctgcactcttcaaaggagtttgtcggaaaacctaccattttggatacaataaataagacagagctggcctgtaataacactgtaataggtagtcagatgcagctccagctcggacgcgtaacacgggtacagaagcataggaagattctccgggctgcaagggacctcgccctggacacattaatcatcgaatacagaggtaaggtgatgttgcgccagcagtttgaagtgaacggccacttttttaaaaaaccttatccgttcgtcctgttttactcgaagttcaacggggttgagatgtgcgtagatgcgaggacgttcggaaatgatgcacggtttattaggaggtcgtgcacccctaacgctgaggttcggcatatgatcgctgatggaatgattcacctttgcatatacgctgtgtctgctattaccaaagatgccgaggtgaccattgccttcgattatgaatactccaactgtaactacaaggtcgattgcgcctgtcacaaggggaaccggaactgtcccattcaaaaacggaaccctaatgctacagagctacctctactcccaccgcctccctctctgcccaccatcggggcagaaacccggagaagaaaggctaggagaaaggaactggagatggaacagcagaatgaggcaagcgaggagaacaacgatcagcagtctcaggaagtgcctgagaaagtgacagtgtcatccgaccatgaggaagtggacaacccagaagagaagcccgaagaagagaaagaggaagtaattgacgatcaggagaatctggctcacagccgcaggacccgcgaggataggaaagtcgaggcgatcatgcacgccttcgagaacctcgagaagcgcaagaagcgccgagaccaaccactggaacaatccaactccgacgtagaaatcacaaccacaacttcagaaaccccagtgggtgaggaaacaaagactgaggccccagaatctgaagtttcgaattctgtgtccaacgtgaccatcccatccaccccccagtcggtgggcgtcaatacacgaagatcttctcaggccggagatatcgccgctgaaaaactcgtgcccaagcccccacccgctaaacccagtagaccacggcctaagtctcggataagccgctacaggactagctcagcccagcgactgaaacggcaaaagcaagcgaatgcacagcaggccgagttgagtcaggcggcactggaagagggcggaagcaattcactggtcacaccgaccgaggctgggtccttagattcatccggtgagaatcgcccactgacaggaagcgatccaaccgtggtgagcataaccggtagccacgttaatagggcagcaagtaaataccccaagaccaaaaagtatcttgtgactgaatggttaaatgataaagcggaaaagcaggagtgccccgtggagtgtcccctgcggataactactgatccaaccgtgcttgctacaaccttgaacatgctccccggtctgatccactctcccctcatatgcaccacccccaagcactatatccgatttggcagcccttttattcccgagcgtcgcaggcgacctctgcttccagacgggacattcagcagctgcaagaagaggtggataaaacaagccctggaagaaggaatgacacagacatctagcgtccctcaggaaactagaacacagcatttataccagagcaacgaaaatagctcttcttcaagcatatgcaaagacaacgcggacctgttgtccccgttaaagaagtggaagagcaggtacttaatggagcagaatgtaaccaaactgctccggccactgagccctgtgacccctcctcctcctaattctgggtcgaaaagcccccagctcgctactccgggatcttctcatcctggcgaagaagagtgccgaaatggctatagtctcatgttctctcccgtcacctctcttaccacggctagccgctgtaatacacctctgcagttcgagttgtgtcaccggaaagacttggacctggctaaagtgggatacctcgatagcaacacgaactcttgtgctgatagaccgtctttgctgaacagcggccattcagatctggctccacacccctctctgggcccaacctccgagacaggattcccatctcgtagcggggacggccaccagacactggtgagaaattccgaccaggcctttagaaccgagtttaatctgatgtacgcgtatagccccctgaatgccatgccaagagctgacggcctgtacagaggatcaccactggtgggcgaccgaaagcctcttcacttagatggcggttattgctcccccgctgagggattcagttctagatatgaacacgggctgatgaaggaccttagtcggggaagccttagcccgggaggagaacgcgcttgtgagggagttccttccgcaccacagaatccaccacagaggaagaaagtgtcactgctcgagtaccgcaaaagaaagcaggaagccaaagaaaacagcgctggcggaggaggagactcggctcaatccaaatcaaaatccgctggggctgggcagggctcttcaaacagtgtgtctgacacgggagcccacggcgtgcaaggatcatcggccagaaccccctcttctccccacaagaagttcagcccctcacatagcagcatgtcccatcttgaagcagtgtctcctagcgattccagaggcacgagcagctcccattgcaggccccaggaaaacatcagtagcaggtggatggtgccaactagtgtcgagcggctgagggaggggggatctatcccaaaagtgctgcgcagttcagtgagagtcgctcaaaagggcgagccttctcccacttgggagtccaacattacagaaaaggactccgaccccgctgacggggagggtcccgaaaccttaagcagcgccctgtcaaaaggggctactgtgtacagccccagtagatactcctaccagttattgcagtgcgatagtccccgaacggagtcacagtctctgctgcagcagtccagtagtcccttccggggtcatcccacccagagtcctggttactcgtaccggactacagccttacgcccagggaaccctccatcccacgggagctccgagtcttctctgtcaagcacaagttactcttcccccgctcaccctgtctcaaccgacagtctggcccctttcactgggacccccggttactttagctcacagccacactctggaaattccaccggatccaatctaccgcgtcgttcatgccctagttcagccgcatccccgacgctccagggaccttctgatagcccgacttctgattctgtctcccagagctctaccggaacgttgtctagtaccagcttcccccagaattcccgctccagcctgccatccgatctgagaactatttcacttccatctgccggacaaagtgctgtttaccaggcgagccgcgtgagtgctgtttcaaattctcagcactatccccatcgtggcagcggcggtgtgcaccagtacagactccagccgttacagggttcaggcgtgaaaacacagaccggactgagctag

SEQ ID NO: 36807 - DNA, 489 bp, Artificial Sequence
  derived and/or modified sequence
atgtctattgccatccctttgggcgtcacaaccagtgatacttcatactccgatatggctgctgggagcgatcctgaatcggtagaggcttccccagcggtaaatgagaaaagtgtgtacagcacgcacaactatgggacaacgcagcggcacggatgtagaggtttgccttacgcgacaatcatccccaggagcgatctgaatgggctgccgtcccctgtggaggaacgatgtggtgactctcccaattccgaaggtgaaaccgtaccaacatggtgtccatgcggactgtcgcaggatggctttctactcaactgcgacaagtgccgcggaatgtctcgcggaaaagttatccggctccatcggagaaagcaggataatatctcgggcggagactcctcagccaccgaaagttgggacgaggaactgagcccttcgactgtcctctatacggctacacagcatacgcctacttcaatcactctgtag

SEQ ID NO: 36808 - DNA, 6827 bp, Artificial Sequence
  derived and/or modified sequence
gctcagagactcacgcagccccagtcccgccagtccgccaacacagtagtgccggcccccctctttccctggccctgccccccctccccgcctttggctcgctccgcctttctgccccccacccccacctcacgggtacgggccattcccggccaggaaacgccgtggcgccgcgttgggcctaactcgagtcctgccgcctcccgggagtgccgtgcgccgcagcccgggcccaggccccggcagcgcctgggacaaggtcttcagaactactagcagataatttggggggacttcatattcagaagtctatataaaggattcctcatgtccataacatgttggatgaggctctgcagctcacccccactctcagagtggtcagtctccattaattggaccccgtgatttccaatctctgctgtgttggacgtcatgagcattgcaatccctctgggagtcaccacatcagatacatcctactcagatatggctgctggatcagaccctgaatctgtggaggctagtccagcagttaatgagaagagcgtgtattccactcataattatgggaccactcagaggcatgggtgtcgaggactgccttatgctacgatcatccctcgttctgacctgaatggcctgccgtcgcctgtagaggaacgctgtggagacagcccgaactctgaaggagaaactgtacctacctggtgtccttgtggtctttctcaggatggcttccttctcaactgtgacaagtgcaggggaatgagcagggggaaggttattagacttcatcggcggaagcaggacaacatatcaggtggggatagcagtgcaacagaaagctgggatgaggagctttctccttccactgtgttgtatacagcaacacagcacacacctacaagcatcaccttaactgttagaagaaccaaacccaagaagcggaaaaagagtccagaaaagggtcgtgcagcaccaaagacgaagaaaatcaagaattctccctctgaagcacagaatttagatgagaatacaactgagggctgggaaaatcggataagactatggactgaccagtatgaagaagctttcactaatcagtacagtgcagatgtacagaacgcgcttgaacaacacctacattctagcaaggaatttgtgggcaaacctactattttagacactattaataagactgaattggcctgtaataacacagttattggttcccaaatgcagttacagctgggaagagtcactcgtgttcaaaagcaccggaagatcctgagggctgcaagagatttggctttggacactcttataatagagtatcgtgggaaagtcatgttacgacagcaatttgaggtcaatgggcatttcttcaaaaaaccatacccctttgtgctcttctactcaaaattcaatggtgtagagatgtgtgtggatgcccgtactttcggtaatgatgctcggttcatcagaagatcatgtacaccaaatgcagaggtgcgacacatgattgcagatgggatgattcacctgtgcatctatgctgtgtctgccatcaccaaggatgctgaggtcaccatagcatttgattatgagtatagtaactgtaattataaagtggactgtgcctgtcacaagggaaaccggaattgtcctatacaaaaaaggaatcctaatgctacagaactgccactcctaccacctcctccaagcctacccaccattggagcagagactagacgtagaaaagcacgacggaaagagctagagatggagcagcagaatgaggcttcagaggagaataatgaccagcaatcacaagaagttccagaaaaagtaactgtatccagtgatcatgaggaagtagacaatccagaagaaaaaccagaagaagagaaagaagaggttatagatgaccaggagaacctagctcatagcaggaggaccagggaagatagaaaggtagaagccatcatgcatgcttttgaaaacttagagaaaagaaagaagcggcgggatcagcccttggaacagagcaactctgatgtagagattactacaaccacctcagagactcctgttggtgaagagacaaaaactgaagcccctgaatctgaagttagcaactctgtttcaaatgttaccatcccaagcaccccacagagtgttggtgtgaatacccggaggtcttcccaagcaggggatattgctgcagaaaaactagtccccaagccacctccagcaaagccttctaggccccggccgaagagtcgaatttctcggtacaggaccagttcagcccaaagactaaagcgtcagaagcaggccaatgcacagcaggcagaattgtcacaagctgccttggaagagggaggaagtaacagtttagtaactcctactgaagctggaagtctagacagttcaggagaaaacaggccattaacagggtctgacccaactgtggtgtcaattactggatcccatgtcaaccgtgctgcatctaaataccccaaaaccaaaaagtatctagttacagaatggttgaatgacaaagcagagaagcaagagtgccctgttgagtgccctttacgtatcacaacggatccaactgtactggcaacgaccctaaacatgttaccaggtcttatccattccccgttaatttgcaccacccccaaacactacattcgctttggctcaccctttatccctgagagacgtcgaaggccccttctgcctgatggcacattcagctcctgtaagaagcgctggataaaacaagccttagaagaagggatgactcaaacatcatctgtaccccaagagactagaactcagcacctataccaaagcaatgagaatagtagctcttctagtatctgcaaagacaatgcagacttgttgagcccattaaagaaatggaagtctcgctatctgatggagcagaatgtcaccaagttacttcggcctctgtctccagtcacaccaccccctcccaattcaggctcaaagagtccccagctggccacacctggctcatctcacccaggagaagaggagtgtcgaaatggatacagcctcatgttttcaccagtcacatctcttactactgctagtcgctgcaacactcctctacagtttgagctttgtcaccgaaaagacctggatttggcaaaagtaggataccttgactccaacactaacagctgtgctgatagaccttccctactcaactcaggtcattctgacctggctcctcatccctccctcggacccacttctgagactggtttcccaagcagaagtggagatggacatcagaccctcgtgagaaactcagaccaggcatttcggacagagttcaacttgatgtatgcctactcccctttgaatgctatgcctcgagcagatggactgtatcgaggatctcctctagtgggggataggaagcctttacatttggatgggggatattgttcccctgcagaaggattttccagcagatatgaacatggcttaatgaaagacctctctcgtggatccttgtcacctggtggtgaaagggcctgtgaaggagtcccatctgccccccagaacccaccacagaggaaaaaagtatccctgctggagtaccgaaaacggaaacaagaagctaaggaaaattctgctggtgggggaggtgactctgcacagagcaaaagcaagtctgcaggagctgggcaaggcagcagtaactccgtttccgacactggtgcccatggtgtgcagggatcctcagcccgaactccatcttcccctcacaaaaaattctccccatctcattcctctatgtcccatttggaggcggtaagcccatcagattccagaggcacttcttcatctcactgcagacctcaagagaatatcagcagtaggtggatggttcccacatcagtagaacgactccgagaaggagggagcatccccaaggtcctccgaagcagcgtgagggtggcccaaaagggagagccctctcccacatgggagagtaacatcacagagaaagactcagaccctgcagatggagaaggcccagagacattaagctcagcactctctaaaggagcaacagtttacagcccttccagatacagctaccagctcctgcagtgtgatagtcctcggacagaatcacaaagcctccttcagcagagttcctcccccttcagaggacatcctacacagtctccaggatacagttatcgaactactgcactgagacctggaaaccccccctctcacggttcttcagaatcatccctctcttccacgtcctattccagccccgcccaccctgtgtccacagactcgttggccccatttacggggacaccagggtattttagcagccagccacattctggaaacagcactggcagcaatcttccaaggaggagctgcccttctagtgctgctagccctaccctgcagggaccctcagactcgccaacctcagattcagtttctcagtccagcacaggaactctgagttccacctcctttcctcagaactctaggtcgtcattgccatcagacttacggactatcagtctgcccagtgctgggcagtcagctgtctaccaggcctccagggtatctgcggtttccaattcacagcactacccacaccgtgggagtgggggtgtgcaccagtaccgactccagccactgcaagggtcaggagtcaagactcagacgggactttcctagggcttctggatttgggcaaacagaactgaatgagcccatagctgcttccttccagctgcctctggaacctaggccgagcatattgctgaggaacggggggtacaaggtgccagaggattgggtctggtggacaagaaacaagacttgtggtcacaattggcctctggccttggagaaagctgtaaatcttgtctgaagcagagactataaagaagtttctccctgctgtcaagggtacattgttgacaagcaaatggtgtttcggttagtaacggttctaagtgcaatgagttgtgttgaagcctccgtctcccatccttgcctgtagcccgtagtcacttgtgcagtgaggacatctttttaaatttaaaaaaaaaaaaaaaaaaagttttcaaaggaaaaaaagttaaaagagccaatctcaaagccccaagccatctgagtactgttagggttttatgcacttaagaaaaaaggtaggtatgtaaatgttcatcctaagacaaccattccaaaagcaggtatctggccaatgtgtgtccaccaagaatactgtttatctttgtcttaagatcaccaagaaataggcaaggatagtaaagcttggaacctgcaccaactggagggtgcctggctctttgaagaaaagctcatggtcagctcttgattattcgggagcagattatttgagtagattgtctgagcctccaactgttaccatcctactcccccttcccaagctatttcacagctcagtaacccatgaagtaagtagacaagaaaaggaggaatgagacatgatataggccaattgcattgctacttaccagcttttggcaataaatttcattaggaaggataccgagtggtttgggaatgcttcgaattttattttttctactcccaattaatcaggagttgatgatcccatgagcaggaccgcctccatgattggggagcatgcacttgtgactgcagggtaagagtgggaagataggtttgtggagtggcaccgacaggactgtgattgtgtgtgggcctgccccacatttctctgggggatgcttatgtgagagtgggcccagtgaaagagttaccaagccacccacacccctaacactgttctggatgagagatgagagcagaccggcttctccccatcagtgcattgtgcctgttgtacacccctggaggagccctggagccagcccaggtggggtacacaatctttttaaattccatatggttgccagcttatttctttcacttgtttactgtaatatctggcgtgtttttatttatctaattttgtattcagttataaccatggtaggggtagtgaatatatgacaggtgtaatccctggtgctgcagtggaccttcttttcttttggacaagataatactgtgagtttccctccttccttccctctaatttgttttccttttttccccagcctcttgcatccccttcttttctaccctgtcctacaactatcatatgcacagtcttctctctttgtgtgtgactgttacaaaatttcacttttcaaaatcgaaatcaggtgtttgctcaaatgaggggagattttttttttttttttttttttaaatgctgagacctcagcagagtacttttctttttgttgtttcccccacaaacccatcagtctgggagagcattgggagtggaaatcatgttgcctgggatgctggtttctttgtatattatataaaacgtatgtaaatgtctctccatttgggctggggtttgcattctccccttggctatttaaccaaggggagaggccagcgggcaggcggccctcaccctgcctggcacgtgcagagaccccagccactctgtgtgggcagggtgctgtcaagaccagacctcttgggggggtaggggcgggggggtggggggaactcttggaagggaagaagtatcacttctttctcaagtggagtgtttacaccttgctgtaacatttgaactttcacaagagatgtaataattttgataataaaattcttaaccataataatcataaagttgagaa

SEQ ID NO: 36809 - DNA, 6582 bp, Artificial Sequence
  derived and/or modified sequence
ctcgagtcctgccgcctcccgggagtgccgtgcgccgcagcccgggcccaggccccggcagcgcctgggacaaggattcctcatgtccataacatgttggatgaggctctgcagctcacccccactctcagagtggtcagtctccattaattggaccccgtgatttccaatctctgctgtgttggacgtcatgagcattgcaatccctctgggagtcaccacatcagatacatcctactcagatatggctgctggatcagaccctgaatctgtggaggctagtccagcagttaatgagaagagcgtgtattccactcataattatgggaccactcagaggcatgggtgtcgaggactgccttatgctacgatcatccctcgttctgacctgaatggcctgccgtcgcctgtagaggaacgctgtggagacagcccgaactctgaaggagaaactgtacctacctggtgtccttgtggtctttctcaggatggcttccttctcaactgtgacaagtgcaggggaatgagcagggggaaggttattagacttcatcggcggaagcaggacaacatatcaggtggggatagcagtgcaacagaaagctgggatgaggagctttctccttccactgtgttgtatacagcaacacagcacacacctacaagcatcaccttaactgttagaagaaccaaacccaagaagcggaaaaagagtccagaaaagggtcgtgcagcaccaaagacgaagaaaatcaagaattctccctctgaagcacagaatttagatgagaatacaactgagggctgggaaaatcggataagactatggactgaccagtatgaagaagctttcactaatcagtacagtgcagatgtacagaacgcgcttgaacaacacctacattctagcaaggaatttgtgggcaaacctactattttagacactattaataagactgaattggcctgtaataacacagttattggttcccaaatgcagttacagctgggaagagtcactcgtgttcaaaagcaccggaagatcctgagggctgcaagagatttggctttggacactcttataatagagtatcgtgggaaagtcatgttacgacagcaatttgaggtcaatgggcatttcttcaaaaaaccatacccctttgtgctcttctactcaaaattcaatggtgtagagatgtgtgtggatgcccgtactttcggtaatgatgctcggttcatcagaagatcatgtacaccaaatgcagaggtgcgacacatgattgcagatgggatgattcacctgtgcatctatgctgtgtctgccatcaccaaggatgctgaggtcaccatagcatttgattatgagtatagtaactgtaattataaagtggactgtgcctgtcacaagggaaaccggaattgtcctatacaaaaaaggaatcctaatgctacagaactgccactcctaccacctcctccaagcctacccaccattggagcagagactagacgtagaaaagcacgacggaaagagctagagatggagcagcagaatgaggcttcagaggagaataatgaccagcaatcacaagaagttccagaaaaagtaactgtatccagtgatcatgaggaagtagacaatccagaagaaaaaccagaagaagagaaagaagaggttatagatgaccaggagaacctagctcatagcaggaggaccagggaagatagaaaggtagaagccatcatgcatgcttttgaaaacttagagaaaagaaagaagcggcgggatcagcccttggaacagagcaactctgatgtagagattactacaaccacctcagagactcctgttggtgaagagacaaaaactgaagcccctgaatctgaagttagcaactctgtttcaaatgttaccatcccaagcaccccacagagtgttggtgtgaatacccggaggtcttcccaagcaggggatattgctgcagaaaaactagtccccaagccacctccagcaaagccttctaggccccggccgaagagtcgaatttctcggtacaggaccagttcagcccaaagactaaagcgtcagaagcaggccaatgcacagcaggcagaattgtcacaagctgccttggaagagggaggaagtaacagtttagtaactcctactgaagctggaagtctagacagttcaggagaaaacaggccattaacagggtctgacccaactgtggtgtcaattactggatcccatgtcaaccgtgctgcatctaaataccccaaaaccaaaaagtatctagttacagaatggttgaatgacaaagcagagaagcaagagtgccctgttgagtgccctttacgtatcacaacggatccaactgtactggcaacgaccctaaacatgttaccaggtcttatccattccccgttaatttgcaccacccccaaacactacattcgctttggctcaccctttatccctgagagacgtcgaaggccccttctgcctgatggcacattcagctcctgtaagaagcgctggataaaacaagccttagaagaagggatgactcaaacatcatctgtaccccaagagactagaactcagcacctataccaaagcaatgagaatagtagctcttctagtatctgcaaagacaatgcagacttgttgagcccattaaagaaatggaagtctcgctatctgatggagcagaatgtcaccaagttacttcggcctctgtctccagtcacaccaccccctcccaattcaggctcaaagagtccccagctggccacacctggctcatctcacccaggagaagaggagtgtcgaaatggatacagcctcatgttttcaccagtcacatctcttactactgctagtcgctgcaacactcctctacagtttgagctttgtcaccgaaaagacctggatttggcaaaagtaggataccttgactccaacactaacagctgtgctgatagaccttccctactcaactcaggtcattctgacctggctcctcatccctccctcggacccacttctgagactggtttcccaagcagaagtggagatggacatcagaccctcgtgagaaactcagaccaggcatttcggacagagttcaacttgatgtatgcctactcccctttgaatgctatgcctcgagcagatggactgtatcgaggatctcctctagtgggggataggaagcctttacatttggatgggggatattgttcccctgcagaaggattttccagcagatatgaacatggcttaatgaaagacctctctcgtggatccttgtcacctggtggtgaaagggcctgtgaaggagtcccatctgccccccagaacccaccacagaggaaaaaagtatccctgctggagtaccgaaaacggaaacaagaagctaaggaaaattctgctggtgggggaggtgactctgcacagagcaaaagcaagtctgcaggagctgggcaaggcagcagtaactccgtttccgacactggtgcccatggtgtgcagggatcctcagcccgaactccatcttcccctcacaaaaaattctccccatctcattcctctatgtcccatttggaggcggtaagcccatcagattccagaggcacttcttcatctcactgcagacctcaagagaatatcagcagtaggtggatggttcccacatcagtagaacgactccgagaaggagggagcatccccaaggtcctccgaagcagcgtgagggtggcccaaaagggagagccctctcccacatgggagagtaacatcacagagaaagactcagaccctgcagatggagaaggcccagagacattaagctcagcactctctaaaggagcaacagtttacagcccttccagatacagctaccagctcctgcagtgtgatagtcctcggacagaatcacaaagcctccttcagcagagttcctcccccttcagaggacatcctacacagtctccaggatacagttatcgaactactgcactgagacctggaaaccccccctctcacggttcttcagaatcatccctctcttccacgtcctattccagccccgcccaccctgtgtccacagactcgttggccccatttacggggacaccagggtattttagcagccagccacattctggaaacagcactggcagcaatcttccaaggaggagctgcccttctagtgctgctagccctaccctgcagggaccctcagactcgccaacctcagattcagtttctcagtccagcacaggaactctgagttccacctcctttcctcagaactctaggtcgtcattgccatcagacttacggactatcagtctgcccagtgctgggcagtcagctgtctaccaggcctccagggtatctgcggtttccaattcacagcactacccacaccgtgggagtgggggtgtgcaccagtaccgactccagccactgcaagggtcaggagtcaagactcagacgggactttcctagggcttctggatttgggcaaacagaactgaatgagcccatagctgcttccttccagctgcctctggaacctaggccgagcatattgctgaggaacggggggtacaaggtgccagaggattgggtctggtggacaagaaacaagacttgtggtcacaattggcctctggccttggagaaagctgtaaatcttgtctgaagcagagactataaagaagtttctccctgctgtcaagggtacattgttgacaagcaaatggtgtttcggttagtaacggttctaagtgcaatgagttgtgttgaagcctccgtctcccatccttgcctgtagcccgtagtcacttgtgcagtgaggacatctttttaaatttaaaaaaaaaaaaaaaaaaagttttcaaaggaaaaaaagttaaaagagccaatctcaaagccccaagccatctgagtactgttagggttttatgcacttaagaaaaaaggtaggtatgtaaatgttcatcctaagacaaccattccaaaagcaggtatctggccaatgtgtgtccaccaagaatactgtttatctttgtcttaagatcaccaagaaataggcaaggatagtaaagcttggaacctgcaccaactggagggtgcctggctctttgaagaaaagctcatggtcagctcttgattattcgggagcagattatttgagtagattgtctgagcctccaactgttaccatcctactcccccttcccaagctatttcacagctcagtaacccatgaagtaagtagacaagaaaaggaggaatgagacatgatataggccaattgcattgctacttaccagcttttggcaataaatttcattaggaaggataccgagtggtttgggaatgcttcgaattttattttttctactcccaattaatcaggagttgatgatcccatgagcaggaccgcctccatgattggggagcatgcacttgtgactgcagggtaagagtgggaagataggtttgtggagtggcaccgacaggactgtgattgtgtgtgggcctgccccacatttctctgggggatgcttatgtgagagtgggcccagtgaaagagttaccaagccacccacacccctaacactgttctggatgagagatgagagcagaccggcttctccccatcagtgcattgtgcctgttgtacacccctggaggagccctggagccagcccaggtggggtacacaatctttttaaattccatatggttgccagcttatttctttcacttgtttactgtaatatctggcgtgtttttatttatctaattttgtattcagttataaccatggtaggggtagtgaatatatgacaggtgtaatccctggtgctgcagtggaccttcttttcttttggacaagataatactgtgagtttccctccttccttccctctaatttgttttccttttttccccagcctcttgcatccccttcttttctaccctgtcctacaactatcatatgcacagtcttctctctttgtgtgtgactgttacaaaatttcacttttcaaaatcgaaatcaggtgtttgctcaaatgaggggagattttttttttttttttttttttaaatgctgagacctcagcagagtacttttctttttgttgtttcccccacaaacccatcagtctgggagagcattgggagtggaaatcatgttgcctgggatgctggtttctttgtatattatataaaacgtatgtaaatgtctctccatttgggctggggtttgcattctccccttggctatttaaccaaggggagaggccagcgggcaggcggccctcaccctgcctggcacgtgcagagaccccagccactctgtgtgggcagggtgctgtcaagaccagacctcttgggggggtaggggcgggggggtggggggaactcttggaagggaagaagtatcacttctttctcaagtggagtgtttacaccttgctgtaacatttgaactttcacaagagatgtaataattttgataataaaattcttaaccataataatcataaagttgagaa

SEQ ID NO: 36810 - DNA, 921 bp, Artificial Sequence
  derived and/or modified sequence
gctcagagactcacgcagccccagtcccgccagtccgccaacacagtagtgccggcccccctctttccctggccctgccccccctccccgcctttggctcgctccgcctttctgccccccacccccacctcacgggtacgggccattcccggccaggaaacgccgtggcgccgcgttgggcctaactcgagtcctgccgcctcccgggagtgccgtgcgccgcagcccgggcccaggccccggcagcgcctgggacaaggtcttcagaactactagcagataatttggggggacttcatattcagaagtctatataaaggattcctcatgtccataacatgttggatgaggctctgcagctcacccccactctcagagtggtcagtctccattaattggaccccgtgatttccaatctctgctgtgttggacgtcatgagcattgcaatccctctgggagtcaccacatcagatacatcctactcagatatggctgctggatcagaccctgaatctgtggaggctagtccagcagttaatgagaagagcgtgtattccactcataattatgggaccactcagaggcatgggtgtcgaggactgccttatgctacgatcatccctcgttctgacctgaatggcctgccgtcgcctgtagaggaacgctgtggagacagcccgaactctgaaggagaaactgtacctacctggtgtccttgtggtctttctcaggatggcttccttctcaactgtgacaagtgcaggggaatgagcagggggaaggttattagacttcatcggcggaagcaggacaacatatcaggtggggatagcagtgcaacagaaagctgggatgaggagctttctccttccactgtgttgtatacagcaacacagcacacacctacaagcatcacctta

SEQ ID NO: 36811 - protein, 1512 aa, Artificial Sequence
  derived and/or modified sequence
MVSEKSHLGNPQEPVQEEPKTRLLSMTVRRGPRSLPPIPSTSRTGFAEFSMRGRMREKLQAARSKAESALLQEIPTPRPRRLRSPSKKELETEFGTEPGKEVERTQQEVDSQSYSRVKFHDSARKIKPKPQVPPGFPSAEEAYNFFTFNFDPEPEGSEEKPKARHRAGTNQEEEEGEEEEPPAQGGGKEMDEEELLNGDDAEDFLLGLDHVADDFVAVRPADYESIHDRLQMEREMLFIPSRQTVPTYKKLPENVQPRFLEDEGLYTGVRPEVARTNQNIMENRLLMQDPERRWFGDDGRILALPNPIKPFPSRPPVLTQEQSIKAELETLYKKAVKYVHSSQHVIRSGDPPGNFQLDIDISGLIFTHHPCFSREHVLAAKLAQLYDQYLARHQRNKAKFLTDKLQALRNAVQTGLDPEKPHQSLDTIQKTINEYKSEIRQTRKFRDAEQEKDRTLLKTIIKVWKEMKSLREFQRFTNTPLKLVLRKEKADQKADEEAYEAEIQAEISELLEEHTEEYAQKMEEYRTSLQQWKAWRKVQRAKKKKRKQAAEEHPGDEIAEPYPEEDLVKPSPPEPTDRAVIEQEVRERAAQSRRRPWEPTLVPELSLAGSVTPNDQCPRAEVSRREDVKKRSVYLKVLFNNKEVSRTVSRPLGADFRVHFGQIFNLQIVNWPESLTLQVYETVGHSSPTLLAEVFLPIPETTVVTGRAPTEEVEFSSNQHVTLDHEGVGSGVPFSFEADGSNQLTLMTSGKVSHSVAWAIGENGIPLIPPLSQQNIGFRSALKKADAISSIGTSGLTDMKKLAKWAAESKLDPNDPNNAPLMQLISVATSGESYVPDFFRLEQLQQEFNFVSDQELNRSKRFRLLHLRSQEVPEFRNYKQVPVYDREIMEKVFQDYEKRLRDRNVIETKEHIDTHRAIVAKYLQQVRESVINRFLIAKQYFLLADMIVEEEVPNISILGLSLFKLAEQKRPLRPRRKGRKKVTAQNLSDGDIKLLVNIVRAYDIPVRKPAVSKFQQPSRSSRMFSEKHAASPSTYSPTHNADYPLGQVLVRPFVEVSFQRTVCHTTTAEGPNPSWNEELELPFRAPNGDYSTASLQSVKDVVFINIFDEVLHDVLEDDRERGSGIHTRIERHWLGCVKMPFSTIYFQARFESQEDEKLLQATEKFQAECALKFPNRQCLTTVIDISGKTVFITRYLKPLNPPQELLNVYPNNLQATAELVARYVSLIPFLPDTVSFGGICDLWSTSDQFLDLLAGDEEEHAVLLCNYFLSLGKKAWLLMGNAIPEGPTAYVLTWEQGRYLIWNPCSGHFYGQFDTFCPLKNVGCLIGPDNIWFNIQRYESPLRINFDVTRPKLWKSFFSRSLPYPGLSSVQPEELIYQRSDKAAAAELQDRIEKILKEKIMDWRPRHLTRWNRYCTSTLRHFLPLLEKSQGEDVEDDHRAELLKQLGDYRFSGFPLHMPYSEVKPLIDAVYSTGVHNIDVPNVEFALAVYIHPYPKNVLSVWIYVASLIRNR

SEQ ID NO: 36812 - protein, 1620 aa, Artificial Sequence
  derived and/or modified sequence
MNPREEKVKIITEEFIENDEDADMGRQNKNSKVRRQPRKKQPPTAVPKEMVSEKSHLGNPQEPVQEEPKTRLLSMTVRRGPRSLPPIPSTSRTGFAEFSMRGRMREKLQAARSKAESALLQEIPTPRPRRLRSPSKKELETEFGTEPGKEVERTQQEVDSQSYSRVKFHDSARKIKPKPQVPPGFPSAEEAYNFFTFNFDPEPEGSEEKPKARHRAGTNQEEEEGEEEEPPAQGGGKEMDEEELLNGDDAEDFLLGLDHVADDFVAVRPADYESIHDRLQMEREMLFIPSRQTVPTYKKLPENVQPRFLEDEGLYTGVRPEVARTNQNIMENRLLMQDPERRWFGDDGRILALPNPIKPFPSRPPVLTQEQSIKAELETLYKKAVKYVHSSQHVIRSGDPPGNFQLDIDISGLIFTHHPCFSREHVLAAKLAQLYDQYLARHQRNKAKFLTDKLQALRNAVQTGLDPEKPHQSLDTIQKTINEYKSEIRQTRKFRDAEQEKDRTLLKTIIKVWKEMKSLREFQRFTNTPLKLVLRKEKADQKADEEAYEAEIQAEISELLEEHTEEYAQKMEEYRTSLQQWKAWRKVQRAKKKKRKQAAEEHPGDEIAEPYPEEDLVKPSPPEPTDRAVIEQEVRERAAQSRRRPWEPTLVPELSLAGSVTPNDQCPRAEVSRREDVKKRSVYLKVLFNNKEVSRTVSRPLGADFRVHFGQIFNLQIVNWPESLTLQVYETVGHSSPTLLAEVFLPIPETTVVTGRAPTEEVEFSSNQHVTLDHEGVGSGVPFSFEADGSNQLTLMTSGKVSHSVAWAIGENGIPLIPPLSQQNIGFRSALKKADAISSIGTSGLTDMKKLAKWAAESKLDPNDPNNAPLMQLISVATSGESYVPDFFRLEQLQQEFNFVSDQELNRSKRFRLLHLRSQEVPEFRNYKQVPVYDREIMEKVFQDYEKRLRDRNVIETKEHIDTHRAIVAKYLQQVRESVINRFLIAKQYFLLADMIVEEEVPNISILGLSLFKLAEQKRPLRPRRKGRKKVTAQNLSDGDIKLLVNIVRAYDIPVRKPAVSKFQQPSRSSRMFSEKHAASPSTYSPTHNADYPLGQVLVRPFVEVSFQRTVCHTTTAEGPNPSWNEELELPFRAPNGDYSTASLQSVKDVVFINIFDEVLHDVLEDDRERGSGIHTRIERHWLGCVKMPFSTIYFQARIDGTFKIDIPPVLLGYSKERNMILERGFDSVRSLSEGSYITLFITIEPQLVPGESIREKFESQEDEKLLQATEKFQAECALKFPNRQCLTTVIDISGKTVFITRYLKPLNPPQELLNVYPNNLQATAELVARYVSLIPFLPDTVSFGGICDLWSTSDQFLDLLAGDEEEHAVLLCNYFLSLGKKAWLLMGNAIPEGPTAYVLTWEQGRYLIWNPCSGHFYGQFDTFCPLKNVGCLIGPDNIWFNIQRYESPLRINFDVTRPKLWKSFFSRSLPYPGLSSVQPEELIYQRSDKAAAAELQDRIEKILKEKIMDWRPRHLTRWNRYCTSTLRHFLPLLEKSQGEDVEDDHRAELLKQLGDYRFSGFPLHMPYSEVKPLIDAVYSTGVHNIDVPNVEFALAVYIHPYPKNVLSVWIYVASLIRNR

SEQ ID NO: 36813 - DNA, 4539 bp, Artificial Sequence
  derived and/or modified sequence
atggttagcgaaaagtcccacttggggaatccgcaggagccagtgcaagaagagccgaaaacaaggctcctgagcatgacagtccgcagggggcctcgctcacttccgcctatacctagtactagtagaaccgggtttgctgagttttccatgagaggcagaatgcgggagaaattgcaagctgctcggagtaaggcggagtctgcactgcttcaggaaattcctaccccaaggccacggcgcctgcgttctccctcaaagaaagagttggaaaccgaattcggcactgagcccggcaaggaggttgagcggactcaacaggaagttgactcccagagctattcacgtgttaagttccacgattcagcgcgtaagataaagcccaagccacaagtgcccccaggcttcccaagcgcagaggaggcatataactttttcacttttaactttgaccctgagccggaggggagcgaagaaaagcctaaggcccgacacagggccggaaccaaccaagaggaggaagagggggaagaagaggagccaccagcccagggaggaggtaaggaaatggatgaggaagagctgcttaatggggatgatgccgaggactttctgcttggcctcgatcatgtcgccgacgactttgtcgccgtacgtcccgctgactatgagagtatccacgatcgactacaaatggagcgggaaatgctctttattccctctagacagaccgtcccaacctacaagaaattacccgagaacgtgcagccccggttcctggaagacgagggactgtacaccggagttagaccagaggttgctaggacaaaccagaatattatggaaaatcgcctgctgatgcaggacccagaaagaaggtggttcggcgatgatggccgcattctcgctctcccaaaccctataaagccatttccttcaaggccacccgtgctaactcaagagcagtctattaaggccgagctggagacactgtataagaaggctgttaaatacgtccacagttcccagcacgtgataaggtctggcgaccctcctggaaactttcagctggacatagacattagcgggctgatcttcacacatcacccctgcttctctagagagcatgttcttgctgcaaaattggcccaactgtacgatcagtacctggcccggcaccagcgaaacaaggctaagtttctgaccgacaagctgcaggcgctgcgaaatgccgtccagactggccttgatcctgagaaacctcaccaatctctggatactattcaaaagaccattaacgagtacaaatcagagatcaggcagacaagaaaattcagggacgcagagcaggagaaggacagaacactgctgaagaccataatcaaggtttggaaagaaatgaagtcactgcgcgagttccaacgcttcaccaacacccccctcaaactcgttctgcggaaggagaaagctgaccagaaggccgacgaggaggcctacgaagctgagattcaggccgaaatttctgagctcctagaggagcacaccgaggagtacgcacagaagatggaagaatataggacatctctgcagcagtggaaggcctggcgcaaagttcaacgcgccaagaagaaaaagagaaaacaggccgctgaggaacacccaggggacgaaatcgccgagccttacccagaggaggaccttgtgaaaccttctccacccgaacctacggacagagccgtaattgagcaggaggtgcgcgagcgagctgcacagagtaggaggcgcccttgggaacctacactggtgcctgaactgtctcttgcaggatcagtgaccccaaatgatcagtgccccagagccgaagtgagccgtagggaagatgtgaaaaagcgctctgtgtatctgaaagtcctgtttaataacaaggaggtaagccggactgtcagccggcctctgggcgccgatttccgcgtccatttcggccaaatcttcaatctgcagattgtcaattggcctgaaagtctcacgctgcaggtgtatgagactgtggggcactcttctcccacactgctcgctgaagttttccttccaataccagagacaaccgtggtgactgggcgcgctcccaccgaggaagttgaattctccagcaatcagcatgtaactctcgatcacgagggagtgggctctggagttccatttagcttcgaggcggacggcagtaaccaattgactctcatgactagcggaaaagtcagccattccgtggcatgggcaattggcgagaacggaattccgttgataccacccctgagccagcagaacatcggtttcaggtccgccctcaagaaggctgacgccatctcgtccattgggacatccggtctcacagatatgaaaaagctcgcgaagtgggccgctgagagcaaactggaccccaacgatccaaataacgcccccctcatgcagctgatatcagtcgcgacgtcgggtgagagttatgttcctgatttcttccggttggagcagctgcagcaggagttcaactttgtctcagatcaagagcttaacagaagtaaaagatttaggctcctgcacttgcgctctcaggaagtccccgagtttaggaactataaacaggtgcctgtgtacgatcgtgaaatcatggaaaaggtgtttcaggactacgagaagcgccttcgtgaccgcaatgttatagaaaccaaggaacatatagatacccaccgtgctatagtggctaaatacctgcaacaggtgagagaatctgtcataaaccggtttctcatcgctaagcagtatttcctgctggcggatatgatcgtggaggaggaggtgccaaacatcagtattctggggctcagcctgttcaaacttgccgaacagaagagaccccttagacctaggcggaaagggcgcaagaaagtgacagctcaaaacctctctgatggagacatcaagctgctggtcaatatcgtcagggcatacgatatcccggtccgaaagcccgccgtgagcaaattccagcagccgagccgatctagccggatgttctcagaaaaacacgctgcaagcccatcaacctatagtcccactcacaacgccgattaccccctcggccaggtgctcgtgcggccttttgtggaagtaagtttccagcggaccgtatgtcacactacgacagcagaagggcccaaccccagctggaatgaggaattagagcttcccttcagggcaccaaacggagactattctactgcttccctccagtccgttaaggatgtggtgtttattaatattttcgatgaggtgctgcacgatgtgctcgaggatgatcgcgagagagggtccgggatacatacaagaatcgaacggcactggttaggctgtgtcaaaatgccgtttagcacaatatactttcaggcgcggttcgagtcccaggaagacgagaaattgttgcaggcaactgagaagtttcaagccgagtgcgcactgaagttccctaatcgccagtgtttaacaacagtgattgacatttccggcaagaccgtgttcataactcggtatctaaagcctttgaatcccccacaagaactgcttaacgtctacccgaacaacttgcaggccactgctgaactggtggcgcggtatgtttctctgataccgttcttgccagacaccgtgtcctttggcggcatttgcgacctctggagtacttctgaccaattcctcgatctgcttgcaggggacgaagaggagcatgcagttctgctctgcaattattttctctccctgggcaaaaaagcatggcttctcatgggaaatgctattcccgagggacccacagcctacgtcctcacgtgggaacaggggcgttatctgatttggaatccctgctcggggcacttttacggccagtttgacactttctgcccattgaagaatgtgggctgcttgatcggccccgataacatttggttcaatattcaacgttatgaaagtcccttacgtatcaatttcgacgtaacacgtcctaaactatggaagagcttcttctccaggagcctgccatacccaggattgagcagcgttcagcctgaagagctgatctatcagcgctcagacaaagcggcagcggccgagctgcaggatcggattgagaagatcttaaaagagaagatcatggattggaggcctcgacaccttactcgctggaataggtattgcacttctaccctacggcactttctcccccttcttgagaaatctcaaggagaggatgtggaggacgatcaccgtgcagagctcttaaaacagctcggggactatcgcttctctggatttcccctgcacatgccttatagcgaagtaaagcctttgatagacgcagtgtactccaccggggtgcacaatattgacgtccctaacgtggagttcgccctggccgtatatatccacccttatccgaaaaacgttctgtctgtgtggatctacgtcgccagtctcattcgaaaccgatag

SEQ ID NO: 36814 - DNA, 4863 bp, Artificial Sequence
  derived and/or modified sequence
atgaacccacgggaggagaaagtgaagatcatcaccgaggaatttatcgagaacgacgaagacgcagacatgggacgacagaacaaaaatagcaaagtaagaaggcagccacggaaaaagcagccccccacggcggtaccaaaagagatggtgtcagagaagagtcatctcggtaatccgcaggaacctgtgcaggaggagccaaagaccagacttctttcaatgaccgtgcggcggggcccccgaagcctcccgcctatccccagtacctcacgtactggctttgctgaattctcaatgcgggggaggatgcgcgagaagttacaagccgcaagatctaaggcagagtcagccctcctccaagagatccctaccccacgacctcgtcgcttgcggtcaccctctaagaaggaactcgagaccgagttcgggaccgagccaggtaaagaagtggagcggacccagcaggaggtcgattcgcaaagttatagtagggttaaatttcatgactcggccagaaaaatcaagcctaagccccaggtccctcccggttttccatcagcagaggaagcttacaatttcttcactttcaattttgaccccgagcctgaaggtagcgaggagaagccaaaggctaggcacagggcaggtaccaaccaggaagaagaagagggcgaagaggaggaaccgccagcccagggaggtggcaaggagatggatgaggaggaacttcttaacggcgatgacgccgaggatttcctcttgggactggaccacgtcgcggatgattttgtggctgtgcggcccgcagattatgagagcatccacgataggctccaaatggaacgggagatgctgtttatcccatcgaggcagacagtgcccacctacaaaaagctgccggaaaatgtccaacctcggtttttggaggacgaaggcctgtatacaggtgtacgacctgaggtggcgcgcactaaccagaatatcatggagaatcgactgctaatgcaggacccagaaagaagatggtttggcgatgacggacgcattctggcactcccgaatcccatcaaaccatttccttctaggcctcccgtgctgactcaggagcaaagcatcaaggccgagctcgagaccttgtataagaaagctgtcaagtacgtccactcatcacaacatgtgataaggagcggcgacccccccggcaactttcagctcgatatcgacatttcagggttaatcttcacccatcacccctgcttcagccgagaacatgtgctggccgcaaagctggcacagttatacgatcagtacttagccaggcaccagcggaataaggcaaagttcctgaccgataaacttcaggcattgcgtaatgcggtccagactggactggatcccgaaaaaccgcatcagtctctcgataccattcaaaagacgataaatgaatacaagtcagagatacgtcagacaaggaaatttagagacgctgaacaggagaaagatcggaccttgctgaaaacaatcatcaaagtttggaaggagatgaagagcctcagggaatttcagcgctttactaacacaccactcaaactggtgttgcggaaggaaaaggcggaccaaaaggccgacgaggaagcttatgaagctgagattcaggctgagatatccgaattgttagaagaacacacagaggaatatgcgcagaaaatggaggagtataggacttctctccagcaatggaaagcttggaggaaggttcagcgcgccaaaaaaaaaaaaaggaagcaagccgcagaggaacaccccggtgacgaaattgctgagccctacccagaagaagacctcgtaaagccctccccccccgagccaactgaccgagccgtcatagagcaggaggtgcgagagcgtgccgcccagtcccgacgtcggccttgggaacccacactggttccggagctctccttggccggaagcgtgaccccgaatgaccagtgcccaagagccgaagtgtcccggcgagaggacgttaagaagaggagtgtctatctgaaagtgctgttcaataacaaggaagtaagcagaaccgtctctcgtccactcggggctgatttccgcgtccactttggtcagatctttaacctgcaaatcgtcaactggcccgagagcctgacgctgcaggtttatgagacggtgggccattcctcgcctaccctgctggcagaggtgtttctgcctattccagaaacgacagtcgtgactggaagagctccaacggaagaggtggagttcagctcgaatcagcacgtgacactcgatcatgagggcgtggggtcaggcgttcccttttcctttgaagccgacggctcaaaccaacttacgttgatgacctccgggaaagtgtcacacagcgtggcatgggcgataggggagaatggcattcccctgattccccctctgtcccagcagaacattggatttaggtccgcccttaagaaggctgatgccatctcctccatcggcacctccggtctaacggacatgaaaaagctggccaagtgggcggcggagtcgaagctggatcccaacgaccccaacaacgcccctttgatgcagctgatcagcgtggctactagcggcgaaagttatgtaccagatttctttagacttgagcagctgcaacaggagttcaactttgtaagcgaccaggagttaaacaggagcaagcggttcagactcctgcacttgagaagtcaggaggtgcctgagttcagaaactataagcaggttcctgtgtatgacagggagatcatggagaaggtcttccaggattatgaaaaacgcctgcgcgacaggaacgttattgagacaaaagagcatattgatacccaccgggctatcgtcgctaagtatctccagcaggtccgggagtccgtgatcaataggtttctgatcgctaagcagtacttcctactggcagacatgatcgtcgaggaggaagtgccaaatatctccattctgggactgagcctctttaagctcgccgaacagaaaagacccctaaggccacggagaaagggacgaaagaaggtgaccgcccagaatctgtccgacggcgacatcaagctccttgtgaacattgtaagggcatatgacattcccgttcggaagcccgcagtcagcaagttccagcagccttccaggtcctccaggatgttcagcgagaagcacgctgcctcgcctagcacatacagccccacacataacgcagattatcccctgggacaggtgctggtacggcccttcgtggaggtctctttccagcgcaccgtctgtcatactacgactgccgagggacccaatccttcttggaatgaagagttggaactgcccttcagagcaccaaacggtgactattcaacagcctctctgcagagcgtcaaagacgtagtgtttattaatatttttgatgaagtgctgcacgacgtgttggaggacgatcgggaaagggggtccggcatccatacacgaattgaaagacactggctggggtgtgtaaaaatgccatttagtacaatttactttcaagctcgcatcgatggcacgttcaagatcgacatacctcctgtgcttctgggctatagcaaggagcggaacatgatcctggagcggggttttgattcagtgagatctttgtccgagggctcatatattacactcttcatcaccatcgagccgcagctggtgcccggggagagcattcgggagaaatttgagagtcaagaagacgagaagctattgcaggccactgaaaaattccaagccgaatgcgctttgaagtttccaaataggcagtgtctgacgacagtgattgacatcagcggcaagactgtgtttatcacccgctatctaaaacccttaaaccctccccaagagcttttaaacgtgtacccaaacaacttacaagctacggcagagctcgtcgcgcggtatgtatcattgattccattcctccccgacactgtctccttcggcgggatatgtgacttgtggtcaacctccgatcaatttcttgacctgctcgcgggggatgaagaagagcacgctgtcctgctgtgtaattacttcctgtcattgggaaaaaaggcatggttactcatgggcaacgctattccggaaggaccaaccgcttacgtccttacctgggagcagggccgatatctgatctggaatccgtgtagcggccacttctacggccagttcgacaccttctgccctctgaagaatgtcggatgtctgatcgggcccgacaatatctggtttaacatccagcgctacgagtcccctctgcgaattaacttcgacgtgacgcgtcccaaactgtggaagtccttctttagtaggagccttccatatccaggcttatcatcggtccaacccgaggaactcatttaccagaggagcgacaaagcagccgccgcggaacttcaggacagaatcgaaaaaattttgaaggagaaaattatggattggagaccacggcatctgacccgctggaatcgctattgcacatcaacccttcgacatttcctacccctcctggagaaaagccagggcgaggacgtagaagatgaccacagagctgagcttctaaaacagttgggggactataggttttccggttttccactgcatatgccctattcagaagtgaaacctctgatcgatgctgtctactctactggtgtgcacaatatcgacgtaccaaacgtggagtttgccttggcggtgtacatccacccatatcctaaaaatgttcttagcgtgtggatatacgtcgccagcttgatcagaaaccgttag

SEQ ID NO: 36815 - DNA, 4863 bp, Artificial Sequence
  derived and/or modified sequence
atgaaccctcgggaggagaaagttaaaattataacagaagagtttatcgaaaatgatgaggacgcagatatgggccggcagaacaaaaactccaaagtgaggcgccagccccgcaagaagcagccgcccactgccgtgcccaaggagatggtttccgagaaaagccacctgggaaacccccaagaaccagtgcaggaagaaccaaagacaagactgctttcgatgacagtgcgaaggggcccccggtccttacctcctatcccaagtaccagccgcaccgggttcgccgagttctccatgcgtggaaggatgcgggaaaagttgcaagccgccaggtccaaggctgagtctgcactacttcaggagatcccaacacctcgaccacgacgcctgcgatccccgagcaaaaaagagctagagaccgagtttggtactgaacccggcaaggaggttgaacgcacgcagcaggaggtggactctcagtcttactccagggtgaagtttcacgatagcgctcgcaaaataaaaccaaagcctcaagtgccgccgggtttccctagtgccgaggaagcttacaatttttttacctttaattttgaccccgagccagagggtagtgaagagaaaccaaaggctcggcatcgtgcaggcactaaccaggaagaagaggagggggaagaagaagagcctcctgcacagggaggagggaaggaaatggacgaagaggagctcctcaacggtgatgatgcggaggacttcctgctgggccttgaccacgtggccgatgactttgtagctgtacggccagcagattatgaatcaattcacgaccgcttgcagatggagcgggagatgctctttatcccatcgaggcagactgtgcctacctacaaaaagttaccagagaacgtacagcctaggtttctagaggacgagggtttgtacacaggagtccgcccagaagtggcacgtacaaatcaaaacatcatggaaaacaggttactgatgcaggatccagagcgacgttggtttggcgatgacggtcgtatcctggctttgcctaatccgatcaagcctttcccaagccgcccaccagtgttgacccaggagcagtctatcaaggcggagcttgagacgctgtataaaaaggctgtcaagtacgtgcactcatcccagcacgtcatccgttctggcgatccccccggcaatttccaacttgacatcgatattagcggtctgatttttacacaccatccctgtttcagcagagagcacgtcttggctgcaaaattggcccagctgtatgaccagtacctggcacgccaccagcgaaataaggccaagtttctaaccgacaagctccaagccctgcgcaatgccgttcaaaccgggttggacccagagaaaccccatcagtccctggataccattcagaagaccatcaacgaatacaagtccgagattagacagaccaggaaattccgggatgcggaacaggagaaggacagaactcttctgaaaacgattatcaaagtgtggaaggagatgaagtctttgagagaatttcagcgcttcactaatacccctctgaagttggttttaagaaaagagaaagccgaccagaaggctgacgaggaagcctacgaggcagagatacaggccgagatctccgagcttttagaggaacacaccgaagaatacgcacaaaagatggaagaatatcggacatctttacagcagtggaaggcttggcgaaaggtacagcgagcaaagaaaaaaaaaagaaagcaggccgcagaggaacatccaggcgacgaaattgccgagccctacccggaagaggacctcgtgaaaccttcccccccagaacctaccgatcgggcagtcattgagcaggaagtccgtgaacgcgctgcacagtccagaaggaggccatgggaacctacactggtgccggaactgtccctggccggaagcgtgacaccaaatgaccagtgccctagggcagaagtgtctcgtcgcgaagacgtgaagaaacgctctgtctacctgaaagtgcttttcaataacaaagaggtcagccggacagttagtcggccattgggagctgattttagagtccatttcgggcagatatttaatttacagattgtgaactggcccgagagtctgaccctccaggtgtacgaaaccgttggacactcctctcccaccctgctcgctgaggtgttcctccccatcccggaaacgaccgtggtaacaggaagggcgcccactgaagaggtggaattttcttctaaccagcacgtcacccttgatcacgaaggcgtcggaagcggggtccctttttcttttgaagcggatgggtctaatcagcttaccctcatgaccagtggcaaagtgagtcactcagtggcttgggctattggtgagaacggtattcctctaatacccccgttgtctcagcagaacatcggcttccgtagcgctttaaaaaaagccgacgccataagcagtatcggcacctccggattgacagacatgaagaaactggctaaatgggctgctgaatccaaactggacccaaatgatcctaataacgctccactaatgcagcttatctcagtcgcaacaagtggggagtcttatgtgcctgatttcttccgcttggaacagctgcagcaggaattcaactttgtgagcgatcaggaactgaatcgctcaaagcgcttcagactgcttcacctgcggtctcaggaggttccggaattccgcaattacaagcaggtgccggtttatgatagggaaatcatggaaaaagtcttccaggactacgaaaagagattgcgggaccggaatgtgatcgaaaccaaagagcacattgacactcatcgtgctattgtggccaaatatctacagcaggtcagagaaagtgtcattaatcgctttcttattgccaagcaatactttcttttggcggatatgattgtggaggaggaggtccctaacatcagcatcctgggcttgtccctgtttaagttagccgaacagaagaggcccctccgccctcgcaggaaaggacgaaaaaaagtgactgcccagaacttgagcgacggcgacattaaactcctcgttaatatcgtgagggcctacgatatccctgtgcgcaaaccggcggtcagcaagtttcaacagccttctcgttccagcagaatgttttccgagaagcatgccgcgtctccatccacatactcccccacccacaacgccgactatcctctcgggcaagtgctggtgcgcccctttgttgaagtcagttttcaacggaccgtctgccacactacgaccgcagagggtcctaacccttcatggaacgaagaactcgagcttcccttccgtgcacccaacggcgactactcaaccgcatcactgcaaagcgttaaggacgtggtgttcattaacatctttgacgaggtgcttcatgatgtgctcgaagatgatcgggagcgcgggtcagggatccacacgagaattgagagacactggcttgggtgcgtgaagatgcccttttcgaccatctacttccaagcacggatcgatggcacattcaagatagatatcccaccagtcctcctcggctactcgaaagaacgcaacatgattcttgaaaggggatttgattcagtacggtccctcagtgagggaagttatataacactgtttataaccattgagccccagcttgtccccggagagagcatccgggagaaattcgagtcccaagaggacgagaaactgcttcaagctacagagaaatttcaggccgaatgcgcccttaagtttccaaaccggcagtgtctgacgacagtgatcgatatctccgggaaaacagtgttcataaccagatacctgaaacctctgaatcctccacaggagctgttgaatgtctaccctaacaatctccaagccactgctgagttagttgcccgctatgtgtcactcattccatttcttcccgatactgtgagtttcggtggcatctgtgacctttggtctacatccgaccaatttcttgacttgctcgcaggagacgaagaagagcatgccgtgcttttgtgtaactacttcctctccctcggaaagaaggcttggctcctaatgggtaacgctattccagaaggacctactgcctacgtgttgacttgggagcaggggcgatatttaatttggaacccctgcagcggccacttttatgggcagttcgacacgttctgtcctctcaaaaatgtgggttgtctgataggccccgacaacatttggttcaatatacagcgatatgagtcaccattaagaattaatttcgatgtgacccgccccaagctgtggaagtcgtttttttcgagatcactcccctatcccggtctgtcttccgtgcagcctgaggagctgatctaccagcgatccgacaaggctgcggcagcagaactgcaggaccggatagaaaagattttgaaggagaagattatggactggcgtcctaggcatctgacaagatggaatcgctattgcacgagcactcttaggcacttccttcctttgcttgagaaaagccagggggaagacgtggaggatgaccaccgggccgagctgctcaagcaattgggcgactaccgctttagcggcttccctctacacatgccttactcagaggttaagccactcatcgatgcagtctacagtaccggagtacataatatcgacgtccccaatgtggagttcgccttggccgtttacattcacccataccccaagaatgtcttgtctgtatggatctacgtagcatccttgatcaggaacaggtag

SEQ ID NO: 36816 - DNA, 4539 bp, Artificial Sequence
  derived and/or modified sequence
atggtttccgagaagagccacctcggaaatccacaagagccagtccaggaagaacctaagacccgactgctgtctatgacggttcgcagagggccacggtccctgccaccaatcccatccacctcccgaactgggtttgcagagttttccatgcgcggaaggatgcgggagaaactccaggcggcccgttctaaggctgaaagcgccttgttacaggagatcccaaccccgcgaccccgcagactgcgctcccccagcaagaaagaactggagactgagttcggaactgaacccggcaaggaagttgaaagaactcagcaggaggtggactcacagtcttacagccgggtgaagttccacgactcagcacggaagatcaagccaaagccgcaagtgccccccggctttcctagcgcagaggaggcctacaacttctttactttcaatttcgatccagagccagagggatccgaggagaaaccgaaagcccgacacagggccggcacaaaccaggaggaggaggaaggggaggaagaggaaccaccagcccagggagggggaaaagagatggacgaagaagagctcctcaacggagatgatgccgaggatttccttttgggattggaccatgtagcagatgactttgtcgctgtcaggccggctgactacgagagcattcacgaccgactacaaatggaaagggagatgctgtttatcccatccagacagacggtccccacttacaagaaacttcctgagaacgttcagccccgattcctggaggacgagggtttatacactggggtgagacctgaggtagctaggacgaaccagaacataatggaaaaccgcctcctgatgcaggaccctgagcgccgctggtttggtgatgatgggcggattctcgcccttcctaatccaattaaaccttttcccagtagaccgcctgtgttgacccaggagcagtcgattaaagcagaacttgaaaccctctataagaaagccgtgaagtatgttcacagctcgcagcacgttattcgctccggtgatccgccaggtaactttcagctggatatcgacatttctggacttatcttcactcatcacccttgcttcagtcgcgagcacgttctggcagccaagttagcacagctgtacgaccagtacttggcacggcatcagcgcaacaaagccaagttcctgacggacaagttgcaggcccttcgtaacgcagtgcagaccggactcgacccggaaaaacctcatcagtcactggataccatacagaagactatcaatgagtacaagagtgagattcggcagacccgcaagtttagagacgccgagcaggagaaggaccggaccctgttaaaaactataatcaaggtgtggaaagaaatgaagtccctgcgcgagtttcagaggttcactaacacaccactgaagctcgtgctgcggaaggaaaaggcagatcaaaaagccgacgaggaggcctatgaagctgaaattcaggctgaaatctccgagttgttggaggagcacacagaggaatatgcacagaagatggaggagtatagaacatctctccagcagtggaaggcctggcgtaaagtgcagagagcaaagaagaagaaaagaaaacaggcagctgaggagcatccgggcgacgaaattgcagagccatatcccgaagaagatttagtaaagccatctccccccgagcctactgatagggcagttattgaacaagaagttcgtgaacgggcagcccagagtcgccggcggccatgggagcccaccctcgtaccagaattatcactggccggaagcgtcactcctaacgaccagtgtccccgggccgaggtatccagacgggaggatgtgaagaagcggtccgtgtatctgaaggtgcttttcaataacaaagaagtcagtcggaccgtttcacggcctttaggagcggactttagggttcactttgggcagatctttaacttacagatcgttaattggcccgaatccctcactcttcaggtttatgagactgtcggccactcttcaccaacgttgttggctgaagtcttcctgcctatacctgaaacaactgtcgtgaccgggagagcacctactgaagaagttgagttttctagcaatcagcacgtgactctcgaccacgagggtgtaggatctggggtgccctttagtttcgaggcagatggtagcaatcaacttactcttatgacaagcggaaaggttagtcacagcgtagcatgggccattggggaaaacggaatacccctcatccccccactctcacagcagaacataggcttccgctccgcccttaagaaagccgatgcaatttcctctatcggaacaagtgggctgactgatatgaagaagctggccaagtgggcagctgagtctaaactcgacccaaatgacccaaacaatgctcctctgatgcagctcattagcgtggcaacgtcaggtgagtcctatgtacctgattttttcaggctcgaacaactgcaacaggagtttaactttgtgagcgatcaggagctgaataggagcaagaggtttcgcttacttcatctgcggagtcaggaggtgcctgagttcaggaactacaagcaagtgccggtgtacgaccgtgagatcatggaaaaagtcttccaggattatgagaagcggcttcgcgatcgcaacgtcattgagaccaaggagcacatcgatacgcatcgggcaatcgtcgctaagtatctccagcaggtgcgcgaaagtgtgatcaaccggttcttgattgcaaaacagtattttcttttggccgatatgatagttgaggaggaagtgccgaatatcagtattctgggactcagcctcttcaagctcgccgaacagaagcgccccctcagaccacgccggaaaggtcgcaaaaaagtcaccgctcagaatctgtccgatggggatattaaactgctcgttaatatagtgagagcatacgatatacccgtgcgcaaaccggctgtctcaaagttccagcagccgagcagatcctccaggatgttttccgagaagcacgcagcctccccatccacatacagccccactcacaatgctgattatcctctcggccaggtgttggtgcggccttttgtagaagtaagtttccagagaactgtctgccacaccaccaccgcagaagggcccaacccgtcctggaacgaagaactcgagctacccttcagggcccctaatggtgactatagtacagcctcactccagtcagtgaaagatgtcgttttcattaatattttcgacgaagtgctacacgatgtgctggaggatgatcgggagcgcggctcgggtattcatactcgtattgaacgccactggctcgggtgcgtaaagatgcccttctctacaatttactttcaagccaggtttgaaagtcaagaggatgaaaaattattacaagcaaccgagaagtttcaggccgaatgcgccctcaaatttcccaatcgacaatgtctgaccacagtgattgatatctcagggaaaacagtctttatcactagatacctaaagccgttgaacccaccacaggagctgcttaatgtctatcccaataatcttcaagccactgcggagctagtcgccaggtacgtgtctctgattccatttctcccagatacagtttcctttgggggtatctgcgatttgtggagtacctcagaccaattccttgatctgctggccggtgatgaagaggagcatgctgttctgctgtgcaactattttctctccctagggaaaaaggcctggttgctcatgggcaatgccatcccagaaggacctaccgcgtatgtgctgacctgggagcagggacgctatttaatttggaatccttgtagcggacatttttacggtcaattcgatacattttgcccgctgaagaatgtgggttgcttaattggaccggataatatttggtttaatatccaaaggtatgagagcccgttgcgcataaatttcgatgtaacaagaccaaagctgtggaaaagcttcttcagccgatcgctgccctacccagggctcagctccgtgcaacctgaagagctcatttaccaaaggagcgataaagctgctgccgccgaattacaggataggatcgagaagattcttaaggagaagataatggattggcgcccccggcacctgactcggtggaatcggtactgcactagtactctgcggcactttcttcccctattagagaaaagccaaggggaggatgtagaagatgaccatcgggccgagcttcttaaacagctgggggactaccgctttagcggattcccactacatatgccttacagcgaggttaaacctttgattgacgcagtttactccacgggcgtgcacaatattgacgtccctaatgtggagtttgcgttggccgtgtatattcatccctaccccaaaaatgttctgagcgtgtggatctatgtggcttctctgattcggaatcgctag

SEQ ID NO: 36817 - DNA, 4863 bp, Artificial Sequence
  derived and/or modified sequence
atgaatccacgggaggagaaagtcaaaatcatcactgaggagttcatcgagaatgatgaggacgcggatatgggccgccaaaataaaaattcgaaagtcaggcgccagcccaggaagaagcagccacctacagcagtccccaaggagatggtatctgagaagtctcacctgggtaacccccaggagcctgtccaggaggagcctaagactcgcctgctctctatgaccgtgcggcggggacctcgctctcttccccctatccccagcacttctcgcaccggctttgcggaatttagcatgcggggtagaatgcgggagaaattgcaggccgccaggagcaaggccgagagcgctctcctgcaagaaatcccaaccccgcgacctagaagattgcgcagtccatccaaaaaagagttagagaccgagtttggaactgagcccggaaaggaggtggagaggacacagcaggaagttgattcccagagctatagcagagtgaagtttcatgactccgcgcgtaagattaaaccaaagcctcaggttccccctggtttcccctccgccgaggaagcctacaatttctttacattcaatttcgaccctgagcctgagggctccgaggaaaaacccaaggctaggcaccgagcgggtaccaaccaggaggaggaggaaggggaggaggaagagccacctgcccagggcggggggaaagaaatggatgaggaggaactgctgaacggagacgatgctgaggattttctcctcggactggaccacgtggctgatgactttgtggcggtgcggcccgcagattacgaatctatccacgaccgattacagatggagcgggaaatgctctttatcccctccagacagaccgtcccaacctataaaaaattgccagaaaatgtccagccgcggttccttgaagacgaaggcctttatactggggttaggcctgaggtggcgaggacaaatcagaacatcatggaaaatcgcttgctgatgcaggaccccgagcgccgatggtttggagatgacggaagaatcctggccctaccaaaccccataaaaccatttccttcccggccccctgtgctaactcaggaacagtccatcaaagcagagttagagacattgtataagaaagccgtgaaatacgttcatagtagccagcatgtgattcggtccggcgatcctcctggtaatttccagctagatatcgatatcagtggcctcattttcacccaccacccttgcttttcccgggagcatgttctggctgctaaactcgcacagctctatgaccagtacctggcaaggcatcagaggaacaaggctaaattcctgacagataagttacaagctctgagaaatgccgtgcagaccggattagatcctgaaaaaccacatcagagcctggacactattcagaagacaattaatgagtataagagcgagattaggcagactcgaaaatttagagacgcagaacaggaaaaagacagaactcttttaaaaaccatcatcaaggtgtggaaggagatgaagagtctgagggagtttcaaagattcacaaatactcccctgaaattggtcctgcggaaagagaaagcagaccagaaggccgatgaggaggcatacgaggctgagatccaggccgaaattagcgagctgcttgaggaacatacagaagagtacgcccagaagatggaggaatacaggacttccctgcagcaatggaaggcctggagaaaggttcagcgggcaaagaaaaagaaacggaaacaagccgcagaggagcacccaggtgatgagatcgccgagccgtatccagaagaggatctggttaaaccctcgccacctgaaccaactgatagggccgtgattgaacaggaagtgagagaacgcgcagcccagagcagaagaagaccctgggagcccaccctcgtgccagagctgtcactcgccggtagtgtgactccgaatgatcagtgcccccgggccgaggtgtctcgcagagaggacgtgaagaagcggagcgtgtacctgaaagttctgtttaataacaaagaagtcagcagaacagtatcgagacctttgggggccgacttccgggtccacttcggccagatctttaatctgcaaattgtgaactggcctgaaagcttgacacttcaagtctatgagaccgttggacacagttcacccaccctgcttgctgaggtgttccttccaatccctgaaaccactgtggtgaccggtagagctccaactgaagaagttgaattcagctctaaccagcacgtcaccctggaccacgaaggggtggggtctggcgtgcccttcagcttcgaagccgacggatccaatcaattaacgctgatgacttctggaaaagtgtcacattcagttgcatgggctattggagagaatggcattcccctaattcccccgcttagccagcagaatatcggctttagatcagcattgaaaaaggccgatgctatttcctccatcggcacaagcgggctgaccgacatgaagaaattagcaaaatgggccgctgagagtaaactggacccaaatgatccgaacaatgctcctttaatgcagctgatttccgtggccactagtggggagagctacgtccctgatttcttcaggttggagcagctgcagcaagaatttaattttgtctccgatcaagaactcaatcgttcaaaaagatttcgcctgctccatctacgttcccaggaggtcccagagtttaggaattacaagcaggtgccagtttacgatcgcgaaattatggagaaagtgttccaggattacgagaagaggctgcgggatcgtaatgtaattgaaactaaggaacatatagatacgcacagagcaatcgtcgctaaatatctacagcaggtacgtgaatcggttatcaaccggttcctaatcgctaaacagtacttccttctggccgacatgatcgtggaagaagaagtgcccaatatctccattcttggactttcactctttaaactggccgagcagaaacggcccctgaggccccgacggaagggtcgcaaaaaagtgacggctcagaatctatccgatggcgacattaaacttctggtaaacattgtaagggcttacgacatccccgtcagaaaaccagctgtctctaaatttcagcaaccaagccgctcgagtaggatgttctcagaaaaacatgccgcctctccctcaacttattcccctactcacaacgccgattatccactgggtcaggttctggtgcggcctttcgtagaggtatcttttcagcggactgtttgtcacacaaccacagcggaaggcccaaacccctcttggaacgaggagctggagctgccctttcgagcacctaatggcgactactccacggcctcactgcagtccgtcaaagacgtggtgtttatcaatatctttgacgaagtgctgcatgatgtgttggaggacgatcgcgagcgtggttctggaatacatacgagaattgaacgccattggctgggttgcgtgaaaatgccctttagtactatttactttcaggcgaggatcgatgggaccttcaagatcgacatcccgcccgtgctgctcggctatagtaaggagcgcaacatgattctggaacgcggtttcgattccgttagaagcctgtccgaaggctcttatatcaccctctttatcactattgaacctcagttggttccaggagaatcaatcagggagaagttcgaaagtcaggaggatgaaaagttgctccaggccacagaaaagtttcaagctgaatgcgcactcaaatttccaaataggcaatgtctcaccacagtaatcgacatttccggcaaaactgtctttatcactcgctacctaaagccgctgaacccaccccaggagcttttaaatgtgtacccaaacaacctgcaggcgacggcggaactggtagcccggtatgtgtccctgatcccattcttgccagacactgtgagctttggcggcatttgcgacctgtggtcaacaagcgatcagttcttggacttactagcgggggatgaagaggagcatgccgtgctgctgtgcaattactttctgagcctgggcaaaaaggcttggctccttatgggtaacgccattcctgagggccccacagcgtacgtcctgacctgggagcagggccggtatctgatctggaacccctgctccggccacttctatggtcagttcgacacgttttgcccattgaaaaacgtcggttgcttgatcggccccgacaatatttggtttaacatccaaagatatgagagcccgctccggattaacttcgacgtgaccaggcccaagttatggaaatcattctttagcagaagtctcccctaccctggactgtcatctgtgcagccagaagagcttatctaccagagatccgataaggcagctgccgctgagttacaggatcggatagaaaagatccttaaggagaaaattatggattggaggcctcgacacctgacccggtggaataggtactgcacatccaccttgagacacttcctgcctctccttgagaaatctcagggagaggatgttgaggacgaccatagagccgagcttttaaaacagctcggcgattaccgtttctctggtttccctctccacatgccatactcagaagtgaagcctctgattgacgcggtgtattctacaggcgtgcacaatatcgacgtcccaaacgtagaattcgcattggcggtctacatccacccgtaccccaagaatgttctgagcgtttggatttacgtcgcttccttgatccggaataggtag

SEQ ID NO: 36818 - DNA, 4539 bp, Artificial Sequence
  derived and/or modified sequence
atggtaagtgaaaaaagccatctaggtaacccccaggaacccgtgcaggaggaaccaaaaacacgcttgttgagtatgactgtaagaagaggacccaggagtctcccacccatacctagcacaagccgtaccggctttgccgagttttccatgcggggccggatgagagaaaagctccaggccgctagatctaaggctgagagcgcactcctgcaggagataccgactccccggccgcgccgcctgaggtccccttcaaagaaagagctcgagacagagtttggaaccgagccagggaaagaggttgaacgaacccaacaggaggttgatagccagtcttacagccgggtgaagttccacgactcggcccggaagattaagccaaagccacaagttcctcccggattcccttccgcggaggaagcttacaactttttcaccttcaattttgatcctgagccagagggctctgaagaaaagcctaaggctagacatcgagcggggaccaatcaagaagaagaggaaggtgaagaggaggaaccaccggctcagggcggtggaaaagaaatggacgaagaagaactgctgaacggcgacgacgctgaggactttctccttggtctcgaccacgttgctgacgactttgtcgccgtcagaccagctgattacgagtccatccacgaccgcctgcagatggaacgggaaatgctgtttataccgtctcgccagactgtaccaacttataagaagctgccagaaaacgtacaacctcgattcctggaggacgaagggctgtacaccggtgtgcgccccgaagtagcgcggaccaatcagaatattatggagaacagactgcttatgcaggatccagagagacgctggttcggcgacgacggacgcatcctggccttgccaaatccgataaagcctttccctagcaggcccccagtgctgacgcaggagcagagtataaaagcagaactggagactttatacaaaaaagcagtcaagtacgtgcactcatcacagcacgtgattaggtcgggcgacccgcccggtaacttccaactggacatcgatatcagcgggctcattttcacccatcatccatgtttcagtcgagagcatgtgctagctgcaaaattggctcagctctatgaccagtacttggcgagacaccagcgaaacaaggctaaattcctcaccgacaaattgcaggcattgcgtaatgctgtacagacaggactcgatcccgagaaaccacatcaatccctcgataccatccagaagacgatcaacgaatacaaaagcgagatcaggcagacccggaagttcagagacgcagagcaggagaaggaccgtacattgttgaagactatcatcaaagtatggaaggagatgaaaagcttgcgcgaattccagcggtttacaaataccccgctcaagctggtcttgcgaaaggagaaggcagaccagaaggcagatgaagaagcctacgaggcagagattcaggccgagatcagcgagttgctggaagaacacactgaagagtatgcacaaaaaatggaagaatacagaacaagcctacagcagtggaaggcatggcgaaaggtgcaaagggccaagaagaaaaagcgcaaacaagcggctgaagaacatcctggggatgagatcgccgaaccctaccccgaggaggatctggttaaacctagccctcctgagcctactgatcgagccgtcattgaacaggaggtaagagaaagggccgcacagagccgtcgccgaccgtgggaaccaacactggtgccagagctgtctctggcaggaagcgttacaccaaacgaccagtgcccccgagctgaggtcagtaggagggaagatgtgaagaaacggtcggtgtatctcaaggtgctcttcaataacaaggaggtgtctagaaccgttagccggcccttaggtgctgactttcgtgtccattttggccagatcttcaaccttcagattgtgaattggccggaatcattaactctccaagtgtatgagaccgtagggcactcctccccaacactcctcgctgaagtgttccttcccatacctgagacaacagtagtaacaggccgcgcacctacagaggaagtggaattctcatccaaccagcacgtaaccttggatcacgaaggagtaggctccggagtgccattctccttcgaggcggatggttcaaaccagcttacactgatgaccagcgggaaagtgagccactccgtcgcctgggctattggcgagaacgggattcccctgatccctcctctcagtcagcagaacataggttttcgcagcgcactgaagaaagctgacgccatttcaagcatcggtaccagcgggctgaccgacatgaagaagctggccaaatgggctgccgaatcgaagctggaccccaacgaccctaacaacgccccactgatgcaactcatttcagtggcaaccagcggggaatcctacgtgcccgactttttcagactggagcagctgcagcaggagtttaatttcgtgagcgatcaggaattgaaccgctctaagaggttcaggctactgcacttacgatctcaagaggtgccagagttccggaactataaacaggtgcctgtctatgaccgggagataatggaaaaagtgtttcaggattatgagaagaggcttagggatcgtaatgtcatcgagactaaggagcacattgatactcatagagccatcgtggcaaagtaccttcagcaggtcagggagtccgtgatcaacaggtttctaatcgctaagcagtacttcctgcttgccgacatgatcgtcgaggaggaggtgcctaacatctcgatacttggtctgagtttgttcaagctcgccgagcagaaaaggcccctgcggccccgcaggaaagggaggaagaaggtgacagcccagaatctgtcggatggggacattaagctcctggttaacatcgtgcgcgcatacgacatccctgtgcggaagccagccgtatcaaagtttcagcagccgtcaaggtcaagtaggatgtttagcgagaagcatgctgcttccccctccacgtatagcccaacgcataacgctgattacccgctaggccaagttcttgtccgtcccttcgtcgaggttagctttcagcgcactgtctgccacacgacaaccgccgaaggccccaaccctagttggaacgaagaactggaactgccattcagagcgcccaacggcgactactcaaccgccagcttacaatcagtcaaagacgttgtgtttatcaacatttttgacgaggtgctgcacgatgtactcgaggacgaccgcgaacgagggagcgggatccacactcggattgaacggcactggttagggtgcgtgaaaatgcctttttctaccatctacttccaagcccggtttgaaagtcaagaagatgaaaaattactgcaggccaccgaaaaatttcaggctgaatgtgcacttaagtttcctaatagacagtgtctgacaaccgttattgatatttctggcaagactgtgtttattaccagatatcttaagcccctgaatccgccacaagaattgttaaatgtctacccaaacaacctccaggcaaccgcagagttggtggccagatacgtgtccctcatacccttcctacccgacacagtgtcctttggtggtatttgtgatctctggtctacctccgatcagttcctggatctgctggccggagatgaggaggaacacgccgtcctgctgtgcaactacttcctaagtttaggtaagaaggcgtggctgctgatggggaacgccatcccagagggcccgaccgcctatgtgctcacatgggaacagggacggtatcttatttggaacccctgtagcggacacttctacgggcagtttgataccttctgtcctctgaaaaacgtgggctgtctgattggtcctgacaacatttggttcaacattcagcgctatgagagtcctctgcgaataaatttcgatgtgaccagacccaaactctggaaatcttttttcagccgttctctgccatatcccggactctctagcgtacagcccgaggaactgatatatcagcggagcgataaggcggctgcggcagaactacaagatcggatcgagaagatactgaaagagaagattatggactggagaccgcgtcacttgacgcgatggaacagatactgtacctcaaccctccgtcatttcttaccgctgctggagaagtcacagggtgaggatgtagaggacgaccacagggcagagctgctgaagcagctgggcgactaccgcttcagcggattccccttacacatgccttatagcgaggtcaaaccactgatcgacgctgtttacagcaccggtgtacacaatatagacgtgcccaacgttgagttcgcgctcgccgtttatatccacccttaccccaagaatgtgctgagtgtgtggatttacgtcgcaagcctgattcggaacaggtag

SEQ ID NO: 36819 - DNA, 1767 bp, Artificial Sequence
  derived and/or modified sequence
atgaatccaagagaggaaaaagttaaaatcattaccgaagagttcatcgaaaatgatgaggatgccgatatgggacggcagaacaagaatagcaaggttcgcaggcagccacggaagaaacagccacccactgcggtgccaaaggagatggtgtccgaaaagtcccatctaggaaatccccaggaacctgtgcaggaggagcccaagacacggctgctttccatgaccgtgagacgcggtcctaggagcctccctcccattccatcgaccagccgaacaggctttgcagagttctcaatgcgcggacgcatgagagagaagctgcaggctgcaagatctaaagcagagagcgccctattgcaggagattccaacgccaagacccaggcgattacggtcaccttccaagaaggaactggagacggagtttggcaccgaaccagggaaagaggtcgaacgcacccagcaagaggtagactctcagtcctacagccgcgttaagtttcatgacagtgctcggaaaatcaaacccaaaccccaggtgcccccgggatttccatccgccgaagaagcatacaatttcttcactttcaattttgacccggaacccgaggggtctgaggaaaagcctaaggcacggcaccgcgccgggaccaaccaggaggaggaggagggggaagaggaggaacctcctgcccagggtggtggcaaagagatggacgaggaggagcttctgaacggtgatgatgctgaggacttcctcctggggctcgaccatgtggccgatgactttgttgcagttcggcctgcagactatgagagcatccatgatcgcctacagatggagagagagatgctgttcatcccctcaagacagaccgttccaacctataagaagctcccggagaatgtccagccacgcttccttgaggatgaaggactgtatacaggggtgcgtcccgaggtggcgcgtactaatcagaatatcatggagaataggttactgatgcaggatcccgaaaggaggtggttcggcgacgatggaagaatccttgcattgcctaatcccatcaaaccattccctagcaggccccctgtcctgacacaggagcagtccattaaggctgagctcgagaccctctataagaaagccgtaaaatacgtgcactccagccagcacgtaatccggtccggtgatccccctggcaacttccagctggatatcgacatttcaggactgattttcacccaccatccttgcttctccagagaacacgtactggccgccaagctcgctcagttatacgaccaatacctcgctaggcaccaaagaaacaaggccaaattcctgacagacaaacttcaagcactccgaaacgccgttcagacaggtttagacccagaaaagcctcaccagtcactggacacaatccagaagaccatcaacgagtataaatcggaaatcaggcagacaaggaagtttcgggatgctgaacaagagaaggatcggaccctgctaaagacgattataaaggtttggaaagaaatgaagtcgctcagggaatttcagcgtttcacaaatacaccgctgaaactcgtgctacgaaaggagaaagcggaccagaaagcagacgaagaagcctatgaagcagagatacaggcagaaattagtgagttgcttgaggaacatacagaggagtacgcacaaaaaatggaagaatacaggaccagccttcagcagtggaaggcttggcggaaagtccagtag

SEQ ID NO: 36820 - DNA, 4539 bp, Artificial Sequence
  derived and/or modified sequence
atggtgtctgagaagagccacctgggcaacccccaggagcctgtgcaggaggagcccaagacccggctgctgtccatgacagtgagaagaggccccaggagcctgccccccatccccagcaccagcaggacaggctttgctgagttctccatgaggggccgcatgagggagaagctgcaggccgcccggagcaaggccgagagcgccctgctgcaggagatccccaccccccggccccggcggctgcggagccccagcaagaaggagctggagacagaatttggaacagagcccgggaaggaggtggagaggacccagcaggaggtggacagccagagctacagccgggtgaagttccatgacagcgccaggaagatcaagcccaagccccaggtgcccccaggcttccccagcgctgaggaggcctacaacttcttcaccttcaactttgatcctgagcctgagggcagcgaggagaagcccaaggcccggcacagagctggcaccaaccaggaggaggaggagggggaggaggaggagcccccagcccagggcggcggcaaggagatggatgaggaggagctgctgaatggagatgatgctgaggacttcctgctgggcctggaccacgtggctgatgactttgtggccgtgcggcctgctgactatgagagcatccatgaccggctgcagatggagcgggagatgctgttcatccccagccggcagacagtgcccacctacaagaagctgcctgaaaatgtgcagccccgcttcctggaggatgagggcctgtacacaggagtgcggcctgaggtggcccggaccaaccagaacatcatggagaaccggctgctgatgcaggaccctgagcggcgctggtttggagatgatggccgcatcctggccctgcccaaccccatcaagcccttccccagcaggcctcctgtgctgacccaggagcagagcatcaaggccgagctggagaccctgtacaagaaggctgtgaagtatgtgcacagcagccagcacgtgatccgcagcggggaccccccaggcaacttccagctggacatcgacatcagcggcctcatcttcacccaccacccctgcttcagccgggagcacgtgctggccgccaagctggcccagctgtatgaccagtacctggcccggcaccagaggaacaaggccaagttcctgacagacaagctgcaggccctgagaaatgctgtgcagacaggcctggaccctgagaagccccaccagagcctggacaccatccagaagaccatcaatgagtacaagtctgagatccggcagaccaggaagttcagagatgctgagcaggagaaggacaggaccctgctgaagaccatcatcaaggtgtggaaggagatgaagagcctgcgggagttccagcgcttcaccaacacccccctgaagctggtgctgaggaaggagaaggctgaccagaaggcagatgaggaggcctatgaagctgagatccaggccgagatcagcgagctgctggaggagcacacagaggagtatgcccagaagatggaggagtaccgcaccagcctgcagcagtggaaggcctggaggaaggtgcagagggccaagaagaagaagaggaagcaggccgctgaggagcaccctggagatgaaattgctgagccctacccagaggaggacctggtgaagcccagccccccagagcccacagacagagctgtgattgagcaggaggtgcgggagagagctgcccagagcagaagaagaccctgggagcccaccctggtgcctgagctgagcctggccggctctgtgaccccaaatgaccagtgccccagggctgaggtgtcccggcgggaggatgtgaagaagaggtctgtgtacctgaaggtgctcttcaacaacaaggaggtgtccaggacagtgtcccggcccctgggcgctgacttccgggtgcacttcggccagatcttcaacctgcagatcgtgaactggccagagagcctgaccctgcaggtgtatgagaccgtgggccacagcagccccaccctgctggccgaggtgttcctgcccatccctgagaccaccgtggtgacaggccgggcccccacagaggaggtggagttcagcagcaaccagcacgtgaccctggaccatgaaggagtgggcagcggcgtgcccttctcctttgaagcagatggcagcaaccagctgaccctgatgaccagcggcaaggtgagccacagcgtggcctgggccatcggggagaatggcatccccctcatcccccccctgagccagcagaacatcggcttccgcagcgccctgaagaaggcagatgccatcagcagcatcggcaccagcggcctgacagacatgaagaagctggccaagtgggccgctgagagcaagctggaccccaatgaccccaacaatgcccccctgatgcagctgatctctgtggccaccagcggggagagctatgtgcctgacttcttccggctggagcagctgcagcaggagttcaactttgtgtctgaccaggagctgaacagaagcaagcgcttccggctgctgcacctgcggagccaggaggtgcctgagttcaggaactacaagcaggtgcctgtgtatgaccgggagatcatggagaaggtgttccaggactatgagaagaggctgcgggacagaaatgtcatcgagaccaaggagcacatcgacacccaccgggccatcgtggccaagtacctgcagcaggtgcgggagagcgtcatcaaccgcttcctgattgccaagcagtacttcctgctggccgacatgattgtggaggaggaggtgcccaacatcagcatcctgggcctgagcctcttcaagctggccgagcagaagaggcccctgcggcccaggaggaaaggaaggaagaaggtgacagcccagaacctgagtgatggagacatcaagctgctggtgaacatcgtgcgggcctatgacatccctgtgaggaagccagctgtgtccaagttccagcagcccagccgcagcagcaggatgttttctgagaagcatgctgccagccccagcacctacagccccacccacaatgctgactaccccctgggccaggtgctggtgcggccctttgtggaggtgtccttccagaggacagtgtgccacaccaccacagctgagggccccaaccccagctggaatgaggagctggagctgcccttccgggccccaaatggagactacagcacagccagcctgcagagcgtgaaggatgtggtgttcatcaacatctttgatgaggtgctgcatgatgtgctggaggatgaccgggagcggggcagcggcatccacaccagaattgagcggcactggctgggctgtgtgaagatgcccttcagcaccatctacttccaggccaggtttgagagccaggaggatgagaagctgctgcaggccacagagaagttccaggccgagtgtgccctgaagttccccaaccggcagtgcctgaccaccgtgattgacatcagcggcaagacagtgttcatcacccgctacctgaagcccctgaaccccccccaggagctgctgaatgtgtaccccaacaacctgcaggccacagctgagctggtggcccgctacgtgtccctcatccccttcctgcctgacacagtgtcctttggaggcatctgtgacctgtggagcaccagtgaccagttcctggacctgctggccggagatgaggaggagcacgctgtgctgctgtgcaactacttcctgagcctgggcaagaaggcctggctgctgatgggaaatgccatccctgagggccccacagcctacgtgctgacctgggagcagggccgctacctgatctggaacccctgcagcggccacttctacggccagtttgacaccttctgccccctgaagaatgtgggctgcctgattggccctgacaacatctggttcaacatccagagatatgagagccccctgcgcatcaactttgatgtgacccggcccaagctgtggaagagcttcttcagccgcagcctgccctacccaggcctgagctctgtgcagcctgaggagctgatctaccagaggagtgacaaggctgctgctgctgagctgcaggaccgcatcgagaagatcctgaaggagaagatcatggactggaggcccaggcacctgacccgctggaaccgctactgcaccagcaccctgcggcacttcctgcccctgctggagaagagccagggagaagatgtggaggatgaccacagagctgagctgctgaagcagctgggggactaccgcttcagcggcttccccctgcacatgccctacagcgaggtgaagcccctgattgatgctgtgtacagcactggagtgcacaacattgatgtgcccaacgtggagtttgccctggccgtgtacatccacccctaccccaagaatgtgctgtctgtgtggatctacgtggccagcctcatccggaacagatag

SEQ ID NO: 36821 - DNA, 4863 bp, Artificial Sequence
  derived and/or modified sequence
atgaacccccgggaggagaaggtgaagatcatcacagaggagttcattgaaaatgatgaagatgctgacatgggccggcagaacaagaacagcaaggtgcggcggcagcccaggaagaagcagcccccaacagctgtgcccaaggagatggtgtctgagaagagccacctgggcaacccccaggagcctgtgcaggaggagcccaagacccggctgctgtccatgacagtgcggcggggccccaggagcctgccccccatccccagcaccagcaggactggatttgctgagttctccatgaggggccgcatgagggagaagctgcaggccgcccggagcaaggccgagagcgccctgctgcaggagatccccaccccccggccccggcggctgcggagccccagcaagaaggagctggagacagaatttggaacagagcccgggaaggaggtggagaggacccagcaggaggtggacagccagagctacagccgggtgaagttccatgattctgccaggaagatcaagcccaagccccaggtgcccccaggcttccccagcgctgaggaggcctacaacttcttcaccttcaactttgatcctgagcctgagggcagcgaggagaagcccaaggcccggcaccgggccggcaccaaccaggaggaggaggagggggaggaggaggagcccccagcccagggcggcggcaaggagatggatgaggaggagctgctgaatggagatgatgctgaggacttcctgctgggcctggaccacgtggctgatgactttgtggccgtgcggcctgctgactatgagagcatccatgaccggctgcagatggagcgggagatgctgttcatccccagccggcagacagtgcccacctacaagaagctgcctgaaaatgtgcagccccgcttcctggaggatgagggcctgtacacaggagtgcggcctgaggtggcccggaccaaccagaacatcatggagaaccggctgctgatgcaggaccctgagcggcgctggtttggagatgatggccgcatcctggccctgcccaaccccatcaagcccttccccagccggccccctgtgctgacccaggagcagagcatcaaggccgagctggagaccctgtacaagaaggctgtgaagtatgtgcacagcagccagcacgtgatccgcagcggggaccccccaggcaacttccagctggacatcgacatcagcggcctcatcttcacccaccacccctgcttcagccgggagcacgtgctggccgccaagctggcccagctgtatgaccagtacctggcccggcaccagaggaacaaggccaagttcctgacagacaagctgcaggccctgagaaatgctgtgcagacaggcctggaccctgagaagccccaccagagcctggacaccatccagaagaccatcaatgagtacaagtctgagatccggcagaccaggaagttcagagatgctgagcaggagaaggacaggaccctgctgaagaccatcatcaaggtgtggaaggagatgaagagcctgcgggagttccagcgcttcaccaacacccccctgaagctggtgctgaggaaggagaaggctgaccagaaggcagatgaggaggcctatgaggccgagatccaggccgagatcagcgagctgctggaggagcacacagaggagtatgcccagaagatggaggagtaccgcaccagcctgcagcagtggaaggcctggaggaaggtgcagagggccaagaagaagaagaggaagcaggccgctgaggagcaccctggagatgaaattgctgagccctacccagaggaggacctggtgaagcccagccccccagagcccacagaccgggccgtcatcgagcaggaggtgcgggagcgggccgcccagagcagaagaagaccctgggagcccaccctggtgcctgagctgagcctggccggctctgtgaccccaaatgaccagtgccccagggctgaggtgtccagaagagaagatgtgaagaagaggtctgtgtacctgaaggtgctcttcaacaacaaggaggtgtccaggacagtgtcccggcccctgggcgctgacttccgggtgcacttcggccagatcttcaacctgcagatcgtgaactggccagagagcctgaccctgcaggtgtatgaaacagtgggccacagcagccccaccctgctggccgaggtgttcctgcccatccctgagaccaccgtggtgacaggccgggcccccacagaggaggtggagttcagcagcaaccagcacgtgaccctggaccacgagggcgtgggcagcggcgtgcccttctcctttgaagcagatggcagcaaccagctgaccctgatgaccagcggcaaggtgagccacagcgtggcctgggccatcggagaaaatggcatccccctcatcccccccctgagccagcagaacatcggcttccgcagcgccctgaagaaggcagatgccatcagcagcatcggcaccagcggcctgacagacatgaagaagctggccaagtgggccgctgagagcaagctggaccccaatgaccccaacaatgcccccctgatgcagctgatctctgtggccaccagcggggagagctatgtgcctgacttcttccggctggagcagctgcagcaggagttcaactttgtgtctgaccaggagctgaacagaagcaagcgcttccggctgctgcacctgcggagccaggaggtgcctgagttcaggaactacaagcaggtgcctgtgtatgaccgggagatcatggagaaggtgttccaggactatgagaagaggctgcgggacagaaatgtgattgagaccaaggagcacatcgacacccaccgggccatcgtggccaagtacctgcagcaggtgcgggagagcgtcatcaaccgcttcctgattgccaagcagtacttcctgctggccgacatgattgtggaggaggaggtgcccaacatcagcatcctgggcctgagcctcttcaagctggccgagcagaagaggcccctgcggcccaggaggaagggcaggaagaaggtgacagcccagaacctgagtgatggagacatcaagctgctggtgaacatcgtgcgggcctatgacatccctgtgaggaagccagctgtgtccaagttccagcagcccagccgcagcagcaggatgttcagcgagaagcacgccgccagccccagcacctacagccccacccacaatgctgactaccccctgggccaggtgctggtgcggccctttgtggaggtgtccttccagaggacagtgtgccacaccaccacagctgagggccccaaccccagctggaatgaggagctggagctgcccttccgggcccccaacggggactacagcacagccagcctgcagagcgtgaaggatgtggtgttcatcaacatctttgatgaggtgctgcatgatgtgctggaggatgaccgggagcggggcagcggcatccacacccgcatcgagcggcactggctgggctgtgtgaagatgcccttcagcaccatctacttccaggccagaattgatggcaccttcaagattgacatcccccctgtgctgctgggctacagcaaggagaggaacatgatcctggagcggggctttgacagcgtgcgcagcctgtctgagggcagctacatcaccctcttcatcaccatcgagccccagctggtgcctggagagagcatccgggagaagtttgagagccaggaggatgagaagctgctgcaggccacagagaagttccaggccgagtgtgccctgaagttccccaaccggcagtgcctgaccaccgtgattgacatcagcggcaagacagtgttcatcacccgctacctgaagcccctgaaccccccccaggagctgctgaatgtgtaccccaacaacctgcaggccacagctgagctggtggcccgctacgtgtccctcatccccttcctgcctgacacagtgtcctttggaggcatctgtgacctgtggagcaccagtgaccagttcctggacctgctggccggagatgaggaggagcacgctgtgctgctgtgcaactacttcctgagcctgggcaagaaggcctggctgctgatgggaaatgccatccctgagggccccacagcctacgtgctgacctgggagcagggccgctacctgatctggaacccctgcagcggccacttctacggccagtttgacaccttctgccccctgaagaatgtgggctgcctgattggccctgacaacatctggttcaacatccagagatatgagagccccctgcgcatcaactttgatgtgacccggcccaagctgtggaagagcttcttcagccgcagcctgccctacccaggcctgagctctgtgcagcctgaggagctgatctaccagaggagtgacaaggctgctgctgctgagctgcaggaccgcatcgagaagatcctgaaggagaagatcatggactggaggcccaggcacctgacccgctggaaccgctactgcaccagcaccctgcggcacttcctgcccctgctggagaagagccagggagaagatgtggaggatgaccacagagctgagctgctgaagcagctgggggactaccgcttcagcggcttccccctgcacatgccctacagcgaggtgaagcccctgattgatgctgtgtacagcactggagtgcacaacattgatgtgcccaacgtggagtttgccctggccgtgtacatccacccctaccccaagaatgtgctgtctgtgtggatctacgtggccagcctcatccggaacagatag

SEQ ID NO: 36822 - DNA, 1767 bp, Artificial Sequence
  derived and/or modified sequence
atgaacccccgggaggagaaggtgaagatcatcacagaggagttcattgaaaatgatgaagatgctgacatgggccggcagaacaagaacagcaaggtgcggcggcagcccaggaagaagcagcccccaacagctgtgcccaaggagatggtgtctgagaagagccacctgggcaacccccaggagcctgtgcaggaggagcccaagacccggctgctgtccatgacagtgcggcggggccccaggagcctgccccccatccccagcaccagcaggactggatttgctgagttctccatgaggggccgcatgagggagaagctgcaggccgcccggagcaaggccgagagcgccctgctgcaggagatccccaccccccggccccggcggctgcggagccccagcaagaaggagctggagacagaatttggaacagagcccgggaaggaggtggagaggacccagcaggaggtggacagccagagctacagccgggtgaagttccatgattctgccaggaagatcaagcccaagccccaggtgcccccaggcttccccagcgctgaggaggcctacaacttcttcaccttcaactttgatcctgagcctgagggcagcgaggagaagcccaaggcccggcaccgggccggcaccaaccaggaggaggaggagggggaggaggaggagcccccagcccagggcggcggcaaggagatggatgaggaggagctgctgaatggagatgatgctgaggacttcctgctgggcctggaccacgtggctgatgactttgtggccgtgcggcctgctgactatgagagcatccatgaccggctgcagatggagcgggagatgctgttcatccccagccggcagacagtgcccacctacaagaagctgcctgaaaatgtgcagccccgcttcctggaggatgagggcctgtacacaggagtgcggcctgaggtggcccggaccaaccagaacatcatggagaaccggctgctgatgcaggaccctgagcggcgctggtttggagatgatggccgcatcctggccctgcccaaccccatcaagcccttccccagccggccccctgtgctgacccaggagcagagcatcaaggccgagctggagaccctgtacaagaaggctgtgaagtatgtgcacagcagccagcacgtgatccgcagcggggaccccccaggcaacttccagctggacatcgacatcagcggcctcatcttcacccaccacccctgcttcagccgggagcacgtgctggccgccaagctggcccagctgtatgaccagtacctggcccggcaccagaggaacaaggccaagttcctgacagacaagctgcaggccctgagaaatgctgtgcagacaggcctggaccctgagaagccccaccagagcctggacaccatccagaagaccatcaatgagtacaagtctgagatccggcagaccaggaagttcagagatgctgagcaggagaaggacaggaccctgctgaagaccatcatcaaggtgtggaaggagatgaagagcctgcgggagttccagcgcttcaccaacacccccctgaagctggtgctgaggaaggagaaggctgaccagaaggcagatgaggaggcctatgaggccgagatccaggccgagatcagcgagctgctggaggagcacacagaggagtatgcccagaagatggaggagtaccgcaccagcctgcagcagtggaaggcctggaggaaggtgcagtag

SEQ ID NO: 36823 - DNA, 4539 bp, Artificial Sequence
  derived and/or modified sequence
atggtgagcgagaagagccacctgggcaacccccaggagcccgtgcaggaggaacctaagactcggctgctgtctatgaccgtccgccgaggccctaggagcctgcctccgatcccatcaacatccagaacgggattcgctgagttctccatgcggggtcggatgagggaaaagttacaggcggcccgctcgaaggccgagtcagcgctgctgcaggagatccccaccccgagaccacgaaggctgcggtccccttccaagaaggagctggagaccgaattcgggacagagccaggcaaagaagtcgagagaacccagcaggaagttgactctcagtcatatagcagggtgaagttccatgacagcgccagaaagattaagcccaaaccccaggtacctccagggtttcccagtgccgaggaggcctataatttcttcactttcaacttcgaccccgagcctgaggggtccgaggaaaagcctaaagcccggcatagggccgggacgaatcaggaggaagaagaaggggaagaggaggagcccccggcccagggcggggggaaagagatggatgaagaggagctcctaaacggcgatgacgctgaagacttcctgctgggtttagatcacgtggccgacgattttgtggccgtgcggccagccgattatgagagtattcatgaccggcttcagatggaaagagaaatgctttttattccctcacgacaaaccgtacctacttataaaaaattgcccgaaaatgtccaacctcggttcctggaggacgaaggcctttacaccggtgtgcggccggaagtggcccgcactaaccaaaacattatggagaaccgactcctcatgcaagatcccgaacgtcgttggtttggcgatgatgggcgaatacttgctcttcccaaccctataaaaccctttccctcacgcccacctgtcttaactcaggaacagagtatcaaagccgaactggaaactctgtacaagaaggcagtgaaatacgtgcattccagccaacacgtgatcagatcaggcgatccccctggaaactttcaactggacatcgatatttctgggctcatctttacacatcatccctgcttctctcgtgaacacgtgttagccgccaagctggctcaactttacgatcagtatctcgcccgccaccagagaaacaaagccaagttcctaaccgacaaactgcaagcactgaggaacgccgtccaaaccgggctagatccggagaagccccaccagagtctggataccatccaaaagactatcaatgaatacaagtctgagattagacagacacggaagttcagagatgctgaacaggagaaggacagaactctgctgaaaactatcatcaaagtctggaaagagatgaagagcctgcgcgagttccagagatttaccaatactccactcaagttggtgctgaggaaggaaaaggccgaccagaaggccgatgaggaggcttacgaggccgaaatacaggccgagatctccgagctgttggaggagcatacggaagagtatgctcagaaaatggaagaatatcgcacatctttacagcagtggaaggcatggcggaaagtccagcgcgccaagaaaaaaaagcgaaagcaggccgcagaagagcaccctggcgatgagatagcagaaccgtatcccgaggaagatttggtaaagcctagccctccagaacccacagatagggcagtcattgaacaggaagtacgcgaacgggccgcccagagcagacgtcgaccatgggaacctacgctggtacctgagctgtcccttgcgggaagcgttactccaaatgaccagtgcccacgggctgaagtgagtcgccgcgaagatgttaaaaagaggagcgtatatctcaaggtcttgttcaataataaggaggtgtctagaacagtgagcaggcccctgggggcagacttcagagttcattttggccagatatttaacctgcagatcgtcaattggcctgaaagcctgactctgcaggtttacgagaccgtgggccacagtagccccacactcctggcagaagtgttcctgcccattcctgagactacagtcgtcacaggcagagctccaaccgaggaggtcgagtttagcagcaaccaacacgtgaccttggatcacgaaggggtgggctcaggcgttccattttcattcgaagccgacggctctaaccaactgacccttatgacatccggcaaagtgtcccacagcgtagcctgggctatcggagaaaacgggattcccttgattcctcctttaagccagcagaacattggcttccgctcagctttgaagaaagccgacgcgatttcttcgatcggcacaagcggcctgacggacatgaagaagttggctaagtgggcagccgaatcaaagttggaccctaatgatcctaataatgctcctctgatgcagttaatttcagtggccacgtctggcgagtcctatgtgcctgattttttccggctggagcaattgcagcaagagttcaattttgtgagcgaccaggagctgaacaggagcaagcggttccgtcttctccacttgagatcccaggaggtgcccgaattccggaactacaagcaggtgcctgtgtatgatcgggaaattatggagaaggtttttcaggactatgaaaaacgtctccgcgatcggaacgtaattgaaacaaaagagcatattgacacacatagagccatcgtggcaaagtaccttcagcaggtgcgagagagcgtaatcaaccggttcctgattgccaagcagtacttccttctggccgatatgatagttgaagaagaggtgccgaatatttccatcctcggcctgtctctattcaagctggcagagcagaagcggcccctgcgtccacgccgcaaaggacggaaaaaggtcacagcgcagaacttgtccgacggggacatcaaactactggtcaacatcgtgcgcgcctacgatattccagttcgaaaacccgctgtgtccaaattccagcagcctagtagatctagcagaatgttttccgagaagcacgctgcatctccttctacctattcccccacccataatgccgattaccccctgggacaggtgttggtgcgccccttcgtggaggtgagctttcagcgaactgtgtgccacaccaccaccgctgagggccccaacccctcatggaacgaggagttggagcttcccttccgtgcccccaatggagactactccacggcttctctgcagtccgtcaaggacgtggtctttatcaatattttcgatgaggtactccacgatgttctagaggacgatagggagagaggttccggcatccacacacgcatagagcggcactggctgggatgcgtgaaaatgcccttcagcacaatttatttccaggctcggtttgagtctcaagaggacgaaaagctcctccaggcaacagaaaagttccaagcggagtgtgctctcaaattccccaatagacagtgtttgaccaccgtgatcgacatttccggaaaaacagtatttatcacacggtatctgaaacctttgaaccctcctcaagagctgctgaacgtgtacccgaacaaccttcaagctacagccgagcttgtcgcgcgctacgttagcctaattccatttctccctgataccgtctcatttgggggtatctgtgacctatggtcaaccagcgaccagtttctggacctcttggcaggtgacgaggaggaacacgctgtgctgctttgtaattacttcctctcactgggcaaaaaggcttggctacttatgggcaatgctattccagaaggccctacagcctacgtactgacctgggagcaaggacggtatctaatttggaacccatgctctggccacttctacggacaatttgacaccttctgccccctgaaaaatgtgggatgtctgattggccccgataacatttggtttaacatccagaggtacgagtccccgctgaggatcaatttcgacgtgacaaggcctaaactctggaagtccttcttctctcgcagcttgccataccccgggctgtcgagcgttcaacccgaggaattgatttaccaacgatcagataaggctgctgccgcagagctccaagatcggatcgaaaagattctcaaagagaagattatggactggaggccaaggcacctcacccgatggaaccgttactgtaccagtactctcaggcattttttacccctgctggagaaatcacagggcgaagatgtggaggacgaccaccgtgccgagttgttaaaacaactgggagattatcgttttagcggcttccctctccacatgccgtacagcgaggttaaacccctcatagatgctgtttattctacaggcgtccacaacattgatgtgccaaatgttgagttcgcattggcagtttacattcatccctatcccaaaaatgtgctcagtgtgtggatctacgttgcctctctcatacggaacaggtag

SEQ ID NO: 36824 - DNA, 4863 bp, Artificial Sequence
  derived and/or modified sequence
atgaacccccgggaggagaaggtgaagatcatcaccgaggagttcatcgaaaacgacgaagacgctgatatgggtcgccaaaataaaaacagtaaggtgcggcgacaacctagaaagaagcaacctcctactgccgttccgaaggaaatggtctcagagaaaagtcacttgggtaacccccaagagcccgttcaagaagagcccaagacccggctgctatcgatgaccgtgcgaagaggtccacgttccttaccccctatcccatcgacttccagaaccggattcgccgaattctcgatgcgcgggcgaatgagggaaaaactccaggccgctcgaagcaaggctgaaagcgcacttctgcaagagatcccaacaccgcggccgagaagattacgcagcccatccaagaaggaactggagaccgagtttgggactgaacccggaaaagaagtagagaggacccagcaggaggtggattcacaatcctatagccgagtgaagtttcatgattctgctcggaaaattaagcccaaaccacaggtcccacctggcttccccagcgccgaagaagcctataatttcttcacttttaactttgaccccgaaccggaaggctcagaggaaaaacctaaagctcgccaccgggccgggaccaatcaagaggaggaggagggcgaggaggaggaacccccagcccaggggggggggaaagagatggacgaggaggaacttttgaatggtgatgatgccgaggatttccttctagggttggatcacgtagctgatgacttcgtagcagtgcgccccgctgattatgaaagcattcacgaccggctgcaaatggaacgagagatgctgttcatcccatcgaggcagactgtgcccacttacaagaagcttcccgaaaatgtgcagccccgtttcctggaggatgaaggtctctacactggggttcgacccgaggtggctcggacaaaccagaacattatggagaatcggctgctgatgcaggatcctgagcgccggtggttcggcgatgacgggcgtattcttgccttgccaaatcctatcaagccatttccttcacgacccccagtgctgacacaggagcagtcgatcaaggcagaattggaaactctgtacaaaaaggcggtgaagtacgtacacagtagccagcacgtaattaggtccggcgacccacccgggaattttcagctggatattgatatcagtggcctcatcttcacacaccatccttgtttcagtagggagcacgtcctcgccgcaaaactggcacagctctacgaccaatacttagcacgacaccagcggaataaggcaaagtttttgactgacaaactacaggccctgcgcaacgctgtccaaactggactggatccggagaaaccccaccagtcactggatactatacaaaaaaccatcaatgagtataagtctgagattcgccagactaggaaattcagggacgcagaacaagaaaaagataggacgctactgaagacaatcatcaaggtttggaaagagatgaaaagtcttcgagaattccaaagattcacgaatacccccctgaaactcgtgctcagaaaggagaaggcggaccaaaaagccgacgaggaagcatatgaggcagaaatccaagcggagatctcggaacttttggaggaacatacagaagaatatgcccaaaagatggaggagtatagaacaagcctgcagcagtggaaggcgtggcggaaagtccaacgagctaagaagaagaagcgaaagcaggccgccgaagagcatccgggagacgaaatcgcagaaccataccccgaggaggatctcgtgaaacctagccccccagagcctacagacagagctgtaatcgagcaggaggtgcgagagagagccgcccaaagtcggagacggccctgggagccaacgctggtgccagaactgtcactggcaggatcagttactcccaatgaccagtgtccccgtgccgaggtgagccggagggaagatgtcaagaagagatccgtgtacttgaaggtactgtttaacaataaggaagtgtccagaacggtttcacggccactgggcgccgatttccgagttcactttggccagattttcaatctccagattgtgaactggccggagtcacttaccctgcaggtctatgaaaccgtcgggcacagctctcctactctgttagccgaagtgtttctcccgatccctgaaaccaccgtcgtgacagggagggctccaacagaagaggtggaattttcctccaatcaacacgtgaccctcgaccacgagggtgtcggaagcggagttccatttagcttcgaggctgatggtagcaatcagctaactctgatgacatctggcaaggtgagtcactccgttgcctgggccattggagaaaacgggattcctttaattccaccattaagccaacaaaatataggctttcgtagcgccctgaagaaggcggatgctattagttctattggtacatctgggctaaccgatatgaagaagctggccaagtgggccgcagagagtaagcttgatccaaatgatccaaacaatgcccccttgatgcaacttatttcagtggccacttccggtgagtcatatgtgcctgatttcttccgcctggaacagctgcagcaagaattcaattttgtgtctgatcaggaattgaaccgaagcaaacgcttcaggctgttgcacttacggtcccaagaagtcccagagttcaggaattataaacaggttcctgtctatgacagggagattatggaaaaggtgtttcaggactatgagaagcggcttcgtgatcgcaatgtgatcgagaccaaagaacatatcgacacccaccgagccatcgtagccaaatacctccagcaggttcgggagtccgttatcaatcggttcttaattgctaaacagtattttctgctcgccgacatgatagtggaggaggaagtgcctaacatttctatcctaggactctcattgtttaagctggcagagcagaagaggccgctaaggcctagaagaaagggcagaaaaaaggtaacagcccaaaatctgtcagacggcgacataaagctgctggtgaatatcgtgagggcatacgacatccctgtgagaaaacccgccgtgagtaagtttcaacagccgagcaggtcatcccgtatgttctcagagaagcacgccgctagtcctagcacatactcgcccacccacaatgccgactatcctctggggcaggtgctcgtgagaccgttcgtggaggtatcctttcagcggaccgtttgtcataccacaacagcagagggccccaatccttcgtggaatgaagaacttgaactgcctttcagagcgccaaatggcgattacagcacggcatcattacagtctgtgaaagacgtagtgtttattaatatttttgatgaggtgctgcacgatgtcctggaggatgacagggagaggggttccggcatccacactcgcatcgaacggcactggctcggttgcgtaaagatgcccttctccacaatctatttccaggcacgcatcgatggtacgttcaagatcgatattcccccagtgctcctgggatattccaaggagaggaacatgattttagagaggggatttgatagcgtgcggagcttgagcgagggctcctacataaccctctttatcacaattgagccacagttagtacccggcgagtcaatacgcgaaaaattcgagtcccaggaagatgaaaagcttctacaagctaccgagaagttccaagcagagtgtgccctgaagtttcccaacagacagtgtctgactaccgtaatcgatatttccggcaaaacagtcttcattacaagatacctgaaacccctcaaccccccccaggaactcctgaacgtatatccaaacaatttgcaggcaacggccgagttagtcgcgagatatgttagtctgattccattcttacctgataccgtgtcctttggcggtatatgtgatctgtggtctaccagcgaccaatttctcgacctacttgctggcgatgaggaagagcacgccgtcttgttatgtaactacttcctgtccctcggcaagaaagcgtggctcttgatgggaaatgccatccctgagggtcctaccgcatatgtgcttacctgggagcagggccggtatctcatctggaatccttgtagcggacatttttatggtcagttcgatactttttgcccattgaagaacgtcgggtgcttaattgggcccgataacatctggtttaacatccaacgatacgagtcaccacttcgcatcaactttgacgtgaccaggccaaaattatggaagtcgttcttttcccgtagcctgccctatcctgggctgtccagtgtgcaaccagaggagctgatctaccaacggtctgacaaggcggcggccgcagagctgcaagatcgcattgagaaaatcctgaaggaaaagatcatggactggaggccccggcatctgacgcggtggaatcggtattgtaccagcacactcagacatttcttgccccttttggagaaatcccaaggcgaggacgtggaggacgaccacagagctgaattgttaaagcagcttggcgattacagatttagtggctttcctctgcacatgccgtatagtgaagtgaagccactcatcgacgctgtgtattccactggcgttcataatattgacgttcccaatgtcgagtttgccctggccgtgtatatccacccgtatcccaaaaacgtactctcagtctggatttatgttgcgtctctgatccggaatcgttag

SEQ ID NO: 36825 - DNA, 4863 bp, Artificial Sequence
  derived and/or modified sequence
atgaacccccgggaggagaaggtgaagatcatcaccgaggagttcatcgagaatgacgaagatgctgatatgggtaggcaaaacaagaacagtaaggtacgcagacagcctaggaagaaacagccaccaaccgccgtgcccaaggagatggtgtctgagaagagtcacctcgggaacccgcaggaacccgtgcaggaggaaccaaaaactaggctgttatcgatgacggtgagacgtggcccgcgctctttaccgcctattccatctactagcagaacgggctttgctgagttctcaatgcgagggcgaatgagagaaaagctgcaggcagctcgctccaaagcggagtctgcgttacttcaagaaatccccactccacgaccgagacggctcaggtccccttccaagaaagaactcgagaccgagttcggcactgagccgggcaaagaggttgagagaacccagcaggaagtcgactcacaatcttatagtcgggtcaagtttcacgactctgcccggaagattaagcccaagcctcaggtcccgccagggttccccagcgcggaagaagcatacaacttttttacattcaacttcgacccagagccagaagggtcagaggaaaagccaaaggcacgacaccgcgccggaacaaatcaggaagaagaagaaggagaggaagaggagcctccggctcagggtggcggcaaggaaatggatgaagaggagctcctgaatggggatgacgctgaggatttcctgttaggattagaccatgtggcagatgacttcgtagccgtgcggccagccgactacgaatcgattcacgaccggctacagatggagagagaaatgctattcatcccttctcgacagacagtccccacatacaagaagctgcccgaaaatgtgcaaccacggtttctagaagatgagggtctgtataccggagtacggcctgaggtggccaggaccaatcagaacatcatggaaaacagactcctgatgcaggaccctgaacggcgctggttcggagacgatggtagaattcttgcactgcctaaccctattaagccgtttcccagcaggccgccagttcttacccaagaacagtcaatcaaagccgaactggaaacattgtacaaaaaggcggtgaagtacgtacattcttcccaacacgtaattcgcagtggcgatccccccgggaatttccagctggatatagacatctccggtttgatctttacccaccacccctgcttttctagagagcacgtgctggcagctaagctggcacagctgtatgaccagtacttggctcgacaccagcgaaataaagcaaagtttctaactgacaagctgcaagctcttcggaacgccgtgcaaacagggctggatcccgagaaaccccatcagtctttggacacaattcagaaaacaataaatgaatataaatccgaaatccggcagacacggaaattccgagatgcagagcaggagaaggacaggacgctcctaaaaactatcattaaggtctggaaagaaatgaagagcttgagggagtttcagcgtttcaccaacacacctctaaagctggtgttgcggaaagaaaaggccgaccagaaggccgacgaggaggcttacgaagcagaaatccaggcagagatctcggagctcttagaggaacacacggaggaatatgctcaaaagatggaggagtaccggacgagccttcaacaatggaaggcctggcggaaagtgcagcgggccaagaagaagaagaggaaacaagccgccgaggaacatcctggtgacgaaatcgccgaaccttatcccgaagaggatctggtcaagccctcacctcccgagcccaccgatcgtgctgtgattgaacaggaggtgcgggagagagccgcccagtctaggcggagaccctgggagcctacactcgtccccgagctctctttagctggctctgttacgcccaatgatcaatgccctagagccgaagtgtctcgaagggaggatgtgaagaaacgctcggtgtacctgaaagtgcttttcaataacaaggaggtgtcaagaactgtgtcacggccactcggcgctgactttcgtgttcattttggccagatcttcaacctgcagattgtgaattggcctgagtccctgacgttgcaggtgtacgagactgtcggccattcaagcccgacgctcctggccgaagtgtttttgcccattccggaaaccactgtagtgaccggaagagcacctactgaagaggtggagtttagcagtaaccagcacgtgacgctggaccacgaaggggttggctctggggtaccgttctccttcgaagcagacggatcgaatcaacttactctgatgacatcaggcaaagtcagtcactccgttgcttgggccattggggagaatggtatcccccttatccccccactgagtcagcagaatattgggtttagaagcgccctgaagaaagcggacgccatctcctccatcggcacctccggtttaacagatatgaaaaagcttgccaagtgggccgcagaatccaaactcgacccaaatgaccccaataacgcccctctcatgcagctgatcagcgtcgctactagcggagaatcctatgtgccagattttttccgcttggaacaactgcagcaggagtttaacttcgtcagcgaccaagaattgaatcgcagtaaaagattcaggctgttacacctgaggtctcaggaagtgcctgaattccgcaactacaagcaggtacctgtgtacgatcgagagattatggagaaggtgttccaagactacgagaagagactcagggatcgcaacgttattgaaactaaagagcatattgatacccatcgggctattgtggccaagtacctgcaacaggtcagggagtccgttattaaccgatttcttatcgcgaagcagtatttcctgcttgcggatatgattgtggaggaggaagttccaaacatcagtatactgggcctgtccttgttcaaactcgccgaacagaagagacctctgcgccctcgacggaagggccggaagaaagtgacagcacagaatttgtcggacggggacatcaagctgctggtgaatatcgtacgcgcttacgacatccccgtgcgcaagccagctgtctccaagtttcagcagccatctagatctagccgcatgttctccgagaagcatgcggcttcgcccagcacctactcacctacccacaatgctgactacccactgggacaggttcttgttcggccctttgtggaggtaagctttcagagaacagtttgtcataccaccaccgccgagggaccaaacccaagctggaacgaagagttagagcttcctttcagggcgcctaacggcgactacagtaccgccagcttacaaagcgtgaaagacgtggtgttcatcaatatatttgatgaagtgctgcacgatgtccttgaggatgacagggagcgggggtccgggattcacacgcggatcgaaaggcactggttgggctgcgtcaagatgcccttttccactatttacttccaggctagaatcgatggtactttcaagatcgatattcctccagtgttgttgggttactcaaaggaaaggaacatgattctagagcgcggcttcgatagcgtgcgttctctgtctgagggctcttatattaccctctttattacaatcgaaccccagctggtccccggagaatctattcgcgaaaagttcgagagccaggaggatgagaaactgctgcaggccacggagaaattccaggccgaatgtgctctgaagttcccaaatagacagtgtctgactaccgtcattgatatcagcggaaagacagtctttattaccagatatttaaagcccctgaacccgccgcaggagttgctcaacgtttatccaaataatctgcaagctaccgcagaactggtcgcgcggtacgtctctctgattccattcttaccagatacagtgagttttggcggcatatgtgacctctggagcacaagcgatcagtttctagacttgttggcgggcgatgaagaggaacatgctgtcttactgtgcaactactttctgagcttgggcaaaaaagcctggttgctgatgggaaacgctattcccgaggggccaacagcctacgttctgacttgggagcaggggagatatctgatttggaacccttgcagtggccacttttacggacagtttgataccttctgtcccctgaagaatgttggttgccttatcggcccagacaacatctggttcaatatccagaggtacgaatctccgcttaggataaactttgacgtgacccggccaaagctgtggaagagcttcttctctcgttctttaccctacccagggttatcatccgtgcagcctgaggagctcatttaccagcgcagcgataaggctgctgctgctgagttacaagacagaatcgaaaagattctcaaggagaagattatggattggcgcccacgccacctgactcgctggaacagatattgcacatcaacactgcggcatttcctgcctttgctggagaagtcacagggcgaggacgtcgaggatgatcatcgggcggagctgctgaagcagctaggagactaccggttttccggcttcccgttacatatgccctatagtgaggttaagcctctcatcgacgcggtatattccaccggcgtccacaacatcgatgtcccaaacgtggagttcgcattagctgtctatatccatccctaccctaaaaacgtcctcagcgtttggatctatgtcgcttccctgattcggaaccgatag

SEQ ID NO: 36826 - DNA, 4539 bp, Artificial Sequence
  derived and/or modified sequence
atggtgagcgagaagagccacctgggcaacccccaggagcccgtgcaggaggaacctaaaacacggttgctctctatgacagtgagacggggcccacgctccctccctccaatcccgtccacttccagaaccggatttgccgaattttcgatgcggggaaggatgcgcgagaagcttcaggccgctaggtctaaggcagagagcgcgttactacaggagattcccaccccaaggcctaggcggctccgctcacctagtaaaaaagaactggaaactgagttcggcaccgagccaggtaaggaagtagagaggacccaacaggaagtcgattctcaatcgtatagtagagtcaagttccacgatagtgcccgcaagataaagcccaagccacaggtgcctccgggctttccctcagcggaagaggcttataatttcttcactttcaacttcgacccagaacccgaagggtcggaggaaaagccaaaggcacggcaccgtgcaggaaccaatcaggaggaggaggagggggaagaggaagaacctcccgcccagggcggcggaaaggaaatggacgaggaggaattgcttaacggggacgacgccgaggacttcctcttgggactcgatcatgtcgccgatgactttgttgccgtcagacctgctgattacgagtcgatccacgaccgtcttcagatggagcgtgagatgctcttcattcccagccggcagacagtgcctacttataaaaagctaccagaaaatgtgcagcccaggtttctggaagacgaaggactgtatactggggttcgaccagaggtggccaggaccaaccaaaatatcatggaaaaccggctactgatgcaggatcccgagcggaggtggtttggtgatgacggacggatcctcgccctacccaatccaattaagccatttccatccagacctcctgtgcttacacaggagcaaagtattaaggctgagctggaaaccttgtataagaaagcagttaagtatgtgcattcatcccagcacgtgatcagatccggcgaccctcctggcaacttccagctggatatcgacatcagcgggcttatcttcacccatcatccatgttttagtcgagagcacgttctcgcagcaaaattggcccagctgtatgaccagtatctggctagacaccagcggaataaggccaaattcctgaccgataagctgcaggccctgcgtaatgccgtccaaaccggcttggatcccgagaaacctcatcagtctttagacaccattcaaaaaaccatcaatgaatacaagagtgaaattagacaaacgaggaagttccgggatgccgaacaggaaaaagaccgcacactgctgaaaactatcatcaaggtatggaaagaaatgaagtcactaagagagtttcagcgctttactaatactcctcttaagctggtgttgcggaaggagaaagccgaccagaaggccgatgaagaggcctatgaagctgagatccaagcagagataagtgagctgctggaagagcacaccgaagagtacgcgcaaaagatggaagagtacaggacctccctgcaacaatggaaggcatggcgcaaggtgcaacgggcgaaaaaaaagaaaagaaagcaagctgccgaggagcacccaggcgacgaaatcgcggaaccatatcccgaagaagatttagtgaagcctagccctcctgagcctacggaccgggccgttattgagcaggaggtcagggaacgtgcagcccagtctaggcgccggccttgggagccaacactcgtccctgagctgtctctggccggctctgtgacacccaacgaccagtgcccgagagccgaagttagtagaagagaggatgtaaagaaacgctccgtctacctcaaagtactgttcaacaacaaagaagtcagcagaactgtctcaagacccctgggcgcagactttcgggtacattttggccaaatctttaacctccagatcgttaactggcctgaatccctaacactccaagtgtatgagacggtcggacattctagccctacgctccttgccgaagttttcttgccgatccctgaaactacggtggtgacaggacgcgcacctacagaggaggtcgaattcagctctaaccaacatgtcaccctcgatcatgagggcgtcgggtccggcgttccatttagcttcgaagctgacgggagtaatcagctgacccttatgacatccggtaaagtgtctcacagtgtagcgtgggctattggagagaacggaatccctttgatacctccacttagccaacagaatatcggatttcggtctgctttaaagaaggcagacgctatctctagtatcggcacctctgggttaaccgacatgaagaaattggctaagtgggccgccgaatcaaaactagaccccaacgacccgaataatgctccactgatgcagctcatctctgtcgcgaccagcggggaatcttacgtgcctgacttttttcggctggagcagcttcaacaggagtttaacttcgtaagtgaccaagagctaaatcgcagcaagaggtttagactgctacatttacgcagtcaggaggtgccagaatttaggaactacaagcaggttccagtgtacgaccgagaaattatggaaaaagtttttcaggactatgagaaacgattacgggaccggaacgtgatcgagaccaaggaacacattgacacgcacagggcgattgtagcaaaatatctacagcaggtgcgtgaaagtgtgattaacagattcctcatagccaaacagtacttcttgctcgcggatatgatcgtcgaagaagaggtgccaaacatttcaatactggggctgagcttgttcaaattggcggaacaaaagagacctttacggcctcgccgcaaggggcggaaaaaagttaccgcccagaacctgtcagatggtgacatcaagctgctcgtgaacatcgttagggcctacgacattccggtccgtaaacccgctgtgtctaagtttcaacagcctagtcgctccagtcgcatgttttcagaaaaacacgcggctagcccctcgacttactcccccactcataatgctgattatcccttaggacaggtgctggttcgaccatttgttgaagtgtccttccaaagaactgtgtgccatacgacaacagccgaggggccgaatcctagctggaacgaagaactggagctccctttcagagccccaaatggggactattctacagcctctcttcagtctgttaaggacgtcgtcttcattaacatctttgatgaagtgttgcacgacgttctggaagatgacagggagagagggtccgggattcacaccagaatcgaacgccactggttaggctgtgttaaaatgcccttctctactatctacttccaggccagattcgagagccaggaggacgaaaagctgctgcaggcaacagaaaagttccaggccgagtgtgccctgaaatttcctaatcggcagtgccttacaaccgtgatcgatattagcggtaaaaccgttttcataacacgctacctgaagccgttaaatccgccgcaagagctgctaaacgtataccctaataacctacaggccaccgctgagctggtggcaaggtacgtcagcctgatcccattcttgcccgacactgtgagctttggcgggatttgtgacctctggagcaccagtgatcaatttctcgacttgctggccggagatgaggaggagcacgcagtgctgctgtgcaattactttctgtctctgggaaaaaaagcttggcttctgatgggtaatgccatccctgagggcccaactgcctacgtgcttacctgggagcaggggcgatatctgatctggaatccatgttctgggcacttttacggacagtttgacaccttttgcccgctgaaaaacgttggctgtcttatcggaccggataacatatggttcaacattcagcgctatgagtcccccctacgaatcaatttcgacgtgactcggcccaaactgtggaagtcctttttctcacgatcgctgccataccctgggctgagctctgtccagcccgaagagctcatttaccaacgttctgacaaagccgctgctgctgagctgcaggacagaatcgagaaaattctgaaggaaaaaatcatggattggagaccccgtcacctcacacgttggaacagatactgcactagcacactgagacattttctcccgctgctggagaagtcccagggtgaagacgtggaagacgatcaccgtgccgagcttttaaagcagctaggagattaccgcttttccggctttcccctacacatgccatacagcgaagtcaagccgctgattgatgctgtgtactctacaggagtacataatatcgacgtgccaaatgtggaatttgccctggccgtctatattcatccatatccaaagaatgtgctgtccgtttggatctacgttgcgtcccttatcagaaatcgctag

SEQ ID NO: 36827 - DNA, 4863 bp, Artificial Sequence
  derived and/or modified sequence
atgaacccccgggaggagaaggtgaagatcatcaccgaggagttcatcgaaaatgatgaggacgcggatatgggtagacagaataagaactctaaagtcaggagacaaccccggaagaagcagcctcctacggccgtacccaaggagatggtgagcgaaaagagtcacctcggcaacccccaggagcccgttcaggaggaacctaaaactagactgctcagtatgaccgttagaaggggacctaggtctctgccgcccattccttccacttcaagaacagggtttgctgaatttagcatgcgggggaggatgcgcgagaagcttcaggcggcgaggagcaaggccgaaagcgccctattacaggagattccaacaccccgacctcgaaggctgcggtctccaagcaagaaagagctcgagacagagtttggaaccgaacccggcaaggaggtggaacgcacacagcaagaggttgactcgcagagctattcacgagtcaagtttcatgattcagcccgcaagatcaagcccaagccgcaggtcccacccggcttcccctctgcagaagaggcatataatttttttaccttcaacttcgaccctgaaccagagggatcagaggagaaacccaaggctaggcatcgggccggtacaaaccaggaagaggaggaaggggaagaagaagaaccccccgcgcaaggcggtgggaaagagatggacgaggaggagctgctgaacggcgacgatgcagaagatttcttactcgggttggaccatgtcgccgacgatttcgtcgctgtccggcccgctgactacgaatccatccacgacaggcttcagatggagcgggagatgcttttcatacctagtcgtcagacagttccaacctacaagaagctgcccgagaatgtccagccgagattcctcgaggacgaggggctctataccggcgtgcgacccgaggtggcgcggactaatcaaaatattatggagaaccggctgttgatgcaggaccccgagcggcgctggttcggtgatgatggacgcatactggccttgcctaacccaattaaaccgtttccctcgaggccccccgtgctgacacaagagcagtccatcaaggctgaacttgaaactctatacaaaaaagccgttaaatatgtgcattcctcacagcatgtaattcgatcaggcgatcctccagggaattttcagcttgacattgatatctctggactgatttttacacaccatccttgcttctctcgggagcacgtgttggcagctaaattagcccaactttatgaccagtacctagcaagacatcagcgaaacaaagcaaaattcttgacggacaaattgcaggctctgcgcaatgcagtgcagacgggtctggaccccgagaagccccatcagtccttggatacaatccaaaagaccattaatgaatataagtcggaaattcgccagactcggaagtttcgggacgccgaacaagagaaggatagaactttgcttaaaaccattatcaaggtgtggaaagagatgaagagtcttcgggaattccaaagattcactaacacccccctgaagctggtcctaagaaaggagaaggctgaccagaaggcagatgaggaagcctatgaagccgaaatccaagcagaaattagtgagttgctggaagaacataccgaagagtacgcacagaaaatggaagagtacaggacaagcttacagcagtggaaagcctggcggaaagtccagagggccaaaaagaagaaaaggaagcaggctgcagaggagcaccccggcgatgaaattgccgaaccctacccagaggaggacctggttaaaccttctcctccagagccaacagatagagccgtcattgagcaggaggtacgggaaagggccgcgcaatctcgcagaaggccatgggaaccaactttggtccctgaactttctctggccggatccgtcactccaaacgaccagtgcccaagagccgaggtgtctcgccgcgaagacgttaagaagcgtagcgtttaccttaaggtcctcttcaacaataaagaggtgtcccgcactgtttctcgcccacttggcgccgacttccgagttcattttggccagatcttcaatctgcaaatcgtcaactggcctgagagtcttacgctccaggtgtacgaaacagtcggccacagcagtcccaccctcttggccgaggtgtttttgcccatccccgagaccaccgtggttaccggtagagctccaaccgaggaggtcgagttttcctccaatcagcacgttacgttagatcacgaaggcgtcggatccggagtccccttttcttttgaagctgacggaagtaaccagctaacgctcatgacctcggggaaagtgtctcactccgtcgcctgggccatcggcgagaatgggatccccttgattcctcctctgtctcaacagaacatcggatttagaagcgccctgaagaaggcagatgctatcagcagcattgggactagtggcttaactgatatgaagaagctggcgaaatgggccgccgagtcaaagctggatcccaacgacccaaacaacgccccactgatgcagctcatctcagtagccactagcggcgagtcatacgtacccgatttctttaggttagagcagcttcaacaggagtttaatttcgtcagtgatcaagaactgaatcggtccaaaaggttcaggctgctacacctgcggtctcaggaggtacccgaatttcggaattacaagcaggtcccagtgtacgacagagagatcatggagaaggtgtttcaggactacgagaagaggctgcgagatagaaatgtgattgagacaaaggagcatatcgacacacaccgtgccatagtggccaaatatttgcaacaagtgagagaatctgtgattaaccgttttctcatagctaagcagtacttcctgctggccgacatgatagtggaggaggaggtccctaacatcagcatactcggactcagcctttttaagttggccgagcagaaacgccctcttcgccccagacggaaggggagaaaaaaggttacagctcagaacctgagtgacggcgacatcaagctcttagtaaatatcgtccgggcctacgatattcccgtccggaagcccgccgtgtcaaaatttcaacagccatcaagatcaagccgaatgttttccgagaagcatgccgctagcccaagcacttacagcccaacacacaacgcagactatcctctggggcaggtgctggtgcgcccattcgtcgaagtgtcctttcagcgcacagtttgccacactacgacagccgagggcccaaatcccagttggaacgaggaactagagctgccgttccgcgctccaaatggggactattccaccgccagcctacagagtgtgaaggacgtagtattcatcaacatatttgacgaagttcttcacgacgtgctcgaggacgatagggaaagaggttcaggaatacatactcgaatagagcgtcattggttagggtgtgtcaaaatgccattcagtaccatctactttcaggccagaatcgatggcaccttcaagattgatatccccccagtgttgctaggctatagcaaggagcgcaacatgatcctggagaggggatttgactctgtgaggtctctaagcgagggatcctacattacactcttcatcaccatcgaacctcagctggtgcctggcgagtctatcagggaaaaatttgagtcccaggaggatgagaagctactgcaagctactgagaagtttcaagctgagtgtgccctgaaattccccaatcgacagtgcttaacaactgtgatcgacatttccggaaaaaccgtctttattacccggtatctgaagcccctaaatcctccacaggagctgttgaacgtatatcctaacaacttacaggctaccgccgagctggtggccagatatgtcagccttataccatttctgcccgacacggtctcattcggcggcatttgtgacctgtggagcacgtctgaccaatttctggatctgctggccggcgacgaagaagaacacgcagtgttactctgcaattatttcctgtccctcggaaaaaaggcctggttgctgatgggaaacgctatccctgaagggcccaccgcttatgttctgacgtgggagcaggggcgttatctgatctggaacccctgctctggccatttttatggccagtttgatacgttctgcccccttaaaaatgtagggtgcttgataggtccagacaacatctggtttaatatccaacgatacgagagccctttacgaataaacttcgatgtgacccggccgaagctctggaagtcttttttctcacgttctttaccctaccccggtctctcaagcgttcaacctgaggagctgatctatcagagatctgacaaagccgctgcagctgagctgcaggatcgcatcgaaaaaattctgaaagagaaaataatggattggaggcccaggcatctgaccagatggaaccggtactgtactagcaccctgcgccacttcttgcccttgcttgagaagtcacagggagaagacgtcgaagacgaccaccgggccgagctgctgaagcagctaggggactatagattttctgggtttccccttcacatgccttattcagaggtgaaaccacttatagatgcagtctactccaccggagttcacaatatcgatgtacctaacgtcgagttcgctctcgctgtgtatatccacccttaccccaagaatgtgttgtccgtctggatctatgtggctagcttaatccggaaccgttag

SEQ ID NO: 36828 - DNA, 4539 bp, Artificial Sequence
  derived and/or modified sequence
atggtgagcgagaagagccacctgggcaacccccaggagcccgtgcaggaagaaccaaaaacgcgcctcctaagtatgactgtaaggaggggaccaagatccttgccccctattccctcaacaagccgaacgggattcgccgagttcagcatgcggggccggatgagggagaagctacaggccgcccgctccaaggcggaaagtgccctgctgcaagagataccaaccccacgtccacgacggctacgcagtcccagcaagaaggaactggagaccgagttcgggacagagccaggaaaagaagttgagaggacacaacaggaagtcgactcccagagttactcccgtgtaaagtttcacgatagtgcccgtaaaattaaacccaagccacaggtccctccaggattcccttcagccgaagaggcttacaacttttttacttttaacttcgatcctgaacctgaaggcagcgaggagaagcctaaggcaagacacagggctggcacaaaccaagaggaagaggagggggaagaggaggaacctcctgcccaaggcggcggaaaggaaatggatgaggaagagcttctgaatggggacgatgcagaggacttcctgctaggcctggaccatgttgctgatgatttcgtggcagtgcgccccgcagactatgaatccattcacgaccgcttgcagatggaacgtgagatgctctttatcccgtcccggcagaccgttccaacctataaaaagcttccagagaatgtgcagccccgcttcctcgaagatgagggcctgtatacaggtgtgcggccagaagtggccaggacaaatcaaaacatcatggaaaatcgcctgttgatgcaggaccccgagcgacgatggtttggagacgatggtaggatcctagcacttcccaaccccatcaagccgttccccagtagacctcccgtcttgacacaggagcagagtatcaaggctgaactcgaaaccctctataaaaaggccgtgaagtacgtgcactccagtcagcacgtcatacgctccggggaccctcccggaaatttccagttggatatcgacatatccggcctgattttcacacatcacccctgctttagcagggaacacgtcctggccgcaaagttggctcagctctacgaccaatatttagcacggcaccagcgtaataaggcaaagttcctgactgataaactccaggccctgaggaatgctgttcagacaggactcgatcccgaaaaaccacatcagagcctggacactatccagaagaccatcaacgagtacaagtccgagattcggcagacccgtaagtttagagatgccgagcaagagaaagatcgtacactgctgaaaacaattattaaggtgtggaaagaaatgaagtcgctgagggagttccagcgctttacaaatacacctttgaagctggttttaagaaaagaaaaagccgaccaaaaagcggatgaagaggcttacgaagccgagatccaagctgagatcagcgagctgttggaggagcatactgaggaatacgcccagaaaatggaggaatatcggactagtttacagcagtggaaggcctggcgaaaggtgcaacgggccaagaagaagaaacgcaaacaagccgctgaggaacacccaggagatgaaattgctgaaccttacccagaggaagacctggttaagccttctcctccagagcccactgacagggcagtgatcgaacaggaggtgcgggagagggccgctcagtcccgccgccgcccttgggaaccgaccctagtacccgagctaagcctggccggtagtgttaccccaaatgatcagtgcccgcgcgctgaggtttctcggcgcgaggacgtcaaaaagcggagtgtttatcttaaagtcctttttaacaataaagaggttagtcgcactgtaagtcgcccattgggggctgacttcagagtccattttggccagatcttcaacctccagattgttaattggccggagtctctgacattacaagtatacgaaactgtgggccactcatctccaacactgctggccgaggtgttcctgccgatcccagagactacagttgttaccggtagagctccgacagaggaggtggagttttcgtctaaccagcacgtgacattggaccacgagggggtgggttcaggcgtcccttttagttttgaagctgatggcagcaatcagttaaccctcatgacttctggcaaagtatctcactcagtagcctgggctattggcgagaacgggatccctctgatccctcctctaagccagcagaacatcggcttccgatccgctcttaaaaaagcagatgctatttcatccatcggaactagcgggttgaccgacatgaaaaaactcgcaaagtgggcagccgagtccaaattagaccctaatgaccccaacaatgctccgctgatgcaactgatctccgttgccacctccggagagtcatacgtgccggacttctttcgactcgagcagctccagcaggagttcaattttgtaagtgatcaagagctgaaccggtctaagcgttttaggttgctccacctccgctcacaagaggtgcccgagttccggaattacaaacaggtgcctgtgtacgaccgtgaaatcatggaaaaagttttccaagattacgaaaaaaggctgagggacagaaatgtgatcgagacgaaggaacatatcgatacgcaccgcgcgatcgtggccaagtacctgcagcaggttcgtgagagcgtgattaaccggtttctgatagctaaacagtatttcctgttggccgatatgattgtggaggaggaggtccctaatattagtatcctgggcctgtccctatttaaactagctgagcagaaacgccctctacggccaagacggaaaggccggaagaaggttactgcgcaaaatctgtcggatggggacatcaagcttctcgtcaacatcgttcgtgcttacgacatacctgtgaggaagccagccgtgagtaaattccagcaacctagccggagctcccgcatgtttagcgagaaacacgcggcctctccgagcacctatagcccgactcacaatgccgattatcccttgggacaggtcctagtgagacctttcgttgaagtctccttccagcggactgtatgtcatactactaccgctgagggccccaatccaagttggaacgaagagctagagctgccattccgcgcgcctaatggggactattcgactgcgtctctgcagagcgttaaagacgtcgtcttcatcaatattttcgatgaggtgctgcatgatgtgcttgaggacgaccgagagaggggttctggtattcatacacggattgaaaggcattggctgggatgcgtgaaaatgccattttctactatctactttcaggcaaggttcgagtctcaggaagacgagaagctgctgcaggccaccgaaaaatttcaggcagagtgcgcactcaagtttccgaacaggcagtgcctaactaccgtaattgacattagcggaaagacagtctttatcacccggtacttgaagccattgaatccgccccaggagctcttgaacgtctatcctaataacctgcaagctaccgctgaactggttgcccgctatgtctcactgattccctttctgccagacactgtttcttttggcggaatctgtgacttgtggtcgacgtcggaccagtttcttgatttactggccggcgatgaggaggaacacgcagttctgctgtgcaattatttcctgagcctcggcaagaaggcctggctgttgatgggcaacgcaattccagagggtcctaccgcctacgtactgacatgggagcagggacgatatcttatttggaatccatgctccggccatttctacggacagttcgatacattctgtcctctgaaaaatgtgggctgcctcattggccccgataacatctggtttaatattcagcgatacgagtctcctttgcgcattaacttcgacgtgacccgacccaagctttggaagtcgttcttctctaggtcacttccctatcctggtctgagctccgttcagccagaagaactcatataccaacgcagtgacaaggcagctgcagcagaactccaagaccggattgaaaagatcctgaaagagaagatcatggactggcgaccccgccacctaactaggtggaacagatactgcacctccacacttcggcactttcttcctttactcgagaaaagccagggagaggatgttgaggacgatcaccgcgcggaactcctgaaacagctgggcgattatcggtttagcggattccccctccacatgccgtattctgaagtcaaacctctgatcgatgctgtctactctaccggcgtacacaacattgatgtccctaatgtcgagttcgcactagcggtgtatatacacccatatcccaagaacgttctgtcagtctggatctatgttgcttccctcataaggaaccgatag

SEQ ID NO: 36829 - DNA, 1767 bp, Artificial Sequence
  derived and/or modified sequence
atgaacccccgggaggagaaggtgaagatcatcaccgaggagttcatcgaaaatgacgaggacgcagacatggggcggcaaaacaagaactctaaggtgcgccggcaaccccgcaagaaacaaccgccgactgccgtgcctaaagagatggtgtcagagaaatcacacctgggcaatccacaggagccagttcaggaagaaccgaagacacgcttgttgagtatgactgtgaggagaggacctcggtcattacccccgattccatccactagtaggaccggtttcgcggagtttagcatgagggggcggatgcgagagaagctccaagcagcccgatcaaaagccgaaagcgccctgttgcaggagattcctaccccaaggcctagacgactccggagtcctagcaagaaagagcttgagaccgaatttggcaccgagcctggcaaagaggtggaacggacccaacaagaggtcgattctcagtcatattctcgggtgaagttccacgattccgctcggaaaatcaagccaaagccgcaggttccacctggtttccccagcgcggaggaggcctacaactttttcacattcaactttgaccctgagcccgaggggagcgaagaaaagccgaaggctagacatcgggctggaaccaaccaggaagaagaggagggagaagaggaagagcctcctgcccaggggggggggaaagagatggatgaggaagagctgctcaatggcgatgacgcagaagattttctcttaggcttggatcacgtagctgacgacttcgtagccgtacggcccgcagactacgaaagtatccacgatcgcttgcagatggaaagggagatgctgttcatcccttctcgacagactgttcccacctataaaaaacttcccgagaacgtccaaccacggtttctggaggacgagggcctctatactggcgtccgtcctgaggttgcccgaacaaaccagaacatcatggagaataggttgctgatgcaggaccctgagagacgttggtttggagacgacggccggattctggccttgcccaaccctattaagccctttccttcacggcctcccgtcctgacccaagaacagagcatcaaggctgagctggaaactctttataagaaagccgttaagtatgtccattcatcacaacacgtgatccgaagtggggaccccccaggtaactttcagctggatatagacattagcgggttgatattcacacatcatccttgttttagccgcgaacatgtgctggccgctaaacttgcacagctctatgaccaatatctcgcccgccaccagcggaacaaggccaagttcctgaccgacaaattgcaggcgctccgcaatgccgtgcaaactggtttggatcctgagaaaccccatcagtcactcgacacaatacagaagacaatcaacgagtacaaatctgagatacggcagacccgtaagttcagagacgccgagcaagagaaggaccgaaccctcctcaagaccattatcaaggtgtggaaggagatgaaatccttaagggaatttcaacggtttactaatactccacttaaattagtgcttcgcaaggagaaggccgaccaaaaagctgacgaggaggcctatgaagctgagattcaagcggaaatttctgagctgcttgaggaacatacagaggagtatgcgcagaaaatggaggagtaccgcacaagtttacagcagtggaaggcttggaggaaggtgcagtag

SEQ ID NO: 36830 - DNA, 4539 bp, Artificial Sequence
  derived and/or modified sequence
atggtttccgaaaaatcccaccttggcaacccccaggaacccgtccaggaggaacccaaaactagactgctttctatgacagttagacgagggcctagatcactccctccaatacccagcacgtctcggactggctttgcagaatttagcatgcgtggcagaatgagggaaaagttgcaggccgcacgaagtaaggctgagtccgcactcctgcaggaaatccctaccccgagaccacggcgattacgatctccaagcaaaaaggaactggagactgagtttggtacagagcccggaaaagaggtggagagaactcagcaagaggtggactcccaatcgtatagccgggtcaagtttcacgactccgctaggaaaattaaacccaagccccaggttcccccagggtttccatccgccgaggaggcatacaacttctttacttttaacttcgaccctgaaccagagggcagcgaggaaaagcctaaagcaagacacagggccggaaccaatcaggaggaggaggagggggaggaagaggagccaccggcacagggtggtggtaaggagatggacgaggaagaacttttgaatggcgatgatgctgaagactttttgctgggcctggatcacgtggccgacgacttcgtcgccgtaagaccagccgattacgagtccatccacgacagattgcaaatggagcgagagatgttatttataccaagcaggcaaaccgtgccgacctataagaagcttcctgaaaatgtgcagccaagattcttagaagatgaagggctgtataccggcgtgagaccggaggtggccaggaccaatcaaaatattatggaaaatcggttgttgatgcaagatcctgagcggagatggttcggggatgacggccgtatcctggccctcccaaaccccatcaaacctttcccatcccgccctccagttcttacacaggaacagagcatcaaagccgagctcgagacactctataaaaaagccgtcaagtacgtgcatagctcccagcacgtgataagatcaggagatccccctggcaacttccagcttgacatagatatatctgggttaatattcacccatcacccgtgcttctcacgggagcatgtgctggccgcaaagctggcccagctgtatgatcagtacctggcgcgtcatcagcgtaacaaagccaagtttctgacggataagctacaggcattgcgtaacgccgttcagacagggctggaccctgagaagccacaccaatctttggatactatacagaaaaccatcaacgagtataagtcggagatccgccaaacccgtaagttccgtgatgcagagcaggagaaggatagaaccttgttgaagactataattaaagtgtggaaggaaatgaaaagcctacgggagttccagcgatttacaaatacccctttgaaactggtgctccgtaaggagaaagctgaccagaaggccgacgaagaagcatacgaggcagagattcaggcagagatctccgaactccttgaagaacacactgaagagtatgcgcagaagatggaagagtacagaaccagtttacagcagtggaaggcgtggcggaaagtgcaaagagcaaagaagaaaaagagaaagcaggcagccgaggagcatccaggcgacgaaattgctgagccatatcctgaagaggacctagtgaaaccctcgccccctgagccaaccgacagggcagtgatagagcaggaagtcagggagcgcgcagcacagtcacggcgaaggccctgggagccaacacttgttccagagcttagcttggcagggtcagttacaccaaatgatcagtgcccacgggcagaagtcagtagacgggaagatgtcaaaaagcgctccgtgtatttgaaggttctcttcaataataaagaggttagcagaaccgtgtccaggcccctcggcgctgactttcgcgtacactttgggcaaattttcaacttgcagattgtgaactggccggagagtctgactttacaggtctatgagacagtgggacattccagccctacactgctggccgaggtctttctgccaattccagagaccacggtggtgacgggaagggctcctacagaggaggtagagttcagctccaaccagcatgtgactctggaccacgaaggcgtgggttcgggcgtgccattttcgttcgaggctgatggttctaatcagctcacactgatgacatctggcaaggtatctcactctgtcgcgtgggccatcggggagaatggaatcccccttattccccctctgagtcagcagaacatcggtttcagatccgctctgaaaaaagcagacgccatttcctcaataggtacaagcggcctgaccgacatgaagaagttagcaaaatgggccgcagagagtaaacttgatcccaacgatccgaataatgctccgctcatgcaattaattagtgtggccacttcaggcgagagctatgtacccgattttttccgccttgaacaactacagcaagaattcaatttcgtcagtgaccaggagttaaatcgtagcaaacgctttcggttattgcacctgagatctcaggaagtgcccgaattccgtaattacaaacaggtgccagtctacgatagagaaatcatggaaaaggtgttccaggactacgaaaaacgtctacgggacagaaatgtgattgaaactaaggagcatatcgatacccaccgcgcaattgtcgccaagtatttgcaacaagtgagggaatcggtgataaacagatttctcatcgcaaaacagtactttcttttggctgatatgatcgtggaggaagaggtacctaacattagcattctgggactgtctcttttcaaactcgctgaacagaagaggcctctgcgccctcggaggaaggggcgaaaaaaagtgacagcacagaacctgagcgatggagatattaaattactggtgaacatcgttcgggcatacgacatccctgttagaaagcccgctgtgagcaagttccagcagccctccaggagcagccgaatgttttccgaaaagcacgccgctagtcccagcacatatagtcctactcataatgcagactaccctctgggtcaggtcctcgtgaggccttttgtggaggtgagttttcagcgcacagtgtgccacacaaccaccgctgaaggccctaaccccagttggaacgaagagctggaactgccgtttagagctcccaacggggattactccactgccagcctgcagagtgtgaaagatgttgtgttcatcaatatctttgacgaagtgctgcacgacgtgctcgaagacgaccgagagagggggtcaggaattcacacgcggatcgagaggcattggttagggtgcgtcaaaatgcccttttccacaatctatttccaggcgaggttcgagagtcaggaagatgagaagcttctgcaggctacagaaaagttccaggcagagtgcgctctgaaattccctaacaggcagtgcctgactaccgtcattgacattagtggcaagacagtctttatcactagatatctaaagccccttaacccccctcaggaactgctcaacgtctaccctaacaatctgcaggcgaccgcggaactggtcgccaggtacgtctccctgatcccctttctgccagatacagtgtcatttggcggtatctgcgacctgtggtcaactagtgaccagttccttgacttgctggccggagacgaagaggagcacgccgtcctgctctgtaactattttctgagtctcggcaagaaagcctggctcctcatggggaatgcaatacccgaagggcctacagcctatgtgctgacgtgggaacaggggcgatatttaatttggaacccctgcagcggacatttctacggtcaattcgataccttctgtcctctgaaaaatgtaggctgtctcatcggcccagacaacatctggttcaacatacagcggtacgaatcccctctcagaattaacttcgatgtcacccgtcccaagctttggaagagctttttctcacgttcgctgccataccctggcctgtcaagtgtgcaaccggaggagctgatttatcagcgctccgataaggctgctgctgctgagctgcaggaccgcatagagaaaatccttaaagaaaaaattatggactggagaccacgccaccttactcgctggaatagatattgtacctccacgctgcgtcacttcttaccactcctggaaaagtcccagggtgaggacgtggaagacgaccacagggccgagctcctgaagcagctgggggactatagattctctgggttccctttgcacatgccttattctgaggtaaaaccacttattgacgcagtatacagtaccggagtgcataacatcgacgttccaaatgtcgagtttgctctagccgtctacattcacccctaccctaaaaacgttctgagcgtatggatctacgtagcctcgctgattagaaataggtag

SEQ ID NO: 36831 - DNA, 4863 bp, Artificial Sequence
  derived and/or modified sequence
atgaatccacgagaagagaaagtgaaaatcatcaccgaagagtttattgagaacgatgaggatgctgatatgggccgtcaaaacaagaactctaaagtccgccgtcaaccaaggaagaagcagcccccaaccgcggtgcccaaagagatggttagcgagaagagtcatttgggcaatccccaggagcccgtgcaggaagaacccaaaactaggttgcttagtatgactgtccggaggggaccccgaagccttccgcctatcccctctacatcacggaccgggtttgcggagtttagtatgcgcggacgaatgagagagaagctgcaggcagccaggagcaaggctgaatccgcgttacttcaggaaattccaacacccaggccaagaaggctgcgctccccgagcaaaaaggagctggaaacagagttcgggactgagcccggtaaggaggtggaaaggactcaacaggaggtggacagccagtcatacagtcgggttaaatttcacgattcagcaagaaagattaagcctaagccgcaagttccccctggtttcccctcagccgaggaggcctataatttttttacatttaactttgatcccgaacctgagggctctgaggagaagcccaaagccaggcatagggccggaactaatcaggaagaagaggagggggaggaggaggagccccctgcccagggaggcggaaaagagatggatgaggaggagctcctgaatggagacgacgctgaggactttctacttggtttagatcatgtcgccgacgacttcgtggcggtgaggcccgctgattacgagagtatccacgaccgactgcagatggaaagagaaatgctgttcatcccctcccggcaaactgttccgacgtacaagaaactgccagaaaatgtccagcctaggttcttggaggatgagggcctttacactggtgtcagacccgaggtcgcccgtactaaccagaacatcatggagaatcgactcctcatgcaggaccctgagcgcagatggttcggcgatgatggacggatcttggctctccccaatcctattaagcccttcccgagtaggccgccagttctaactcaggagcagtccatcaaagcagaacttgaaaccctctacaagaaagcggtgaaatacgtccactcaagtcagcatgtgattcgatccggagacccaccagggaacttccagctggacattgacatatcaggactcatattcacccaccatccctgctttagccgagagcacgtgctcgcagcaaaattggcgcagctgtacgatcagtatctggctcggcaccagcgaaacaaggcaaaatttctcacagataaactccaggccctgagaaatgctgtccagaccggcctcgaccctgaaaaaccccatcagtcacttgacaccattcagaaaacaatcaacgaatataaatccgagattagacagacacggaagttcagggacgctgagcaggaaaaggaccggacgttgctgaagaccattatcaaggtgtggaaggagatgaaatccctgagggagtttcaacgattcacaaacaccccgctgaaactggtcttgagaaaggagaaagcggatcaaaaagctgacgaagaagcgtatgaagctgagattcaagctgaaatctccgagctcctcgaagaacatactgaagagtacgcgcagaaaatggaagaatatcgaacaagtcttcaacagtggaaagcgtggcgtaaggtgcagagagccaaaaaaaaaaaaaggaaacaggccgcagaagaacaccccggagacgaaatcgccgagccctaccctgaggaggacctcgttaagccttcaccgccagaacccaccgatagggccgtgatcgagcaggaggtgcgggaaagggccgcacagtctagacgcaggccctgggagcctactctggttccagagctgtcattggcgggatctgtcactcccaacgaccagtgcccccgagcagaggtcagtcggcgagaagatgtcaagaagcggagcgtgtatctcaaggtcctattcaacaataaggaggttagtcggaccgtttcccgaccgctgggagcagatttccgagttcatttcggccaaattttcaacctgcagatagtcaattggccagagtccctcactctgcaagtgtatgagaccgttgggcactcatccccaacgctgctggccgaggtcttcctgccaatccccgaaactacagttgtaactgggagggctcctaccgaggaggtggagttttctagcaatcagcatgttacactcgaccatgagggtgtggggagcggggtccccttcagttttgaagccgatggctcaaaccagctcaccctgatgacctctgggaaggtttcccattccgttgcatgggccattggggaaaacgggatccctttaattccaccattgtcacagcagaatattgggttccgatccgccctcaagaaggctgatgcaatttccagcattggcacaagcggcctaacggacatgaaaaagcttgccaaatgggctgctgagagtaaactagaccccaacgacccaaataatgctccattgatgcagttgatctctgtggccacatcgggcgagagctatgttcccgacttttttcggctggagcaattgcaacaggagtttaattttgtctcagaccaggaactgaataggagcaagagatttagattgctccacctgagaagtcaggaggtgcccgaattccgaaactataagcaggtgccggtgtatgatcgcgagattatggagaaagtgtttcaggattacgaaaagcggttacgagaccgcaacgtcatcgagaccaaagagcacatcgatactcatcgagctatagtggcgaaatatctgcagcaggtccgcgagtccgtgatcaatcgatttctgatcgccaagcagtattttctgctcgctgacatgattgtggaggaggaagtgcccaatatatccattctgggtttgtccctatttaagctggctgaacagaaacgaccgcttcggcctcgcagaaaaggcagaaaaaaagtcaccgcacaaaacctgtccgatggagacattaaacttcttgtgaacattgtgcgcgcatatgacataccagtgcggaagccagctgtgagcaaattccagcagccgtcccgctcttcacgtatgttttccgaaaagcatgctgctagccccagtacatactcaccaacgcacaacgcagactatcctctgggccaggtcttagtgaggccattcgtggaggtctccttccagaggaccgtatgtcataccacaactgcagaaggccctaatccctcatggaacgaagagttggaactacctttcagagctccgaatggcgactatagcactgcgagcctgcaaagcgttaaggacgtggtgtttattaacattttcgacgaggtcctacacgacgtcctagaagacgatcgagagagaggctcgggcattcacactagaattgaaagacactggctgggctgcgtgaagatgccttttagcaccatctattttcaggcacgaatagacggcaccttcaagattgacatccctcccgtcctgttgggctatagtaaggagaggaatatgatcctggagagaggttttgactctgtgaggagcctgtcagaaggctcttatattaccctgtttataacaatcgagccgcagcttgtgcctggggagtcaattcgggagaagtttgaatcacaggaggacgagaaactgctgcaggctactgagaagttccaggctgagtgtgcactgaaatttcctaacaggcagtgcctgaccacagtaattgatatctctggaaaaacagtgtttattaccagatatctgaaacccctcaatccacctcaggagttgctgaatgtataccccaataatctgcaggctacagcagagctagtcgcacgatacgtctcactgatccccttcttaccggacaccgtcagcttcggaggcatctgtgacctgtggagtacaagcgaccagttcctcgatctactcgctggtgatgaagaggagcacgccgtcctattgtgcaattacttcctgagcctcggaaaaaaggcatggctgctgatgggcaacgctattcccgagggccctaccgcatacgtgctcacgtgggagcaggggaggtacctcatctggaacccctgctcgggccacttctatgggcaattcgatactttctgtcccctcaaaaacgtcggttgtttaattgggccagacaacatatggtttaacatacaacgatatgagagcccccttcggataaacttcgatgttacacggccaaagttgtggaaaagttttttttcacgctcgctcccctatcccggtctgagctcggtgcaacccgaggagctcatttaccagaggtctgacaaagcggctgctgccgagcttcaagacagaatcgagaaaatcttaaaagagaaaatcatggattggaggcccagacacctgacccggtggaatcgatactgcaccagcaccttaagacatttcctccctctcctggaaaaatcacaaggagaggacgtggaagatgaccacagagccgaattgcttaagcagttaggggactaccgctttagcggcttcccactgcacatgccctattccgaagtcaagccgttaatcgatgccgtatatagcaccggggtgcataatatagacgtacccaatgtggagtttgcattggctgtgtacatccacccctacccaaagaatgtgctcagcgtgtggatctacgtggccagcctgattcgcaataggtag

SEQ ID NO: 36832 - DNA, 4863 bp, Artificial Sequence
  derived and/or modified sequence
atgaatccacgagaggagaaggtcaagattattaccgaggaattcatagagaatgacgaggatgccgacatggggcgtcagaataaaaatagcaaggtgcgtaggcagccacgcaaaaagcagcctcctacggctgtacccaaagagatggtttctgagaaaagtcacctgggcaacccccaggaacccgtccaggaagagccgaagacccggttactcagcatgactgtccggagaggcccaaggagcctacctcctatcccatctacaagtagaacgggtttcgcggaattctctatgagaggacgcatgcgcgaaaagctacaggcagcaaggtcaaaggccgaatcagctctcctgcaagagatccctactcctcggcctaggcggctgagatccccatctaaaaaagagctcgagacggagttcggaacagaacccggaaaggaagtggaacggacccagcaagaggtggactctcagagctatagtcgcgtaaaattccacgacagtgctcgcaagataaagcccaaacctcaggtccccccagggttcccttctgctgaggaagcttataatttcttcacctttaactttgatccggaaccagagggctcagaggagaagccgaaggctagacaccgcgcaggaaccaatcaggaggaggaggaaggcgaggaggaggagcccccagcccaaggcggaggaaaagaaatggacgaggaggaactgctgaacggagatgacgcagaggactttctgctgggactggaccacgtggcagacgacttcgtggcggtgaggcccgcagattatgaaagtatccatgatcgtcttcaaatggagagggaaatgctgtttatcccgtctagacagacagtgccaacctacaagaagttacctgaaaatgtgcagccacgatttctagaggacgagggcctgtacaccggagtccggccagaggtggcacgtaccaaccagaacatcatggagaaccggctgcttatgcaggatcctgagaggcgatggttcggggacgatgggaggatcttagccctgccaaatccgataaagcctttcccctcccggccacccgtgttaacacaggagcagtcaataaaagcggaactggagaccttatacaaaaaggcagtgaaatatgtgcacagttcacagcatgtaattcggtcaggggatcccccagggaactttcagctcgacatcgatatctctggattgatctttacccaccacccttgtttcagtagagagcatgttctggcagccaagttggcgcagttgtatgaccagtaccttgcacggcatcagcgtaacaaggcgaagttccttacagataaactacaggctctccgcaatgcagtgcagacagggctcgatcctgaaaaaccacaccaaagtctggacaccatccagaagacgatcaacgagtataagtccgaaattcgacagactcggaagtttcgcgatgctgaacaagagaaagaccggactctcttaaaaaccattataaaggtgtggaaagaaatgaagtctcttagggagtttcagaggtttaccaatactcctctcaagctagtactgaggaaagagaaagccgatcaaaaggcggatgaggaggcatacgaggccgagatacaagcagaaattagtgagcttctcgaagagcacacagaggaatacgcccaaaagatggaggagtatcgcacaagtctccagcaatggaaagcatggcgcaaagttcagcgcgctaagaagaaaaaaaggaagcaagccgctgaagagcacccaggcgacgaaatagctgagccttaccccgaagaggatctggttaaaccatcccccccagagcctacagatcgcgctgtgattgaacaggaagttagggaacgggcagcacagtctaggaggcgaccctgggagcccaccctggttcccgagctcagtctcgctggctccgtcacccctaatgaccagtgtccgagagccgaagtgtctaggcgcgaggatgttaagaagaggagtgtctacctgaaagtgctcttcaacaataaagaggtgagcaggacagttagccgaccactaggagctgactttcgtgtacacttcggacagattttcaacttacagatagtcaactggccggaatcactgacccttcaggtgtatgaaacagtaggacactcgtctcctaccttactcgcagaagtgttcctccctattccagaaacaaccgtggtgacaggccgtgcaccaacagaagaagtcgagtttagttcaaatcaacatgtgacactggaccacgaaggtgttgggtcgggagtgcctttctccttcgaggccgacgggtctaaccaactgactttaatgacttccgggaaggtgtcccactctgtggcttgggctatcggagagaacggcatccccctcataccgcctctgagccagcagaatatagggttcaggagtgccctgaagaaggcggatgctataagctcgattggcactagcggcttgacagacatgaagaagttggccaagtgggctgccgagagcaagttggacccaaacgaccctaacaacgccccactgatgcagctgattagcgtcgctacttccggcgagtcttatgtgcccgattttttcagactagagcagctccaacaggaatttaattttgtgtcagaccaggaacttaataggagtaagaggtttagacttttacacttaaggagccaggaggttcctgaatttcggaattacaagcaggtgcctgtgtatgatcgtgagatcatggagaaggtgttccaggactacgaaaagcgcctgcgcgaccgcaacgtgatcgagaccaaagagcacattgacacccatagagccatcgtcgctaaatacctacagcaggttagagagtctgtcataaatagatttctgattgctaaacagtatttcctcctggcagatatgatcgtggaggaagaggtccctaacatctcgattttggggctaagcctgtttaagctcgccgagcagaagcggccacttcggcctagacggaagggcagaaagaaagtgacagcacagaatttgtctgacggagacatcaagctgctggtgaatatagtcagggcgtacgatattcccgtccgtaaaccagcagtgtctaaattccagcaacctagtagatcatcacggatgttctctgagaaacatgcagccagtcccagcacctacagcccaacccacaatgctgattatcctctaggtcaggtgctggtgcgcccatttgtcgaggtgtcatttcaaaggacagtgtgccacaccacgactgcagaaggccctaatccatcttggaatgaagaactggagctgccctttcgtgcaccaaacggcgattactccaccgcgtcacttcagtccgtgaaagacgtggtctttatcaatattttcgacgaggtcctccacgacgtgctggaggacgatcgtgagagaggatctgggattcatactaggattgagaggcactggttaggctgcgttaaaatgccgtttagcacgatttacttccaggctagaattgatggcacatttaaaattgatatcccgcctgttctcctgggctactcaaaggagcggaatatgatcctggagaggggtttcgattccgttaggtccttgtctgagggaagctacattaccctattcataaccatcgaacctcagttggtgcctggtgagtcgattagagagaagttcgagtcgcaggaggatgaaaaacttctgcaggcaacagagaagttccaggctgagtgcgccctcaagtttcccaatcgacagtgcttgaccactgtgatcgacatttccggcaagaccgtattcatcactcggtacctgaagcctctcaaccctccacaagaattgctgaacgtgtacccgaacaatctacaagccacagctgaactggtggcacggtacgtgagcctgataccattcctgccagacaccgtgtcttttggcggaatttgtgacttatggtcaacatcagaccaatttttggaccttctggccggtgacgaggaagagcacgccgtgctgctctgcaactacttcctgagtctcggcaagaaagcttggctcttgatgggaaatgctatccctgagggtcctactgcctacgtgttaacttgggagcaggggagatacttgatctggaatccttgttccggacacttttacgggcagtttgataccttttgtccgctgaaaaacgttgggtgtctcatcggtccagataacatctggtttaatattcaacgttatgagagccctttacgaatcaacttcgacgtgacccgaccaaaactatggaaaagcttttttagtcgatcactgccataccctggcctctctagcgtccagccagaggagctgatttaccaacgcagtgacaaggcggctgctgctgagttgcaggaccggatagagaaaatactgaaagaaaagataatggattggcgccctcgtcatttaactcggtggaatcggtattgtacttctacactgagacactttctgcccctccttgaaaagtcacagggagaggatgtagaggacgatcatcgagcggaactgctgaagcagctcggggactaccgtttttcagggtttcccctacacatgccctactccgaggttaaacctctgatagacgcagtgtatagtactggtgtccacaacatcgacgtcccaaacgtggagtttgcactggcagtgtacattcatccttacccaaaaaacgtgctgtccgtttggatatacgtggcctcactgattagaaatcgatag

SEQ ID NO: 36833 - DNA, 4539 bp, Artificial Sequence
  derived and/or modified sequence
atggtttccgagaagtcgcatttggggaatccccaggagcccgtgcaggaagaacctaagaccaggctattaagtatgacagttagacgcggaccacggagcctgcctcccattccttcaacatcccgaacaggctttgccgagttcagtatgaggggccgaatgagggaaaaactgcaggctgcgagatccaaagccgagtcagctttgctacaggagattcccaccccccgacctaggcggttgaggtctccatccaagaaggagttggagacagagttcggtactgagcccggaaaggaggtggaaaggactcagcaggaggtggactctcagtcgtattccagagtgaagtttcacgacagcgcaagaaaaatcaaaccaaaacctcaggtaccgcctggcttcccttccgcagaggaggcgtacaacttctttacatttaattttgatcccgagcccgaaggatcggaggaaaaacctaaggcaagacaccgtgcaggcaccaaccaggaagaagaggaaggtgaggaggaggagccacctgcccagggcggtggaaaggaaatggatgaggaagaacttttgaacggggatgacgccgaagacttcttgctggggctggaccacgtggccgatgacttcgtcgcagtcagaccggctgattatgagtcgattcatgatcggttgcagatggagagagaaatgctgttcatcccatcccgccaaacggtacccacctataagaaactgccagagaatgtgcaaccccgttttttggaggacgagggactctacacaggtgttcgccctgaagttgctaggacaaaccaaaacatcatggaaaatcggctgctgatgcaggacccggagcgccgttggtttggcgatgacggacgtattctcgcccttcccaatcctattaagccctttcctagcagacctccagtcctgacccaagagcagagcatcaaggcagagctcgagaccctgtataaaaaggcggtgaaatacgtgcattcgtctcaacatgtaatccggagcggtgatcccccagggaatttccaattagatatcgacatcagtggcctgatcttcacccatcatccttgtttctcaagggagcatgtgctagccgctaaactggcccagctgtatgatcagtacttggcccgacaccaaaggaacaaggcgaagttcctcaccgacaagctgcaggcgctgcgaaacgctgtgcagactgggctagaccccgaaaaacctcatcagtcccttgatacgatccagaaaaccataaatgagtacaagagcgagatccgccagactagaaaattccgagatgctgagcaggagaaagatagaacactgttgaaaacaattatcaaggtgtggaaagagatgaaaagtctgagagaattccagcgatttactaatacaccactgaaactcgttctccggaaagaaaaggccgaccagaaagcggacgaggaggcttacgaagctgaaatccaggctgagattagcgaactgctggaggagcacactgaggagtacgcacaaaagatggaggaatataggacctccctccagcagtggaaagcatggcggaaggttcaacgcgctaagaaaaaaaagcgaaaacaggccgctgaggagcaccctggcgacgaaatcgctgaaccctatccggaggaggacctggtaaagccttcacctccagagcccactgaccgggctgtgatcgaacaggaggtacgggaacgcgctgcgcagtctaggagacgtccttgggagccaactctcgtgccggaactttctctggcgggaagcgtgacgcctaacgatcagtgtccgagagcagaagtgtcccgcagggaggacgtgaagaaacgcagtgtctacctaaaagtccttttcaataacaaggaagtgtctcgcaccgtcagccggccattaggcgcagattttcgcgttcacttcggacagatctttaacctgcagatcgtgaattggcctgaaagtttgactttacaggtctatgaaacagtcggccactccagcccaaccttgctcgccgaggtctttttgccaatacctgagacgacagtggtgactggtcgggctccaaccgaagaagtcgagttctctagtaaccagcacgtgactctggaccatgagggtgtgggaagtggcgtaccctttagctttgaggccgatggatcgaaccagctcaccctaatgacttccgggaaggtgagccactcagttgcctgggctattggtgagaacggtatccccctgattcctcctttgtctcagcagaatattggcttcaggtctgccctgaagaaggctgatgcgatatcgtcaatcggtactagtggccttacagatatgaagaagctggccaagtgggcagctgagtcaaaacttgatccaaacgatccaaataatgccccactgatgcaacttatctcagtggccactagtggagaatcatacgtgccagatttctttcggttggagcagctgcaacaagaattcaattttgttagcgatcaggagctgaatcgtagtaagcgatttcgattgctgcacctgcgttcccaggaggttcctgagttccggaattacaagcaagtccccgtttacgacagggagattatggagaaagtatttcaggactatgagaaaaggctgcgtgataggaacgttatcgaaacaaaagagcacatcgacacccatagagctatcgtggctaaatacctgcaacaggtgcgggagagcgtgataaacagatttcttattgctaagcaatacttcctgctggcggatatgatcgtagaggaggaggtgccaaacatttccatcctggggctgtcactattcaagttagctgagcagaaaagaccattgcgccctagacggaaggggcgaaagaaggttacggcacagaatcttagtgatggtgatattaagctgctagttaatatcgtgcgggcttatgacatcccggtgagaaagccagccgtgagcaagttccagcagccctcccgatcttctcggatgttctccgagaaacacgccgcatcaccaagtacatacagtcccacccacaacgccgactatcctcttgggcaggtccttgttcggcctttcgtcgaagtgagcttccagcggaccgtatgtcatacaacaacagccgaagggccaaatccaagttggaacgaggagttggaactgccatttcgagcccctaacggggactactcaacagcatcccttcagagcgtgaaagatgtcgtgtttataaatatttttgacgaagtcctgcacgacgtactggaagacgatagagagcgtggatcaggcatccatacaagaattgagcgccactggttaggttgcgtaaaaatgccattctccaccatttactttcaagctcgattcgaaagccaagaagatgagaagcttcttcaagcaacggaaaaatttcaggctgagtgtgctctgaaatttccaaaccggcagtgccttactacagtaattgatatctccggaaagacggtgttcatcactcgatacctcaaaccgctgaaccctccacaggagctgctaaacgtctaccctaataacctacaagcgacagccgaactcgttgcaagatacgttagtctgatcccgtttctgccagatacagtgtcttttggaggtatctgcgacctatggtccacgtctgaccagtttctagacttactggccggtgacgaagaagagcacgccgttctcctgtgtaactacttcctatcgttgggcaagaaggcttggctcctgatggggaacgcgatacccgagggaccaactgcctatgtcctaacatgggagcaggggagatatttaatctggaacccatgttccggacacttctacggccagttcgacacgttctgtccgctcaagaacgtgggatgtctgatcgggcctgataacatatggtttaatattcagaggtacgaaagccctttgcgcatcaacttcgatgttacacggcctaagctctggaagagttttttttctaggtctctcccctaccctggcttgagctcagttcagcctgaagaactgatttatcaaaggagcgacaaagctgccgcagctgagctgcaggaccgcatcgagaagatactcaaggaaaaaattatggattggcggccacggcatctgaccaggtggaatagatactgtactagcactctcaggcacttcctgccactcctggagaagagccagggagaggacgtggaagacgaccacagggcagagctgctgaagcagctcggggactacaggtttagtggcttccctctgcatatgccctactccgaggtgaagcctttaatagatgcagtgtatagcactggtgtgcacaacatcgatgttcccaatgtggagttcgcattagccgtgtacattcacccatatcctaaaaacgtccttagtgtgtggatctacgtggcctcactgatcaggaataggtag

SEQ ID NO: 36834 - DNA, 4863 bp, Artificial Sequence
  derived and/or modified sequence
atgaacccaagggaggaaaaagtgaagatcataaccgaggagtttattgaaaatgacgaggacgccgacatgggtagacagaataaaaatagcaaagttcggagacagccaaggaagaaacagcctcctactgctgttcctaaggagatggtgtccgagaagtctcatctaggcaatcctcaggaacctgtccaggaggaacccaagactcgccttctctcaatgaccgtgaggagaggccctcgtagcctgcctcctataccgagtaccagtcgcacaggctttgctgagtttagcatgaggggacgaatgcgagaaaaacttcaagccgcacggtccaaggctgaaagtgcgctgttgcaggaaatacccaccccaagaccacgtaggttgagaagcccctcgaagaaagagctggaaacagaatttggcactgaacccggaaaagaggtggagcgcacccagcaggaggtggattcccagagctacagtagggttaaatttcacgactctgcccgaaaaatcaaacctaagccacaagtgccaccgggatttcctagtgctgaagaggcctataattttttcactttcaactttgacccggagcctgaagggtctgaggagaaacccaaggcgaggcaccgggcagggacgaaccaagaggaggaagagggtgaggaggaagaacctcctgctcaaggcggagggaaggaaatggatgaagaggagctgctcaatggggatgacgcagaagactttcttctgggtctggatcacgtggcggacgattttgtggccgtacgtccagctgactacgagtcaatccacgatcgcctgcaaatggaacgcgaaatgctttttattcctagccggcagaccgtccctacttacaaaaagcttccggaaaacgtgcaacccagatttctcgaagatgaggggctgtacaccggcgtgaggcccgaggtagcccgaaccaatcagaacattatggagaacaggctgctgatgcaggaccccgaaagacgttggttcggtgacgacggccgtattctggctttaccgaatcccatcaaaccattcccctccagacccccagtcctgacccaggagcagtctataaaagcagaactcgagactctatacaaaaaggcagttaaatatgtgcattcatctcagcatgttattagatcaggggacccccctggaaactttcagttagatatagatattagtggtctgatcttcactcatcatccatgtttctctagagaacatgtgttggctgctaagctagctcaactttatgaccaatacttggccagacaccagcgcaacaaggcgaaatttctcactgataagctgcaggcactaagaaacgccgtccagacaggtctagatccagagaagccccatcagtccctagacactatccagaaaaccataaatgagtataagagcgagattcgacagacacgcaaattccgtgatgcagagcaggagaaagataggacactgctgaaaaccattatcaaggtttggaaagaaatgaagagtcttcgcgagttccagaggttcacaaatacccccctgaagctggttctcaggaaggaaaaggccgaccagaaagccgacgaagaggcttacgaagccgagattcaagccgagatcagcgagttgctggaagaacacactgaagagtacgcacaaaaaatggaggaatataggacaagcctccagcagtggaaggcttggcggaaagtgcagagggctaagaaaaaaaaacgcaaacaggccgcagaagagcacccaggagatgagatcgccgaaccatacccagaagaagatctggttaaacccagccccccagaaccaactgatagggctgtgatcgagcaggaggtgcgggaaagggctgcccagtctcgacgccgaccctgggaacccacacttgtcccagagttatcattggctggtagcgtgaccccaaacgatcagtgcccgagggccgaggtgagccgcagggaagacgtgaaaaagagaagcgtctatttaaaagtcctgttcaataacaaagaggtttctaggaccgtgtcacgacctttaggggctgattttagggttcattttgggcaaatttttaacctgcagatcgtgaactggcctgaatccttgaccttacaggtttatgaaacggtcggccacagctcacccacactcctggcagaggtctttttgccaatacccgaaaccaccgttgtgaccgggagggctccaaccgaggaggttgagttctcctccaaccaacatgtgacgctggatcatgagggagtcgggagtggcgttccattttcttttgaggcggacggatctaaccaactgaccctgatgacatctggcaaggtgagccatagcgtcgcctgggcgatcggcgaaaacggcatccccctgatccctcccttgagccaacagaatattggattccggagcgcactcaaaaaggccgacgccatctctagtatcggcacatcagggttgacggacatgaagaagcttgccaaatgggccgctgagtcgaagttagatcctaatgaccccaataacgctccactcatgcaactcatctccgtcgccacttctggcgagtcatacgtgccagatttctttcggttagagcagctgcagcaggagtttaactttgtctcagatcaggagctgaaccgctctaagcgattcaggctccttcaccttaggtcccaggaagtgccggagttcagaaattacaagcaggtgcctgtatatgaccgagaaattatggagaaagtgttccaggactacgaaaagcgccttagagataggaacgtgatcgagacaaaggaacacatagacacacatcgggctatcgttgctaaatacctacagcaggtgcgggagagtgtgatcaatcggtttctgatcgccaaacagtactttctcctcgcggatatgatcgtggaggaggaagtgcctaacatctccatcctgggcttgtcactcttcaagttagctgagcagaagaggccattgagacccaggcggaagggccgtaagaaagtaaccgcacaaaatctgagcgacggggacatcaagcttctcgtgaatatcgtcagagcatatgatataccagtcaggaaacccgctgtttccaagtttcagcagccgtccagaagctcacgtatgtttagtgaaaagcatgccgcttctccttccacttatagtccaacccacaatgcggactaccccctcgggcaggtgctcgtgcgcccttttgtcgaggtgagcttccaacggaccgtctgtcatacaaccaccgcggaaggcccaaatccttcctggaacgaggagctcgaactgcccttccgggctcctaatggtgactatagcactgcctcactgcagtctgtgaaagatgtcgtgttcatcaatatcttcgatgaggtgctgcacgatgtgctagaagacgacagggagagggggtcagggatccataccaggatcgaaagacactggctgggctgcgtgaagatgccattttctacgatctatttccaggccaggatagacggaaccttcaaaatcgacatcccccctgtcttgcttggttactcaaaagaaaggaacatgatccttgagcgaggctttgactcggtccgtagtctaagcgaaggaagttatatcaccctgttcataaccattgagccccaattagtacctggggagtccattcgggaaaagttcgaatctcaggaagatgaaaagctacttcaagccactgagaagtttcaagctgaatgtgctttaaaattccccaatcgtcaatgtctcactacagtgatcgatatctccggaaagactgttttcatcacacgctatcttaaaccactgaatccccctcaggagctgcttaacgtctaccccaataatcttcaagctacagcagagctagtggccaggtatgtttcactcattccgttcctgcctgacacagtgagctttggcggaatatgtgacctgtggagcacctctgatcaatttctggatctgctggccggtgacgaggaagaacacgccgtcttgctgtgtaattatttcctttccttgggcaagaaggcctggctgttaatgggtaatgcgattcctgagggacccaccgcctatgtactgacttgggaacagggaaggtatctaatctggaacccgtgtagtggccacttctatggccagttcgatactttctgcccactcaaaaacgttggatgtctgattggccctgacaacatttggttcaacattcagcgttacgagtcccctctgagaatcaactttgacgtaaccagacccaaactctggaagagctttttttccagaagcttgccatacccagggctaagttccgtccagcccgaggaacttatttatcaaaggtcggataaagctgccgcagcagaactgcaggacaggatcgagaaaattctcaaggaaaaaatcatggattggaggcccagacatctgactaggtggaatcgctactgtacaagcaccctgaggcatttccttcctcttctggagaagtcccagggggaagacgtggaggatgaccatcgcgctgagctgcttaagcagctgggcgactacaggttctctggcttcccgctccatatgccctattctgaagtcaaaccgctaattgacgcggtgtattctaccggagtccataacattgatgttccaaacgtggagtttgcgctggcagtgtatatccacccttaccctaagaacgtgttatccgtgtggatttacgtagcttccctgattcgaaaccggtag

SEQ ID NO: 36835 - DNA, 4539 bp, Artificial Sequence
  derived and/or modified sequence
atggtgtcagaaaagtcccatctcggcaacccacaggaacccgtacaagaagagcccaagaccaggctgctgagcatgacggtccggcgaggaccaagatccctacctcctataccttctaccagtcgcacagggttcgccgaattctcaatgcgtgggcgtatgagggaaaaactccaggcagcacggtcaaaggcagaaagcgcactcctgcaggagatccctacaccacgtcctcggaggttacgtagtccctccaaaaaagaactggagacagaattcggcacagaacctggtaaggaggtggagcggacacagcaggaggtggactctcaatcctactccagggtgaagttccacgatagcgccaggaagattaagccgaagcctcaggtgcctcccggatttccatctgccgaggaggcatacaactttttcacattcaacttcgatccggaaccagaaggtagcgaagagaaaccgaaagcgcgacacagagctgggacaaaccaagaggaagaggaaggcgaggaagaggagcccccagcccagggtggcggaaaggagatggacgaggaggagttgctgaacggtgatgatgctgaggatttcctgctcgggctcgatcacgtcgcagacgacttcgtggcggtcaggcccgcagactatgagagtatccacgatagattacagatggagcgcgaaatgctattcattccttccaggcagaccgtacctacatataagaagttacctgagaacgtgcagccccgtttcttggaggatgaggggctgtacaccggcgtacgacccgaggttgcacggacgaatcagaatatcatggagaataggttgctgatgcaggatccagaacggagatggttcggtgatgacgggaggatactcgccctgcccaatcctatcaaacctttccccagccggcctcccgttctgacccaggaacagagcatcaaggccgaacttgagacgctgtataagaaagccgttaagtacgtgcactcatcacagcacgtaattagatcaggagaccccccagggaatttccagctagatattgatatatccggcctcatatttacccatcatccctgcttcagtcgcgagcacgttctggccgctaaacttgcccagttatacgaccagtatctcgcccgtcaccaaagaaacaaggctaagttcctcaccgataaattacaagcattacgcaatgcagtccagactggactcgatcccgaaaagcctcaccaatctttagataccattcaaaaaaccattaatgagtacaaaagcgagatcagacaaaccagaaaatttcgtgatgcagagcaggaaaaagatcggacgctgctgaaaactatcattaaggtctggaaggaaatgaagagcctccgggagtttcaacgcttcaccaatactccgctgaagcttgtgctgcggaaagagaaagctgatcagaaggccgacgaggaggcttacgaagcagagatacaggctgaaatctccgaattgcttgaggagcacaccgaggagtacgcgcaaaagatggaagagtatcggacttcactacagcagtggaaagcctggagaaaggtgcaaagagccaagaagaaaaaacgcaagcaagccgcagaggagcaccctggcgacgagattgccgagccttatccagaggaggatttggtaaaaccgtccccccctgaacctacagatagagcagtgatcgagcaggaagtgcgagagcgtgccgcacagtcgcggagaagaccctgggaaccaacattagttccagaattgagcttggcaggcagcgttacacctaacgatcagtgccccagggccgaagtctcacgaagagaagatgtcaagaagcgttccgtgtatctgaaagtgctgtttaacaacaaggaagtgtctagaactgtaagcagaccactgggcgctgactttcgggtgcacttcggccagatcttcaacctccagatcgtaaactggccagaatcattgacattgcaggtgtatgaaaccgtggggcactcctcacctacgctcttggccgaggtctttctccccattcccgaaacaacagtcgtgacgggcagggcgcctaccgaagaggttgagtttagttctaaccagcatgtgacactggatcatgagggggttggaagcggcgtcccattctcgttcgaggccgatggttccaaccagctgacactgatgacatccggcaaggtcagccattccgttgcctgggccataggagagaatggtatccccctgattccaccacttagtcagcagaacatcggtttccggagcgctctgaagaaggccgatgccattagcagtatcgggacatctgggctgaccgatatgaagaagctggccaaatgggccgcagaaagcaaacttgacccgaatgaccctaacaatgcaccattaatgcagctgatttcagtcgccacctctggagagtcatatgtcccagacttctttcggctggaacagttgcagcaggagttcaactttgtgagcgaccaggagctcaatcgctccaagcgctttagattgttgcacctgcggtcccaggaagtgcctgagttcaggaactataaacaggttcctgtgtatgatcgtgagattatggagaaggtgttccaagactatgagaaaagactgcgtgatcgcaatgtcatcgaaacaaaagaacacatcgacacacatcgagctatcgtggctaagtacctccagcaagtgagagagtctgttatcaacaggtttctgatagcaaagcagtacttcctgctggccgacatgatagtggaagaggaggtgcctaatatctctatactgggcctgagtctgttcaagctggctgagcagaagaggccactacggcctaggcgaaaaggccgaaagaaggtgacggcccagaatctgagcgatggcgacatcaagcttcttgtcaatattgtcagggcatacgatattccagttaggaagccagcggtttctaagtttcagcagccatccagatcctcccgtatgttttcagagaaacacgctgcaagcccttcaacctattcacctacccacaacgctgattatcctctagggcaggtcctggtgaggcccttcgtggaggtgtcttttcaacggacagtatgccatacaactaccgcagaggggccaaatccgagttggaatgaggagttggagctaccctttcgggctcccaacggcgactattcaaccgccagtctacagtctgtcaaggatgttgtctttatcaacattttcgatgaagtgttgcacgatgtgctggaggatgatcgggagagaggtagtggcatacacaccaggattgagcgccactggttgggctgcgtcaagatgcctttctctactatttacttccaagccagatttgaatcccaagaagatgagaaactgctgcaggccactgaaaaatttcaggcggaatgcgcactgaagttccccaaccgccagtgccttaccactgttatcgatatctccggcaaaaccgtctttattacacgataccttaaacccttaaaccctccgcaggaactgcttaacgtgtaccccaacaacctccaggccacagctgagctggtagcccgatacgtaagtttaatcccctttctgcccgatacagtctcctttgggggtatctgtgatctttggtcgactagcgatcagttccttgaccttctggctggtgacgaggaggaacatgccgtactgctctgtaactacttcctgagtttaggcaagaaagcatggctcctgatggggaacgctatcccagagggccctacagcatacgttctaacctgggaacagggaagatatctcatctggaacccatgttctggtcacttctatgggcaatttgacaccttttgccctctgaagaacgtcggctgcctgataggacccgacaatatttggtttaatattcagagatatgagtccccattgcggattaatttcgatgtcacacggcctaaactgtggaaaagctttttttctcgcagtttgccctatcccggtttatcttccgtgcaacctgaggagctgatctaccagcggtctgacaaggccgcagctgctgaactgcaggataggatcgagaagattctgaaagagaagataatggattggcgccctaggcatttgacaaggtggaatcggtattgcacctcgactctgaggcatttcttgcccttgctggaaaagagccagggagaagatgtcgaggatgaccatcgggctgagctgctaaagcagctgggggactaccggttttccggattcccgttgcatatgccttacagcgaagtgaaacctctaattgatgccgtgtactccacgggtgtccacaatatagacgtgcccaacgtggagttcgctctggcggtgtacatacacccatatcccaagaacgtgctaagcgtctggatctacgtcgcctcactgatcagaaaccggtag

SEQ ID NO: 36836 - DNA, 1767 bp, Artificial Sequence
  derived and/or modified sequence
atgaatccacgagaggaaaaggtgaaaataatcactgaggaattcatcgaaaacgacgaggatgcggacatgggacgacagaataaaaactccaaggtcagacgtcagcccaggaagaagcaacccccaacagctgttcccaaagagatggtgtcagagaagagtcatctgggaaacccccaggaaccagtgcaggaagagcccaagacaaggctcctttcaatgacagtgcgccgtggaccaagatctctgcccccaattccttcaacctcccggacaggcttcgcagaattctccatgagggggcgaatgcgggagaagcttcaggcagcacgctcgaaagccgagagcgctctgctccaggagattcccacacccagacctagacgcctgcgctcccctagcaagaaggagcttgaaaccgagtttggaacggagcccggtaaagaagtggaacgtacccagcaggaagtcgactcgcagagctattccagagtgaagttccatgacagcgcaagaaagatcaagcctaaaccacaggtccccccaggttttccgtccgcagaggaagcatacaatttcttcacttttaatttcgatcccgaacctgagggcagcgaggagaaacccaaagcgcgacatcgtgcagggacaaaccaagaggaagaggagggcgaggaagaagaacctcccgcacagggtggtgggaaggagatggacgaagaagaacttcttaacggcgatgatgcggaagacttccttctgggcctggatcacgtggccgacgatttcgtagccgttagacccgctgattacgagagcatccatgaccggcttcagatggagagggagatgctgtttattccatctaggcagaccgtgccaacttataaaaagctgcccgaaaacgttcagccgcgattcctcgaggacgagggcctgtacaccggagtcagacccgaggtggctaggacaaatcagaacatcatggagaatcggctacttatgcaggacccagagaggcggtggttcggcgacgacgggaggattctggctctacctaatccaataaagccattcccgtcaagacccccagtgctgacccaggagcaatccatcaaggccgaactagagaccctttacaaaaaagcggtgaagtatgtgcattcgtctcagcacgtgatccggtccggagatccacccggaaacttccagttggatattgatatcagcgggctgatattcactcaccacccttgtttctcaagggaacatgtgcttgccgctaaacttgctcagttgtatgatcagtatctggcaagacatcagcggaataaagctaaatttctgacagacaagcttcaggcccttcggaacgccgtgcagacaggactggaccctgagaagccccatcaaagcctggatacaattcagaaaaccatcaatgaatacaagagcgagattaggcagactcgcaaattccgcgacgctgagcaagaaaaggacagaaccctcctcaagacgatcattaaggtatggaaggaaatgaaatctcttcgcgaattccagaggtttactaacacacctctgaaactcgtgctcaggaaggaaaaggccgatcagaaggccgatgaagaggcttatgaggccgagatacaggccgagatttccgaattactagaggagcacacggaagaatacgctcagaaaatggaggaatatcgcacttccttgcaacagtggaaggcttggagaaaggtgcaatag

SEQ ID NO: 36837 - DNA, 4790 bp, Artificial Sequence
  derived and/or modified sequence
aagccaactcctttctcccgagcctgctggcagatcctcccccacctctccgcaggagttcccctcctaggctgggagcatcccgtgcagggtaaatcttttcaagccaccaactgctgtccccaaggaaatggtgtccgaaaaatcccaccttggcaacccccaggagcctgtgcaggaggagcccaagacccgcctcctgagtatgacagtccggagaggcccacggagcttacctccaattccttcaacttccagaacaggctttgcagaattttccatgaggggacgcatgagggagaaattgcaagcagcgaggtccaaagcagaaagtgcattgctgcaggaaatccccactcctcggcccagacgcttacgaagtcccagtaagaaagaattggagactgaatttggcacagagccagggaaagaggtagaaaggactcaacaagaagttgactcccaaagttactcaagagtcaagttccatgattctgcacgaaaaatcaagcctaaaccccaggttccacctggcttcccttctgcagaagaggcctataacttctttactttcaactttgatcccgaaccagaaggatcagaggaaaaaccaaaagcaagacatagagcgggaactaatcaagaggaggaggaaggggaagaagaagaaccacctgcacaaggaggaggaaaggaaatggatgaggaagaactgcttaatggtgatgatgccgaggacttcctattgggcttagatcacgtggctgacgattttgtagcagtcagacctgcagattatgaaagcatccatgatcggctgcagatggaaagagaaatgctcttcatacccagtaggcagacagtccctacatataaaaagcttcctgagaatgtacagcccaggttcctggaagatgaaggcctttacaccggggtaagaccagaggtggcacgcaccaatcagaacatcatggagaacagattgctgatgcaggaccccgaaagaagatggtttggagatgacggcaggatcctagctctgccaaaccccatcaagccatttccttcaaggccgccagtactaacacaggagcagagcattaaggcagagcttgaaacactgtataaaaaggctgtaaaatacgttcacagtagtcagcatgtgatcagatctggagaccctcctggaaatttccaactggacattgatatttcagggttaatcttcactcatcatccctgttttagccgagagcatgttttggcagccaagctggcccagttatatgaccagtaccttgcaagacaccagagaaacaaggcgaaatttcttactgataagctccaagctttaagaaatgctgttcagactggccttgatccagaaaaacctcatcagtctctcgataccatccaaaaaaccatcaatgagtataaatctgaaattcgacaaacaagaaaattccgtgatgctgaacaagaaaaagatagaacattgcttaagactatcataaaagtttggaaagagatgaaatcccttcgagagttccagagatttacaaatactcccttgaaacttgttttgagaaaggaaaaagctgaccagaaagcagatgaagaagcatatgaagcagaaattcaagctgaaataagtgaactgttagaagagcacacggaggagtacgcacagaagatggaagaatacagaacgtcgttacaacagtggaaggcctggaggaaagtgcaaagggccaagaagaagaaaaggaaacaagcagcagaagaacatcccggtgatgagattgcagagccgtatcccgaggaggaccttgtgaagcccagccctccagagcccactgatcgggcagtgatagagcaggaggtgagggagagagcagcccagagcaggaggaggccttgggagcccacgctggtcccggagctaagcctggcaggaagcgtaacacccaatgaccagtgccccagagcggaggtctcgagaagggaggatgtaaagaagcgctcagtgtacttaaaagtgctgttcaacaacaaggaggtgtccaggacagtcagtcggccactaggagcagacttccgagttcactttgggcagattttcaatttgcaaatagtcaactggccggagagtttaacacttcaggtctatgaaactgtcggacacagtagtcccaccttgctagcagaagtgtttctgcctattcctgagactactgttgtcactggaagggctcctactgaagaagtggagtttagcagtaatcagcatgtgacactggaccacgagggagttggaagtggagtgcccttctcatttgaagctgatggcagtaaccagctgactctgatgacctcagggaaagtgtctcatagtgtggcatgggccattggagaaaacgggatacctttaattcctccattgtcacagcagaacatcggatttcggagtgctttgaagaaagcagatgccatctcatctattggcacatcaggactgacagacatgaaaaaattggccaagtgggcagcagagtccaagctcgacccaaatgaccccaacaatgcccctttgatgcagcttatctcggttgctaccagtggtgaatcctatgtccctgatttctttagactggagcagctgcaacaggagtttaactttgtttcagatcaagaattaaatagatccaaacgatttaggcttcttcatcttagaagccaagaggtgccagaattccgaaattataagcaagttccagtctatgaccgagaaattatggaaaaggtattccaggactatgagaaacggttacgagacagaaatgtaatagaaaccaaggaacacatagacacccatagggccatagtagccaagtacctccagcaggttagagaatcagtgataaatcgtttcttaattgcaaaacaatattttcttcttgctgatatgatagtagaagaagaagttcccaatatcagcattttgggcctaagccttttcaagctggcagaacaaaagcgaccactgcggccaaggagaaaaggtcggaagaaggtgacagcccaaaacctgtctgatggagacataaagctgctggtgaacattgtgcgagcttacgacattccagtgaggaagccggcagtgagcaaattccagcagccgtcgaggtcttcaaggatgttcagtgaaaagcatgctgcttccccaagcacgtacagcccaacccacaatgctgactaccccctcggccaggttttagtacgtccctttgtagaagtctcttttcaacgaacagtttgccatacgactacggctgaaggaccaaaccctagctggaatgaagaactagaacttccatttagggctcctaatggagattatagcacagccagtctgcagtcagtgaaagatgttgtgttcattaacatttttgatgaagtactgcatgatgtcttagaggatgaccgtgaaagaggaagtggaatccatactcgtattgagagacactggctgggatgtgtgaaaatgccatttagcacaatatatttccaagcaaggtttgagtctcaggaagatgagaaattacttcaagcaactgagaagtttcaagctgaatgtgccttaaagtttccaaatcgtcagtgccttacaacagtaattgatataagcggaaaaactgtttttatcacacgttatctcaaacctttaaaccctcctcaggagctccttaatgtctaccccaataatctacaggcaactgcagaactggtggctcgatatgtgtccttgattcccttcttgcctgacactgtctcatttggtggtatctgtgacctctggagcacatctgatcaatttcttgatctcctggcaggggatgaagaagaacatgcagtactattgtgtaattactttctgtctctgggtaagaaggcctggctgttgatgggcaatgctattcctgagggtccaactgcctatgtgctaacttgggagcaaggtcgttatttaatatggaatccctgcagtggacatttttatggacaatttgatacattctgtcccttgaaaaatgtgggctgtttaataggtcctgacaatatttggtttaatattcaacgatatgaatctccactaaggataaattttgatgtcaccaggcccaagctatggaaatctttcttttcaagaagccttccatatcctggcctttccagtgttcagcctgaagagctaatttaccagcgctcagacaaagcagctgcagctgagctacaagacaggattgaaaaaatactaaaagaaaaaatcatggactggaggccacgccatctgactcggtggaataggtattgtacctctactctgcgtcacttcttgcctctgttagaaaaaagtcaaggagaagatgtagaagatgaccacagagcagaactgctaaaacagctgggagactacaggttctctggatttcctcttcacatgccttattctgaagtgaagcctttaattgacgctgtgtatagtactggagtacataatattgatgttcctaatgttgaatttgctttagctgtatacatacacccataccccaaaaatgttttgtctgtttggatctatgttgcctctcttatacgcaacaggtaatttttttcactgtactttctgtatcatgtaaaaactacacttaggatatgagaaaattttaaattatatgcatcacatcagaagaacatattattggcaaataataaaattatcaactgtt

SEQ ID NO: 36838 - DNA, 5234 bp, Artificial Sequence
  derived and/or modified sequence
cttaggaacgggttgctaagctggtgtttttgctccaagacatggctgcagcttcccagggaggagcccaggggcatctccaacactcagcctttccctccggacccttttaaaagattcaacagcaccgtctctctccacttccatcctagaatgcagaatctgcaaagtgccttttgtaaagtttcttaaggtaaatcagtccctatgttctttgtcagggacccatcccagccaaaatgaatcccagggaagaaaaagtaaaaataattacagaggagttcattgaaaatgatgaggatgcagacatgggaagacagaataagaactcaaaggttcgaagacagccaagaaagaaacagccaccaactgctgtccccaaggaaatggtgtccgaaaaatcccaccttggcaacccccaggagcctgtgcaggaggagcccaagacccgcctcctgagtatgacagtccggagaggcccacggagcttacctccaattccttcaacttccagaacaggctttgcagaattttccatgaggggacgcatgagggagaaattgcaagcagcgaggtccaaagcagaaagtgcattgctgcaggaaatccccactcctcggcccagacgcttacgaagtcccagtaagaaagaattggagactgaatttggcacagagccagggaaagaggtagaaaggactcaacaagaagttgactcccaaagttactcaagagtcaagttccatgattctgcacgaaaaatcaagcctaaaccccaggttccacctggcttcccttctgcagaagaggcctataacttctttactttcaactttgatcccgaaccagaaggatcagaggaaaaaccaaaagcaagacatagagcgggaactaatcaagaggaggaggaaggggaagaagaagaaccacctgcacaaggaggaggaaaggaaatggatgaggaagaactgcttaatggtgatgatgccgaggacttcctattgggcttagatcacgtggctgacgattttgtagcagtcagacctgcagattatgaaagcatccatgatcggctgcagatggaaagagaaatgctcttcatacccagtaggcagacagtccctacatataaaaagcttcctgagaatgtacagcccaggttcctggaagatgaaggcctttacaccggggtaagaccagaggtggcacgcaccaatcagaacatcatggagaacagattgctgatgcaggaccccgaaagaagatggtttggagatgacggcaggatcctagctctgccaaaccccatcaagccatttccttcaaggccgccagtactaacacaggagcagagcattaaggcagagcttgaaacactgtataaaaaggctgtaaaatacgttcacagtagtcagcatgtgatcagatctggagaccctcctggaaatttccaactggacattgatatttcagggttaatcttcactcatcatccctgttttagccgagagcatgttttggcagccaagctggcccagttatatgaccagtaccttgcaagacaccagagaaacaaggcgaaatttcttactgataagctccaagctttaagaaatgctgttcagactggccttgatccagaaaaacctcatcagtctctcgataccatccaaaaaaccatcaatgagtataaatctgaaattcgacaaacaagaaaattccgtgatgctgaacaagaaaaagatagaacattgcttaagactatcataaaagtttggaaagagatgaaatcccttcgagagttccagagatttacaaatactcccttgaaacttgttttgagaaaggaaaaagctgaccagaaagcagatgaagaagcatatgaagcagaaattcaagctgaaataagtgaactgttagaagagcacacggaggagtacgcacagaagatggaagaatacagaacgtcgttacaacagtggaaggcctggaggaaagtgcaaagggccaagaagaagaaaaggaaacaagcagcagaagaacatcccggtgatgagattgcagagccgtatcccgaggaggaccttgtgaagcccagccctccagagcccactgatcgggcagtgatagagcaggaggtgagggagagagcagcccagagcaggaggaggccttgggagcccacgctggtcccggagctaagcctggcaggaagcgtaacacccaatgaccagtgccccagagcggaggtctcgagaagggaggatgtaaagaagcgctcagtgtacttaaaagtgctgttcaacaacaaggaggtgtccaggacagtcagtcggccactaggagcagacttccgagttcactttgggcagattttcaatttgcaaatagtcaactggccggagagtttaacacttcaggtctatgaaactgtcggacacagtagtcccaccttgctagcagaagtgtttctgcctattcctgagactactgttgtcactggaagggctcctactgaagaagtggagtttagcagtaatcagcatgtgacactggaccacgagggagttggaagtggagtgcccttctcatttgaagctgatggcagtaaccagctgactctgatgacctcagggaaagtgtctcatagtgtggcatgggccattggagaaaacgggatacctttaattcctccattgtcacagcagaacatcggatttcggagtgctttgaagaaagcagatgccatctcatctattggcacatcaggactgacagacatgaaaaaattggccaagtgggcagcagagtccaagctcgacccaaatgaccccaacaatgcccctttgatgcagcttatctcggttgctaccagtggtgaatcctatgtccctgatttctttagactggagcagctgcaacaggagtttaactttgtttcagatcaagaattaaatagatccaaacgatttaggcttcttcatcttagaagccaagaggtgccagaattccgaaattataagcaagttccagtctatgaccgagaaattatggaaaaggtattccaggactatgagaaacggttacgagacagaaatgtaatagaaaccaaggaacacatagacacccatagggccatagtagccaagtacctccagcaggttagagaatcagtgataaatcgtttcttaattgcaaaacaatattttcttcttgctgatatgatagtagaagaagaagttcccaatatcagcattttgggcctaagccttttcaagctggcagaacaaaagcgaccactgcggccaaggagaaaaggtcggaagaaggtgacagcccaaaacctgtctgatggagacataaagctgctggtgaacattgtgcgagcttacgacattccagtgaggaagccggcagtgagcaaattccagcagccgtcgaggtcttcaaggatgttcagtgaaaagcatgctgcttccccaagcacgtacagcccaacccacaatgctgactaccccctcggccaggttttagtacgtccctttgtagaagtctcttttcaacgaacagtttgccatacgactacggctgaaggaccaaaccctagctggaatgaagaactagaacttccatttagggctcctaatggagattatagcacagccagtctgcagtcagtgaaagatgttgtgttcattaacatttttgatgaagtactgcatgatgtcttagaggatgaccgtgaaagaggaagtggaatccatactcgtattgagagacactggctgggatgtgtgaaaatgccatttagcacaatatatttccaagcaaggattgatggaacatttaaaatagatattcccccagttcttctgggctacagtaaggagcgaaatatgattcttgagcggggttttgattctgtccgaagcttaagtgaaggctcctacattaccctctttattaccattgagccccagctggttcctggagagtccattcgagaaaagtttgagtctcaggaagatgagaaattacttcaagcaactgagaagtttcaagctgaatgtgccttaaagtttccaaatcgtcagtgccttacaacagtaattgatataagcggaaaaactgtttttatcacacgttatctcaaacctttaaaccctcctcaggagctccttaatgtctaccccaataatctacaggcaactgcagaactggtggctcgatatgtgtccttgattcccttcttgcctgacactgtctcatttggtggtatctgtgacctctggagcacatctgatcaatttcttgatctcctggcaggggatgaagaagaacatgcagtactattgtgtaattactttctgtctctgggtaagaaggcctggctgttgatgggcaatgctattcctgagggtccaactgcctatgtgctaacttgggagcaaggtcgttatttaatatggaatccctgcagtggacatttttatggacaatttgatacattctgtcccttgaaaaatgtgggctgtttaataggtcctgacaatatttggtttaatattcaacgatatgaatctccactaaggataaattttgatgtcaccaggcccaagctatggaaatctttcttttcaagaagccttccatatcctggcctttccagtgttcagcctgaagagctaatttaccagcgctcagacaaagcagctgcagctgagctacaagacaggattgaaaaaatactaaaagaaaaaatcatggactggaggccacgccatctgactcggtggaataggtattgtacctctactctgcgtcacttcttgcctctgttagaaaaaagtcaaggagaagatgtagaagatgaccacagagcagaactgctaaaacagctgggagactacaggttctctggatttcctcttcacatgccttattctgaagtgaagcctttaattgacgctgtgtatagtactggagtacataatattgatgttcctaatgttgaatttgctttagctgtatacatacacccataccccaaaaatgttttgtctgtttggatctatgttgcctctcttatacgcaacaggtaatttttttcactgtactttctgtatcatgtaaaaactacacttaggatatgagaaaattttaaattatatgcatcacatcagaagaacatattattggcaaataataaaattatcaactgttttcaaactgtg

SEQ ID NO: 36839 - DNA, 5249 bp, Artificial Sequence
  derived and/or modified sequence
cttaggaacgggttgctaagctggtgtttttgctccaagacatggctgcagcttcccagggaggagcccaggggcatctccaacactcagcctttccctccggacccttttaaaagattcaacagcaccgtctctctccacttccatcctagaatgcagaatctgcaaagtgccttttgtaaagtttcttaaggtaaatcagtccctaaccggactttaggctgcaacattgtcagggacccatcccagccaaaatgaatcccagggaagaaaaagtaaaaataattacagaggagttcattgaaaatgatgaggatgcagacatgggaagacagaataagaactcaaaggttcgaagacagccaagaaagaaacagccaccaactgctgtccccaaggaaatggtgtccgaaaaatcccaccttggcaacccccaggagcctgtgcaggaggagcccaagacccgcctcctgagtatgacagtccggagaggcccacggagcttacctccaattccttcaacttccagaacaggctttgcagaattttccatgaggggacgcatgagggagaaattgcaagcagcgaggtccaaagcagaaagtgcattgctgcaggaaatccccactcctcggcccagacgcttacgaagtcccagtaagaaagaattggagactgaatttggcacagagccagggaaagaggtagaaaggactcaacaagaagttgactcccaaagttactcaagagtcaagttccatgattctgcacgaaaaatcaagcctaaaccccaggttccacctggcttcccttctgcagaagaggcctataacttctttactttcaactttgatcccgaaccagaaggatcagaggaaaaaccaaaagcaagacatagagcgggaactaatcaagaggaggaggaaggggaagaagaagaaccacctgcacaaggaggaggaaaggaaatggatgaggaagaactgcttaatggtgatgatgccgaggacttcctattgggcttagatcacgtggctgacgattttgtagcagtcagacctgcagattatgaaagcatccatgatcggctgcagatggaaagagaaatgctcttcatacccagtaggcagacagtccctacatataaaaagcttcctgagaatgtacagcccaggttcctggaagatgaaggcctttacaccggggtaagaccagaggtggcacgcaccaatcagaacatcatggagaacagattgctgatgcaggaccccgaaagaagatggtttggagatgacggcaggatcctagctctgccaaaccccatcaagccatttccttcaaggccgccagtactaacacaggagcagagcattaaggcagagcttgaaacactgtataaaaaggctgtaaaatacgttcacagtagtcagcatgtgatcagatctggagaccctcctggaaatttccaactggacattgatatttcagggttaatcttcactcatcatccctgttttagccgagagcatgttttggcagccaagctggcccagttatatgaccagtaccttgcaagacaccagagaaacaaggcgaaatttcttactgataagctccaagctttaagaaatgctgttcagactggccttgatccagaaaaacctcatcagtctctcgataccatccaaaaaaccatcaatgagtataaatctgaaattcgacaaacaagaaaattccgtgatgctgaacaagaaaaagatagaacattgcttaagactatcataaaagtttggaaagagatgaaatcccttcgagagttccagagatttacaaatactcccttgaaacttgttttgagaaaggaaaaagctgaccagaaagcagatgaagaagcatatgaagcagaaattcaagctgaaataagtgaactgttagaagagcacacggaggagtacgcacagaagatggaagaatacagaacgtcgttacaacagtggaaggcctggaggaaagtgcaaagggccaagaagaagaaaaggaaacaagcagcagaagaacatcccggtgatgagattgcagagccgtatcccgaggaggaccttgtgaagcccagccctccagagcccactgatcgggcagtgatagagcaggaggtgagggagagagcagcccagagcaggaggaggccttgggagcccacgctggtcccggagctaagcctggcaggaagcgtaacacccaatgaccagtgccccagagcggaggtctcgagaagggaggatgtaaagaagcgctcagtgtacttaaaagtgctgttcaacaacaaggaggtgtccaggacagtcagtcggccactaggagcagacttccgagttcactttgggcagattttcaatttgcaaatagtcaactggccggagagtttaacacttcaggtctatgaaactgtcggacacagtagtcccaccttgctagcagaagtgtttctgcctattcctgagactactgttgtcactggaagggctcctactgaagaagtggagtttagcagtaatcagcatgtgacactggaccacgagggagttggaagtggagtgcccttctcatttgaagctgatggcagtaaccagctgactctgatgacctcagggaaagtgtctcatagtgtggcatgggccattggagaaaacgggatacctttaattcctccattgtcacagcagaacatcggatttcggagtgctttgaagaaagcagatgccatctcatctattggcacatcaggactgacagacatgaaaaaattggccaagtgggcagcagagtccaagctcgacccaaatgaccccaacaatgcccctttgatgcagcttatctcggttgctaccagtggtgaatcctatgtccctgatttctttagactggagcagctgcaacaggagtttaactttgtttcagatcaagaattaaatagatccaaacgatttaggcttcttcatcttagaagccaagaggtgccagaattccgaaattataagcaagttccagtctatgaccgagaaattatggaaaaggtattccaggactatgagaaacggttacgagacagaaatgtaatagaaaccaaggaacacatagacacccatagggccatagtagccaagtacctccagcaggttagagaatcagtgataaatcgtttcttaattgcaaaacaatattttcttcttgctgatatgatagtagaagaagaagttcccaatatcagcattttgggcctaagccttttcaagctggcagaacaaaagcgaccactgcggccaaggagaaaaggtcggaagaaggtgacagcccaaaacctgtctgatggagacataaagctgctggtgaacattgtgcgagcttacgacattccagtgaggaagccggcagtgagcaaattccagcagccgtcgaggtcttcaaggatgttcagtgaaaagcatgctgcttccccaagcacgtacagcccaacccacaatgctgactaccccctcggccaggttttagtacgtccctttgtagaagtctcttttcaacgaacagtttgccatacgactacggctgaaggaccaaaccctagctggaatgaagaactagaacttccatttagggctcctaatggagattatagcacagccagtctgcagtcagtgaaagatgttgtgttcattaacatttttgatgaagtactgcatgatgtcttagaggatgaccgtgaaagaggaagtggaatccatactcgtattgagagacactggctgggatgtgtgaaaatgccatttagcacaatatatttccaagcaaggattgatggaacatttaaaatagatattcccccagttcttctgggctacagtaaggagcgaaatatgattcttgagcggggttttgattctgtccgaagcttaagtgaaggctcctacattaccctctttattaccattgagccccagctggttcctggagagtccattcgagaaaagtttgagtctcaggaagatgagaaattacttcaagcaactgagaagtttcaagctgaatgtgccttaaagtttccaaatcgtcagtgccttacaacagtaattgatataagcggaaaaactgtttttatcacacgttatctcaaacctttaaaccctcctcaggagctccttaatgtctaccccaataatctacaggcaactgcagaactggtggctcgatatgtgtccttgattcccttcttgcctgacactgtctcatttggtggtatctgtgacctctggagcacatctgatcaatttcttgatctcctggcaggggatgaagaagaacatgcagtactattgtgtaattactttctgtctctgggtaagaaggcctggctgttgatgggcaatgctattcctgagggtccaactgcctatgtgctaacttgggagcaaggtcgttatttaatatggaatccctgcagtggacatttttatggacaatttgatacattctgtcccttgaaaaatgtgggctgtttaataggtcctgacaatatttggtttaatattcaacgatatgaatctccactaaggataaattttgatgtcaccaggcccaagctatggaaatctttcttttcaagaagccttccatatcctggcctttccagtgttcagcctgaagagctaatttaccagcgctcagacaaagcagctgcagctgagctacaagacaggattgaaaaaatactaaaagaaaaaatcatggactggaggccacgccatctgactcggtggaataggtattgtacctctactctgcgtcacttcttgcctctgttagaaaaaagtcaaggagaagatgtagaagatgaccacagagcagaactgctaaaacagctgggagactacaggttctctggatttcctcttcacatgccttattctgaagtgaagcctttaattgacgctgtgtatagtactggagtacataatattgatgttcctaatgttgaatttgctttagctgtatacatacacccataccccaaaaatgttttgtctgtttggatctatgttgcctctcttatacgcaacaggtaatttttttcactgtactttctgtatcatgtaaaaactacacttaggatatgagaaaattttaaattatatgcatcacatcagaagaacatattattggcaaataataaaattatcaactgttttcaaactgtg

SEQ ID NO: 36840 - DNA, 5057 bp, Artificial Sequence
  derived and/or modified sequence
cttaggaacgggttgctaagctggtgtttttgctccaagacatggctgcagcttcccagggaggagcccaggggcatctccaacactcagcctttccctccggacccttttaaaagattcaacagcaccgtctctctccacttccatcctagaatgcagaatctgcaaagtgccttttgtaaagtttcttaaggtaaatcagtccctatgttctttgtcagggacccatcccagccaaaatgaatcccagggaagaaaaagtaaaaataattacagaggagttcattgaaaatgatgaggatgcagacatgggaagacagaataagaactcaaaggttcgaagacagccaagaaagaaacagccaccaactgctgtccccaaggaaatggtgtccgaaaaatcccaccttggcaacccccaggagcctgtgcaggaggagcccaagacccgcctcctgagtatgacagtccggagaggcccacggagcttacctccaattccttcaacttccagaacaggctttgcagaattttccatgaggggacgcatgagggagaaattgcaagcagcgaggtccaaagcagaaagtgcattgctgcaggaaatccccactcctcggcccagacgcttacgaagtcccagtaagaaagaattggagactgaatttggcacagagccagggaaagaggtagaaaggactcaacaagaagttgactcccaaagttactcaagagtcaagttccatgattctgcacgaaaaatcaagcctaaaccccaggttccacctggcttcccttctgcagaagaggcctataacttctttactttcaactttgatcccgaaccagaaggatcagaggaaaaaccaaaagcaagacatagagcgggaactaatcaagaggaggaggaaggggaagaagaagaaccacctgcacaaggaggaggaaaggaaatggatgaggaagaactgcttaatggtgatgatgccgaggacttcctattgggcttagatcacgtggctgacgattttgtagcagtcagacctgcagattatgaaagcatccatgatcggctgcagatggaaagagaaatgctcttcatacccagtaggcagacagtccctacatataaaaagcttcctgagaatgtacagcccaggttcctggaagatgaaggcctttacaccggggtaagaccagaggtggcacgcaccaatcagaacatcatggagaacagattgctgatgcaggaccccgaaagaagatggtttggagatgacggcaggatcctagctctgccaaaccccatcaagccatttccttcaaggccgccagtactaacacaggagcagagcattaaggcagagcttgaaacactgtataaaaaggctgtaaaatacgttcacagtagtcagcatgtgatcagatctggagaccctcctggaaatttccaactggacattgatatttcagggttaatcttcactcatcatccctgttttagccgagagcatgttttggcagccaagctggcccagttatatgaccagtaccttgcaagacaccagagaaacaaggcgaaatttcttactgataagctccaagctttaagaaatgctgttcagactggccttgatccagaaaaacctcatcagtctctcgataccatccaaaaaaccatcaatgagtataaatctgaaattcgacaaacaagaaaattccgtgatgctgaacaagaaaaagatagaacattgcttaagactatcataaaagtttggaaagagatgaaatcccttcgagagttccagagatttacaaatactcccttgaaacttgttttgagaaaggaaaaagctgaccagaaagcagatgaagaagcatatgaagcagaaattcaagctgaaataagtgaactgttagaagagcacacggaggagtacgcacagaagatggaagaatacagaacgtcgttacaacagtggaaggcctggaggaaagtgcaaagggccaagaagaagaaaaggaaacaagcagcagaagaacatcccggtgatgagattgcagagccgtatcccgaggaggaccttgtgaagcccagccctccagagcccactgatcgggcagtgatagagcaggaggtgagggagagagcagcccagagcaggaggaggccttgggagcccacgctggtcccggagctaagcctggcaggaagcgtaacacccaatgaccagtgccccagagcggaggtctcgagaagggaggatgtaaagaagcgctcagtgtacttaaaagtgctgttcaacaacaaggaggtgtccaggacagtcagtcggccactaggagcagacttccgagttcactttgggcagattttcaatttgcaaatagtcaactggccggagagtttaacacttcaggtctatgaaactgtcggacacagtagtcccaccttgctagcagaagtgtttctgcctattcctgagactactgttgtcactggaagggctcctactgaagaagtggagtttagcagtaatcagcatgtgacactggaccacgagggagttggaagtggagtgcccttctcatttgaagctgatggcagtaaccagctgactctgatgacctcagggaaagtgtctcatagtgtggcatgggccattggagaaaacgggatacctttaattcctccattgtcacagcagaacatcggatttcggagtgctttgaagaaagcagatgccatctcatctattggcacatcaggactgacagacatgaaaaaattggccaagtgggcagcagagtccaagctcgacccaaatgaccccaacaatgcccctttgatgcagcttatctcggttgctaccagtggtgaatcctatgtccctgatttctttagactggagcagctgcaacaggagtttaactttgtttcagatcaagaattaaatagatccaaacgatttaggcttcttcatcttagaagccaagaggtgccagaattccgaaattataagcaagttccagtctatgaccgagaaattatggaaaaggtattccaggactatgagaaacggttacgagacagaaatgtaatagaaaccaaggaacacatagacacccatagggccatagtagccaagtacctccagcaggttagagaatcagtgataaatcgtttcttaattgcaaaacaatattttcttcttgctgatatgatagtagaagaagaagttcccaatatcagcattttgggcctaagccttttcaagctggcagaacaaaagcgaccactgcggccaaggagaaaaggtcggaagaaggtgacagcccaaaacctgtctgatggagacataaagctgctggtgaacattgtgcgagcttacgacattccagtgaggaagccggcagtgagcaaattccagcagccgtcgaggtcttcaaggatgttcagtgaaaagcatgctgcttccccaagcacgtacagcccaacccacaatgctgactaccccctcggccaggttttagtacgtccctttgtagaagtctcttttcaacgaacagtttgccatacgactacggctgaaggaccaaaccctagctggaatgaagaactagaacttccatttagggctcctaatggagattatagcacagccagtctgcagtcagtgaaagatgttgtgttcattaacatttttgatgaagtactgcatgatgtcttagaggatgaccgtgaaagaggaagtggaatccatactcgtattgagagacactggctgggatgtgtgaaaatgccatttagcacaatatatttccaagcaaggtttgagtctcaggaagatgagaaattacttcaagcaactgagaagtttcaagctgaatgtgccttaaagtttccaaatcgtcagtgccttacaacagtaattgatataagcggaaaaactgtttttatcacacgttatctcaaacctttaaaccctcctcaggagctccttaatgtctaccccaataatctacaggcaactgcagaactggtggctcgatatgtgtccttgattcccttcttgcctgacactgtctcatttggtggtatctgtgacctctggagcacatctgatcaatttcttgatctcctggcaggggatgaagaagaacatgcagtactattgtgtaattactttctgtctctgggtaagaaggcctggctgttgatgggcaatgctattcctgagggtccaactgcctatgtgctaacttgggagcaaggtcgttatttaatatggaatccctgcagtggacatttttatggacaatttgatacattctgtcccttgaaaaatgtgggctgtttaataggtcctgacaatatttggtttaatattcaacgatatgaatctccactaaggataaattttgatgtcaccaggcccaagctatggaaatctttcttttcaagaagccttccatatcctggcctttccagtgttcagcctgaagagctaatttaccagcgctcagacaaagcagctgcagctgagctacaagacaggattgaaaaaatactaaaagaaaaaatcatggactggaggccacgccatctgactcggtggaataggtattgtacctctactctgcgtcacttcttgcctctgttagaaaaaagtcaaggagaagatgtagaagatgaccacagagcagaactgctaaaacagctgggagactacaggttctctggatttcctcttcacatgccttattctgaagtgaagcctttaattgacgctgtgtatagtactggagtacataatattgatgttcctaatgttgaatttgctttagctgtatacatacacccataccccaaaaatgttttgtctgtttggatctatgttgcctctcttatacgcaacaggtaatttttttcactgtactttctgtatcatgtaaaaactacacttaggatatgagaaaattttaaattatatgcatcacatcagaagaacatattattggcaaataataaaattatcaactgttttcaaactgtg

SEQ ID NO: 36841 - DNA, 5175 bp, Artificial Sequence
  derived and/or modified sequence
gcccaggggcatctccaacactcagcctttccctccggacccttttaaaagattcaacagcaccgtctctctccacttccatcctagaatgcagaatctgcaaagtgccttttgtaaagtttcttaagctatattctaatggatatgggctgacattaacaaggacccatcccagccaaaatgaatcccagggaagaaaaagtaaaaataattacagaggagttcattgaaaatgatgaggatgcagacatgggaagacagaataagaactcaaaggttcgaagacagccaagaaagaaacagccaccaactgctgtccccaaggaaatggtgtccgaaaaatcccaccttggcaacccccaggagcctgtgcaggaggagcccaagacccgcctcctgagtatgacagtccggagaggcccacggagcttacctccaattccttcaacttccagaacaggctttgcagaattttccatgaggggacgcatgagggagaaattgcaagcagcgaggtccaaagcagaaagtgcattgctgcaggaaatccccactcctcggcccagacgcttacgaagtcccagtaagaaagaattggagactgaatttggcacagagccagggaaagaggtagaaaggactcaacaagaagttgactcccaaagttactcaagagtcaagttccatgattctgcacgaaaaatcaagcctaaaccccaggttccacctggcttcccttctgcagaagaggcctataacttctttactttcaactttgatcccgaaccagaaggatcagaggaaaaaccaaaagcaagacatagagcgggaactaatcaagaggaggaggaaggggaagaagaagaaccacctgcacaaggaggaggaaaggaaatggatgaggaagaactgcttaatggtgatgatgccgaggacttcctattgggcttagatcacgtggctgacgattttgtagcagtcagacctgcagattatgaaagcatccatgatcggctgcagatggaaagagaaatgctcttcatacccagtaggcagacagtccctacatataaaaagcttcctgagaatgtacagcccaggttcctggaagatgaaggcctttacaccggggtaagaccagaggtggcacgcaccaatcagaacatcatggagaacagattgctgatgcaggaccccgaaagaagatggtttggagatgacggcaggatcctagctctgccaaaccccatcaagccatttccttcaaggccgccagtactaacacaggagcagagcattaaggcagagcttgaaacactgtataaaaaggctgtaaaatacgttcacagtagtcagcatgtgatcagatctggagaccctcctggaaatttccaactggacattgatatttcagggttaatcttcactcatcatccctgttttagccgagagcatgttttggcagccaagctggcccagttatatgaccagtaccttgcaagacaccagagaaacaaggcgaaatttcttactgataagctccaagctttaagaaatgctgttcagactggccttgatccagaaaaacctcatcagtctctcgataccatccaaaaaaccatcaatgagtataaatctgaaattcgacaaacaagaaaattccgtgatgctgaacaagaaaaagatagaacattgcttaagactatcataaaagtttggaaagagatgaaatcccttcgagagttccagagatttacaaatactcccttgaaacttgttttgagaaaggaaaaagctgaccagaaagcagatgaagaagcatatgaagcagaaattcaagctgaaataagtgaactgttagaagagcacacggaggagtacgcacagaagatggaagaatacagaacgtcgttacaacagtggaaggcctggaggaaagtgcaaagggccaagaagaagaaaaggaaacaagcagcagaagaacatcccggtgatgagattgcagagccgtatcccgaggaggaccttgtgaagcccagccctccagagcccactgatcgggcagtgatagagcaggaggtgagggagagagcagcccagagcaggaggaggccttgggagcccacgctggtcccggagctaagcctggcaggaagcgtaacacccaatgaccagtgccccagagcggaggtctcgagaagggaggatgtaaagaagcgctcagtgtacttaaaagtgctgttcaacaacaaggaggtgtccaggacagtcagtcggccactaggagcagacttccgagttcactttgggcagattttcaatttgcaaatagtcaactggccggagagtttaacacttcaggtctatgaaactgtcggacacagtagtcccaccttgctagcagaagtgtttctgcctattcctgagactactgttgtcactggaagggctcctactgaagaagtggagtttagcagtaatcagcatgtgacactggaccacgagggagttggaagtggagtgcccttctcatttgaagctgatggcagtaaccagctgactctgatgacctcagggaaagtgtctcatagtgtggcatgggccattggagaaaacgggatacctttaattcctccattgtcacagcagaacatcggatttcggagtgctttgaagaaagcagatgccatctcatctattggcacatcaggactgacagacatgaaaaaattggccaagtgggcagcagagtccaagctcgacccaaatgaccccaacaatgcccctttgatgcagcttatctcggttgctaccagtggtgaatcctatgtccctgatttctttagactggagcagctgcaacaggagtttaactttgtttcagatcaagaattaaatagatccaaacgatttaggcttcttcatcttagaagccaagaggtgccagaattccgaaattataagcaagttccagtctatgaccgagaaattatggaaaaggtattccaggactatgagaaacggttacgagacagaaatgtaatagaaaccaaggaacacatagacacccatagggccatagtagccaagtacctccagcaggttagagaatcagtgataaatcgtttcttaattgcaaaacaatattttcttcttgctgatatgatagtagaagaagaagttcccaatatcagcattttgggcctaagccttttcaagctggcagaacaaaagcgaccactgcggccaaggagaaaaggtcggaagaaggtgacagcccaaaacctgtctgatggagacataaagctgctggtgaacattgtgcgagcttacgacattccagtgaggaagccggcagtgagcaaattccagcagccgtcgaggtcttcaaggatgttcagtgaaaagcatgctgcttccccaagcacgtacagcccaacccacaatgctgactaccccctcggccaggttttagtacgtccctttgtagaagtctcttttcaacgaacagtttgccatacgactacggctgaaggaccaaaccctagctggaatgaagaactagaacttccatttagggctcctaatggagattatagcacagccagtctgcagtcagtgaaagatgttgtgttcattaacatttttgatgaagtactgcatgatgtcttagaggatgaccgtgaaagaggaagtggaatccatactcgtattgagagacactggctgggatgtgtgaaaatgccatttagcacaatatatttccaagcaaggattgatggaacatttaaaatagatattcccccagttcttctgggctacagtaaggagcgaaatatgattcttgagcggggttttgattctgtccgaagcttaagtgaaggctcctacattaccctctttattaccattgagccccagctggttcctggagagtccattcgagaaaagtttgagtctcaggaagatgagaaattacttcaagcaactgagaagtttcaagctgaatgtgccttaaagtttccaaatcgtcagtgccttacaacagtaattgatataagcggaaaaactgtttttatcacacgttatctcaaacctttaaaccctcctcaggagctccttaatgtctaccccaataatctacaggcaactgcagaactggtggctcgatatgtgtccttgattcccttcttgcctgacactgtctcatttggtggtatctgtgacctctggagcacatctgatcaatttcttgatctcctggcaggggatgaagaagaacatgcagtactattgtgtaattactttctgtctctgggtaagaaggcctggctgttgatgggcaatgctattcctgagggtccaactgcctatgtgctaacttgggagcaaggtcgttatttaatatggaatccctgcagtggacatttttatggacaatttgatacattctgtcccttgaaaaatgtgggctgtttaataggtcctgacaatatttggtttaatattcaacgatatgaatctccactaaggataaattttgatgtcaccaggcccaagctatggaaatctttcttttcaagaagccttccatatcctggcctttccagtgttcagcctgaagagctaatttaccagcgctcagacaaagcagctgcagctgagctacaagacaggattgaaaaaatactaaaagaaaaaatcatggactggaggccacgccatctgactcggtggaataggtattgtacctctactctgcgtcacttcttgcctctgttagaaaaaagtcaaggagaagatgtagaagatgaccacagagcagaactgctaaaacagctgggagactacaggttctctggatttcctcttcacatgccttattctgaagtgaagcctttaattgacgctgtgtatagtactggagtacataatattgatgttcctaatgttgaatttgctttagctgtatacatacacccataccccaaaaatgttttgtctgtttggatctatgttgcctctcttatacgcaacaggtaatttttttcactgtactttctgtatcatgtaaaaactacacttaggatatgagaaaattttaaattatatgcatcacatcagaagaacatattattggcaaataataaaattatcaactgttttcaaactgtg

SEQ ID NO: 36842 - DNA, 5031 bp, Artificial Sequence
  derived and/or modified sequence
cttaggaacgggttgctaagctggtgtttttgctccaagacatggctgcagcttcccagggaggagcccaggggcatctccaacactcagcctttccctccggacccttttaaaagattcaacagcaccgtctctctccacttccatcctagaatgcagaatctgcaaagtgccttttgtaaagtttcttaaggtaaatcagtccctatgttctttgtcagggacccatcccagccaaaatgaatcccagggaagaaaaagtaaaaataattacagaggagttcattgaaaatgatgaggatgcagacatgggaagacagaataagaactcaaaggttcgaagacagccaagaaagaaacagaagccaactcctttctcccgagcctgctggcagatcctcccccacctctccgcaggagttcccctcctaggctgggagcatcccgtgcagggtaaatcttttcaagccaccaactgctgtccccaaggaaatggtgtccgaaaaatcccaccttggcaacccccaggagcctgtgcaggaggagcccaagacccgcctcctgagtatgacagtccggagaggcccacggagcttacctccaattccttcaacttccagaacaggctttgcagaattttccatgaggggacgcatgagggagaaattgcaagcagcgaggtccaaagcagaaagtgcattgctgcaggaaatccccactcctcggcccagacgcttacgaagtcccagtaagaaagaattggagactgaatttggcacagagccagggaaagaggtagaaaggactcaacaagaagttgactcccaaagttactcaagagtcaagttccatgattctgcacgaaaaatcaagcctaaaccccaggttccacctggcttcccttctgcagaagaggcctataacttctttactttcaactttgatcccgaaccagaaggatcagaggaaaaaccaaaagcaagacatagagcgggaactaatcaagaggaggaggaaggggaagaagaagaaccacctgcacaaggaggaggaaaggaaatggatgaggaagaactgcttaatggtgatgatgccgaggacttcctattgggcttagatcacgtggctgacgattttgtagcagtcagacctgcagattatgaaagcatccatgatcggctgcagatggaaagagaaatgctcttcatacccagtaggcagacagtccctacatataaaaagcttcctgagaatgtacagcccaggttcctggaagatgaaggcctttacaccggggtaagaccagaggtggcacgcaccaatcagaacatcatggagaacagattgctgatgcaggaccccgaaagaagatggtttggagatgacggcaggatcctagctctgccaaaccccatcaagccatttccttcaaggccgccagtactaacacaggagcagagcattaaggcagagcttgaaacactgtataaaaaggctgtaaaatacgttcacagtagtcagcatgtgatcagatctggagaccctcctggaaatttccaactggacattgatatttcagggttaatcttcactcatcatccctgttttagccgagagcatgttttggcagccaagctggcccagttatatgaccagtaccttgcaagacaccagagaaacaaggcgaaatttcttactgataagctccaagctttaagaaatgctgttcagactggccttgatccagaaaaacctcatcagtctctcgataccatccaaaaaaccatcaatgagtataaatctgaaattcgacaaacaagaaaattccgtgatgctgaacaagaaaaagatagaacattgcttaagactatcataaaagtttggaaagagatgaaatcccttcgagagttccagagatttacaaatactcccttgaaacttgttttgagaaaggaaaaagctgaccagaaagcagatgaagaagcatatgaagcagaaattcaagctgaaataagtgaactgttagaagagcacacggaggagtacgcacagaagatggaagaatacagaacgtcgttacaacagtggaaggcctggaggaaagtgcaaagggccaagaagaagaaaaggaaacaagcagcagaagaacatcccggtgatgagattgcagagccgtatcccgaggaggaccttgtgaagcccagccctccagagcccactgatcgggcagtgatagagcaggaggtgagggagagagcagcccagagcaggaggaggccttgggagcccacgctggtcccggagctaagcctggcaggaagcgtaacacccaatgaccagtgccccagagcggaggtctcgagaagggaggatgtaaagaagcgctcagtgtacttaaaagtgctgttcaacaacaaggaggtgtccaggacagtcagtcggccactaggagcagacttccgagttcactttgggcagattttcaatttgcaaatagtcaactggccggagagtttaacacttcaggtctatgaaactgtcggacacagtagtcccaccttgctagcagaagtgtttctgcctattcctgagactactgttgtcactggaagggctcctactgaagaagtggagtttagcagtaatcagcatgtgacactggaccacgagggagttggaagtggagtgcccttctcatttgaagctgatggcagtaaccagctgactctgatgacctcagggaaagtgtctcatagtgtggcatgggccattggagaaaacgggatacctttaattcctccattgtcacagcagaacatcggatttcggagtgctttgaagaaagcagatgccatctcatctattggcacatcaggactgacagacatgaaaaaattggccaagtgggcagcagagtccaagctcgacccaaatgaccccaacaatgcccctttgatgcagcttatctcggttgctaccagtggtgaatcctatgtccctgatttctttagactggagcagctgcaacaggagtttaactttgtttcagatcaagaattaaatagatccaaacgatttaggcttcttcatcttagaagccaagaggtgccagaattccgaaattataagcaagttccagtctatgaccgagaaattatggaaaaggtattccaggactatgagaaacggttacgagacagaaatgtaatagaaaccaaggaacacatagacacccatagggccatagtagccaagtacctccagcaggttagagaatcagtgataaatcgtttcttaattgcaaaacaatattttcttcttgctgatatgatagtagaagaagaagttcccaatatcagcattttgggcctaagccttttcaagctggcagaacaaaagcgaccactgcggccaaggagaaaaggtcggaagaaggtgacagcccaaaacctgtctgatggagacataaagctgctggtgaacattgtgcgagcttacgacattccagtgaggaagccggcagtgagcaaattccagcagccgtcgaggtcttcaaggatgttcagtgaaaagcatgctgcttccccaagcacgtacagcccaacccacaatgctgactaccccctcggccaggttttagtacgtccctttgtagaagtctcttttcaacgaacagtttgccatacgactacggctgaaggaccaaaccctagctggaatgaagaactagaacttccatttagggctcctaatggagattatagcacagccagtctgcagtcagtgaaagatgttgtgttcattaacatttttgatgaagtactgcatgatgtcttagaggatgaccgtgaaagaggaagtggaatccatactcgtattgagagacactggctgggatgtgtgaaaatgccatttagcacaatatatttccaagcaaggtttgagtctcaggaagatgagaaattacttcaagcaactgagaagtttcaagctgaatgtgccttaaagtttccaaatcgtcagtgccttacaacagtaattgatataagcggaaaaactgtttttatcacacgttatctcaaacctttaaaccctcctcaggagctccttaatgtctaccccaataatctacaggcaactgcagaactggtggctcgatatgtgtccttgattcccttcttgcctgacactgtctcatttggtggtatctgtgacctctggagcacatctgatcaatttcttgatctcctggcaggggatgaagaagaacatgcagtactattgtgtaattactttctgtctctgggtaagaaggcctggctgttgatgggcaatgctattcctgagggtccaactgcctatgtgctaacttgggagcaaggtcgttatttaatatggaatccctgcagtggacatttttatggacaatttgatacattctgtcccttgaaaaatgtgggctgtttaataggtcctgacaatatttggtttaatattcaacgatatgaatctccactaaggataaattttgatgtcaccaggcccaagctatggaaatctttcttttcaagaagccttccatatcctggcctttccagtgttcagcctgaagagctaatttaccagcgctcagacaaagcagctgcagctgagctacaagacaggattgaaaaaatactaaaagaaaaaatcatggactggaggccacgccatctgactcggtggaataggtattgtacctctactctgcgtcacttcttgcctctgttagaaaaaagtcaaggagaagatgtagaagatgaccacagagcagaactgctaaaacagctgggagactacaggttctctggatttcctcttcacatgccttattctgaagtgaagcctttaattgacgctgtgtatagtactggagtacataatattgatgttcctaatgttgaatttgctttagctgtatacatacacccataccccaaaaatgttttgtctgtttggatctatgttgcctctcttatacgcaacaggtaa

SEQ ID NO: 36843 - DNA, 1949 bp, Artificial Sequence
  derived and/or modified sequence
tttttgctccaagacatggctgcagcttcccagggaggagcccaggggcatctccaacactcagcctttccctccggacccttttaaaagattcaacagcaccgtctctctccacttccatcctagaatgcagaatctgcaaagtgccttttgtaaagtttcttaagggacccatcccagccaaaatgaatcccagggaagaaaaagtaaaaataattacagaggagttcattgaaaatgatgaggatgcagacatgggaagacagaataagaactcaaaggttcgaagacagccaagaaagaaacagccaccaactgctgtccccaaggaaatggtgtccgaaaaatcccaccttggcaacccccaggagcctgtgcaggaggagcccaagacccgcctcctgagtatgacagtccggagaggcccacggagcttacctccaattccttcaacttccagaacaggctttgcagaattttccatgaggggacgcatgagggagaaattgcaagcagcgaggtccaaagcagaaagtgcattgctgcaggaaatccccactcctcggcccagacgcttacgaagtcccagtaagaaagaattggagactgaatttggcacagagccagggaaagaggtagaaaggactcaacaagaagttgactcccaaagttactcaagagtcaagttccatgattctgcacgaaaaatcaagcctaaaccccaggttccacctggcttcccttctgcagaagaggcctataacttctttactttcaactttgatcccgaaccagaaggatcagaggaaaaaccaaaagcaagacatagagcgggaactaatcaagaggaggaggaaggggaagaagaagaaccacctgcacaaggaggaggaaaggaaatggatgaggaagaactgcttaatggtgatgatgccgaggacttcctattgggcttagatcacgtggctgacgattttgtagcagtcagacctgcagattatgaaagcatccatgatcggctgcagatggaaagagaaatgctcttcatacccagtaggcagacagtccctacatataaaaagcttcctgagaatgtacagcccaggttcctggaagatgaaggcctttacaccggggtaagaccagaggtggcacgcaccaatcagaacatcatggagaacagattgctgatgcaggaccccgaaagaagatggtttggagatgacggcaggatcctagctctgccaaaccccatcaagccatttccttcaaggccgccagtactaacacaggagcagagcattaaggcagagcttgaaacactgtataaaaaggctgtaaaatacgttcacagtagtcagcatgtgatcagatctggagaccctcctggaaatttccaactggacattgatatttcagggttaatcttcactcatcatccctgttttagccgagagcatgttttggcagccaagctggcccagttatatgaccagtaccttgcaagacaccagagaaacaaggcgaaatttcttactgataagctccaagctttaagaaatgctgttcagactggccttgatccagaaaaacctcatcagtctctcgataccatccaaaaaaccatcaatgagtataaatctgaaattcgacaaacaagaaaattccgtgatgctgaacaagaaaaagatagaacattgcttaagactatcataaaagtttggaaagagatgaaatcccttcgagagttccagagatttacaaatactcccttgaaacttgttttgagaaaggaaaaagctgaccagaaagcagatgaagaagcatatgaagcagaaattcaagctgaaataagtgaactgttagaagagcacacggaggagtacgcacagaagatggaagaatacagaacgtcgttacaacagtggaaggcctggaggaaagtgcaa

SEQ ID NO: 36844 - DNA, 4539 bp, Artificial Sequence
  derived and/or modified sequence
atggtgagcgagaagagccacctgggcaacccccaggagcccgtgcaggaggagcccaagaccagactgctgagcatgaccgtgagaagaggccccagaagcctgccccccatccccagcaccagcagaaccggcttcgccgagttcagcatgagaggcagaatgagagagaagctgcaggccgccagaagcaaggccgagagcgccctgctgcaggagatccccacccccagacccagaagactgagaagccccagcaagaaggagctggagaccgagttcggcaccgagcccggcaaggaggtggagagaacccagcaggaggtggacagccagagctacagcagagtgaagttccacgacagcgccagaaagatcaagcccaagccccaggtgccccccggcttccccagcgccgaggaggcctacaacttcttcaccttcaacttcgaccccgagcccgagggcagcgaggagaagcccaaggccagacacagagccggcaccaaccaggaggaggaggagggcgaggaggaggagccccccgcccagggcggcggcaaggagatggacgaggaggagctgctgaacggcgacgacgccgaggacttcctgctgggcctggaccacgtggccgacgacttcgtggccgtgagacccgccgactacgagagcatccacgacagactgcagatggagagagagatgctgttcatccccagcagacagaccgtgcccacctacaagaagctgcccgagaacgtgcagcccagattcctggaggacgagggcctgtacaccggcgtgagacccgaggtggccagaaccaaccagaacatcatggagaacagactgctgatgcaggaccccgagagaagatggttcggcgacgacggcagaatcctggccctgcccaaccccatcaagcccttccccagcagaccccccgtgctgacccaggagcagagcatcaaggccgagctggagaccctgtacaagaaggccgtgaagtacgtgcacagcagccagcacgtgatcagaagcggcgacccccccggcaacttccagctggacatcgacatcagcggcctgatcttcacccaccacccctgcttcagcagagagcacgtgctggccgccaagctggcccagctgtacgaccagtacctggccagacaccagagaaacaaggccaagttcctgaccgacaagctgcaggccctgagaaacgccgtgcagaccggcctggaccccgagaagccccaccagagcctggacaccatccagaagaccatcaacgagtacaagagcgagatcagacagaccagaaagttcagagacgccgagcaggagaaggacagaaccctgctgaagaccatcatcaaggtgtggaaggagatgaagagcctgagagagttccagagattcaccaacacccccctgaagctggtgctgagaaaggagaaggccgaccagaaggccgacgaggaggcctacgaggccgagatccaggccgagatcagcgagctgctggaggagcacaccgaggagtacgcccagaagatggaggagtacagaaccagcctgcagcagtggaaggcctggagaaaggtgcagagagccaagaagaagaagagaaagcaggccgccgaggagcaccccggcgacgagatcgccgagccctaccccgaggaggacctggtgaagcccagcccccccgagcccaccgacagagccgtgatcgagcaggaggtgagagagagagccgcccagagcagaagaagaccctgggagcccaccctggtgcccgagctgagcctggccggcagcgtgacccccaacgaccagtgccccagagccgaggtgagcagaagagaggacgtgaagaagagaagcgtgtacctgaaggtgctgttcaacaacaaggaggtgagcagaaccgtgagcagacccctgggcgccgacttcagagtgcacttcggccagatcttcaacctgcagatcgtgaactggcccgagagcctgaccctgcaggtgtacgagaccgtgggccacagcagccccaccctgctggccgaggtgttcctgcccatccccgagaccaccgtggtgaccggcagagcccccaccgaggaggtggagttcagcagcaaccagcacgtgaccctggaccacgagggcgtgggcagcggcgtgcccttcagcttcgaggccgacggcagcaaccagctgaccctgatgaccagcggcaaggtgagccacagcgtggcctgggccatcggcgagaacggcatccccctgatcccccccctgagccagcagaacatcggcttcagaagcgccctgaagaaggccgacgccatcagcagcatcggcaccagcggcctgaccgacatgaagaagctggccaagtgggccgccgagagcaagctggaccccaacgaccccaacaacgcccccctgatgcagctgatcagcgtggccaccagcggcgagagctacgtgcccgacttcttcagactggagcagctgcagcaggagttcaacttcgtgagcgaccaggagctgaacagaagcaagagattcagactgctgcacctgagaagccaggaggtgcccgagttcagaaactacaagcaggtgcccgtgtacgacagagagatcatggagaaggtgttccaggactacgagaagagactgagagacagaaacgtgatcgagaccaaggagcacatcgacacccacagagccatcgtggccaagtacctgcagcaggtgagagagagcgtgatcaacagattcctgatcgccaagcagtacttcctgctggccgacatgatcgtggaggaggaggtgcccaacatcagcatcctgggcctgagcctgttcaagctggccgagcagaagagacccctgagacccagaagaaagggcagaaagaaggtgaccgcccagaacctgagcgacggcgacatcaagctgctggtgaacatcgtgagagcctacgacatccccgtgagaaagcccgccgtgagcaagttccagcagcccagcagaagcagcagaatgttcagcgagaagcacgccgccagccccagcacctacagccccacccacaacgccgactaccccctgggccaggtgctggtgagacccttcgtggaggtgagcttccagagaaccgtgtgccacaccaccaccgccgagggccccaaccccagctggaacgaggagctggagctgcccttcagagcccccaacggcgactacagcaccgccagcctgcagagcgtgaaggacgtggtgttcatcaacatcttcgacgaggtgctgcacgacgtgctggaggacgacagagagagaggcagcggcatccacaccagaatcgagagacactggctgggctgcgtgaagatgcccttcagcaccatctacttccaggccagattcgagagccaggaggacgagaagctgctgcaggccaccgagaagttccaggccgagtgcgccctgaagttccccaacagacagtgcctgaccaccgtgatcgacatcagcggcaagaccgtgttcatcaccagatacctgaagcccctgaaccccccccaggagctgctgaacgtgtaccccaacaacctgcaggccaccgccgagctggtggccagatacgtgagcctgatccccttcctgcccgacaccgtgagcttcggcggcatctgcgacctgtggagcaccagcgaccagttcctggacctgctggccggcgacgaggaggagcacgccgtgctgctgtgcaactacttcctgagcctgggcaagaaggcctggctgctgatgggcaacgccatccccgagggccccaccgcctacgtgctgacctgggagcagggcagatacctgatctggaacccctgcagcggccacttctacggccagttcgacaccttctgccccctgaagaacgtgggctgcctgatcggccccgacaacatctggttcaacatccagagatacgagagccccctgagaatcaacttcgacgtgaccagacccaagctgtggaagagcttcttcagcagaagcctgccctaccccggcctgagcagcgtgcagcccgaggagctgatctaccagagaagcgacaaggccgccgccgccgagctgcaggacagaatcgagaagatcctgaaggagaagatcatggactggagacccagacacctgaccagatggaacagatactgcaccagcaccctgagacacttcctgcccctgctggagaagagccagggcgaggacgtggaggacgaccacagagccgagctgctgaagcagctgggcgactacagattcagcggcttccccctgcacatgccctacagcgaggtgaagcccctgatcgacgccgtgtacagcaccggcgtgcacaacatcgacgtgcccaacgtggagttcgccctggccgtgtacatccacccctaccccaagaacgtgctgagcgtgtggatctacgtggccagcctgatcagaaacagatag

SEQ ID NO: 36845 - DNA, 4863 bp, Artificial Sequence
  derived and/or modified sequence
atgaaccccagagaggagaaggtgaagatcatcaccgaggagttcatcgagaacgacgaggacgccgacatgggcagacagaacaagaacagcaaggtgagaagacagcccagaaagaagcagccccccaccgccgtgcccaaggagatggtgagcgagaagagccacctgggcaacccccaggagcccgtgcaggaggagcccaagaccagactgctgagcatgaccgtgagaagaggccccagaagcctgccccccatccccagcaccagcagaaccggcttcgccgagttcagcatgagaggcagaatgagagagaagctgcaggccgccagaagcaaggccgagagcgccctgctgcaggagatccccacccccagacccagaagactgagaagccccagcaagaaggagctggagaccgagttcggcaccgagcccggcaaggaggtggagagaacccagcaggaggtggacagccagagctacagcagagtgaagttccacgacagcgccagaaagatcaagcccaagccccaggtgccccccggcttccccagcgccgaggaggcctacaacttcttcaccttcaacttcgaccccgagcccgagggcagcgaggagaagcccaaggccagacacagagccggcaccaaccaggaggaggaggagggcgaggaggaggagccccccgcccagggcggcggcaaggagatggacgaggaggagctgctgaacggcgacgacgccgaggacttcctgctgggcctggaccacgtggccgacgacttcgtggccgtgagacccgccgactacgagagcatccacgacagactgcagatggagagagagatgctgttcatccccagcagacagaccgtgcccacctacaagaagctgcccgagaacgtgcagcccagattcctggaggacgagggcctgtacaccggcgtgagacccgaggtggccagaaccaaccagaacatcatggagaacagactgctgatgcaggaccccgagagaagatggttcggcgacgacggcagaatcctggccctgcccaaccccatcaagcccttccccagcagaccccccgtgctgacccaggagcagagcatcaaggccgagctggagaccctgtacaagaaggccgtgaagtacgtgcacagcagccagcacgtgatcagaagcggcgacccccccggcaacttccagctggacatcgacatcagcggcctgatcttcacccaccacccctgcttcagcagagagcacgtgctggccgccaagctggcccagctgtacgaccagtacctggccagacaccagagaaacaaggccaagttcctgaccgacaagctgcaggccctgagaaacgccgtgcagaccggcctggaccccgagaagccccaccagagcctggacaccatccagaagaccatcaacgagtacaagagcgagatcagacagaccagaaagttcagagacgccgagcaggagaaggacagaaccctgctgaagaccatcatcaaggtgtggaaggagatgaagagcctgagagagttccagagattcaccaacacccccctgaagctggtgctgagaaaggagaaggccgaccagaaggccgacgaggaggcctacgaggccgagatccaggccgagatcagcgagctgctggaggagcacaccgaggagtacgcccagaagatggaggagtacagaaccagcctgcagcagtggaaggcctggagaaaggtgcagagagccaagaagaagaagagaaagcaggccgccgaggagcaccccggcgacgagatcgccgagccctaccccgaggaggacctggtgaagcccagcccccccgagcccaccgacagagccgtgatcgagcaggaggtgagagagagagccgcccagagcagaagaagaccctgggagcccaccctggtgcccgagctgagcctggccggcagcgtgacccccaacgaccagtgccccagagccgaggtgagcagaagagaggacgtgaagaagagaagcgtgtacctgaaggtgctgttcaacaacaaggaggtgagcagaaccgtgagcagacccctgggcgccgacttcagagtgcacttcggccagatcttcaacctgcagatcgtgaactggcccgagagcctgaccctgcaggtgtacgagaccgtgggccacagcagccccaccctgctggccgaggtgttcctgcccatccccgagaccaccgtggtgaccggcagagcccccaccgaggaggtggagttcagcagcaaccagcacgtgaccctggaccacgagggcgtgggcagcggcgtgcccttcagcttcgaggccgacggcagcaaccagctgaccctgatgaccagcggcaaggtgagccacagcgtggcctgggccatcggcgagaacggcatccccctgatcccccccctgagccagcagaacatcggcttcagaagcgccctgaagaaggccgacgccatcagcagcatcggcaccagcggcctgaccgacatgaagaagctggccaagtgggccgccgagagcaagctggaccccaacgaccccaacaacgcccccctgatgcagctgatcagcgtggccaccagcggcgagagctacgtgcccgacttcttcagactggagcagctgcagcaggagttcaacttcgtgagcgaccaggagctgaacagaagcaagagattcagactgctgcacctgagaagccaggaggtgcccgagttcagaaactacaagcaggtgcccgtgtacgacagagagatcatggagaaggtgttccaggactacgagaagagactgagagacagaaacgtgatcgagaccaaggagcacatcgacacccacagagccatcgtggccaagtacctgcagcaggtgagagagagcgtgatcaacagattcctgatcgccaagcagtacttcctgctggccgacatgatcgtggaggaggaggtgcccaacatcagcatcctgggcctgagcctgttcaagctggccgagcagaagagacccctgagacccagaagaaagggcagaaagaaggtgaccgcccagaacctgagcgacggcgacatcaagctgctggtgaacatcgtgagagcctacgacatccccgtgagaaagcccgccgtgagcaagttccagcagcccagcagaagcagcagaatgttcagcgagaagcacgccgccagccccagcacctacagccccacccacaacgccgactaccccctgggccaggtgctggtgagacccttcgtggaggtgagcttccagagaaccgtgtgccacaccaccaccgccgagggccccaaccccagctggaacgaggagctggagctgcccttcagagcccccaacggcgactacagcaccgccagcctgcagagcgtgaaggacgtggtgttcatcaacatcttcgacgaggtgctgcacgacgtgctggaggacgacagagagagaggcagcggcatccacaccagaatcgagagacactggctgggctgcgtgaagatgcccttcagcaccatctacttccaggccagaatcgacggcaccttcaagatcgacatcccccccgtgctgctgggctacagcaaggagagaaacatgatcctggagagaggcttcgacagcgtgagaagcctgagcgagggcagctacatcaccctgttcatcaccatcgagccccagctggtgcccggcgagagcatcagagagaagttcgagagccaggaggacgagaagctgctgcaggccaccgagaagttccaggccgagtgcgccctgaagttccccaacagacagtgcctgaccaccgtgatcgacatcagcggcaagaccgtgttcatcaccagatacctgaagcccctgaaccccccccaggagctgctgaacgtgtaccccaacaacctgcaggccaccgccgagctggtggccagatacgtgagcctgatccccttcctgcccgacaccgtgagcttcggcggcatctgcgacctgtggagcaccagcgaccagttcctggacctgctggccggcgacgaggaggagcacgccgtgctgctgtgcaactacttcctgagcctgggcaagaaggcctggctgctgatgggcaacgccatccccgagggccccaccgcctacgtgctgacctgggagcagggcagatacctgatctggaacccctgcagcggccacttctacggccagttcgacaccttctgccccctgaagaacgtgggctgcctgatcggccccgacaacatctggttcaacatccagagatacgagagccccctgagaatcaacttcgacgtgaccagacccaagctgtggaagagcttcttcagcagaagcctgccctaccccggcctgagcagcgtgcagcccgaggagctgatctaccagagaagcgacaaggccgccgccgccgagctgcaggacagaatcgagaagatcctgaaggagaagatcatggactggagacccagacacctgaccagatggaacagatactgcaccagcaccctgagacacttcctgcccctgctggagaagagccagggcgaggacgtggaggacgaccacagagccgagctgctgaagcagctgggcgactacagattcagcggcttccccctgcacatgccctacagcgaggtgaagcccctgatcgacgccgtgtacagcaccggcgtgcacaacatcgacgtgcccaacgtggagttcgccctggccgtgtacatccacccctaccccaagaacgtgctgagcgtgtggatctacgtggccagcctgatcagaaacagatag

SEQ ID NO: 36846 - DNA, 1767 bp, Artificial Sequence
  derived and/or modified sequence
atgaaccccagagaggagaaggtgaagatcatcaccgaggagttcatcgagaacgacgaggacgccgacatgggcagacagaacaagaacagcaaggtgagaagacagcccagaaagaagcagccccccaccgccgtgcccaaggagatggtgagcgagaagagccacctgggcaacccccaggagcccgtgcaggaggagcccaagaccagactgctgagcatgaccgtgagaagaggccccagaagcctgccccccatccccagcaccagcagaaccggcttcgccgagttcagcatgagaggcagaatgagagagaagctgcaggccgccagaagcaaggccgagagcgccctgctgcaggagatccccacccccagacccagaagactgagaagccccagcaagaaggagctggagaccgagttcggcaccgagcccggcaaggaggtggagagaacccagcaggaggtggacagccagagctacagcagagtgaagttccacgacagcgccagaaagatcaagcccaagccccaggtgccccccggcttccccagcgccgaggaggcctacaacttcttcaccttcaacttcgaccccgagcccgagggcagcgaggagaagcccaaggccagacacagagccggcaccaaccaggaggaggaggagggcgaggaggaggagccccccgcccagggcggcggcaaggagatggacgaggaggagctgctgaacggcgacgacgccgaggacttcctgctgggcctggaccacgtggccgacgacttcgtggccgtgagacccgccgactacgagagcatccacgacagactgcagatggagagagagatgctgttcatccccagcagacagaccgtgcccacctacaagaagctgcccgagaacgtgcagcccagattcctggaggacgagggcctgtacaccggcgtgagacccgaggtggccagaaccaaccagaacatcatggagaacagactgctgatgcaggaccccgagagaagatggttcggcgacgacggcagaatcctggccctgcccaaccccatcaagcccttccccagcagaccccccgtgctgacccaggagcagagcatcaaggccgagctggagaccctgtacaagaaggccgtgaagtacgtgcacagcagccagcacgtgatcagaagcggcgacccccccggcaacttccagctggacatcgacatcagcggcctgatcttcacccaccacccctgcttcagcagagagcacgtgctggccgccaagctggcccagctgtacgaccagtacctggccagacaccagagaaacaaggccaagttcctgaccgacaagctgcaggccctgagaaacgccgtgcagaccggcctggaccccgagaagccccaccagagcctggacaccatccagaagaccatcaacgagtacaagagcgagatcagacagaccagaaagttcagagacgccgagcaggagaaggacagaaccctgctgaagaccatcatcaaggtgtggaaggagatgaagagcctgagagagttccagagattcaccaacacccccctgaagctggtgctgagaaaggagaaggccgaccagaaggccgacgaggaggcctacgaggccgagatccaggccgagatcagcgagctgctggaggagcacaccgaggagtacgcccagaagatggaggagtacagaaccagcctgcagcagtggaaggcctggagaaaggtgcagtag

SEQ ID NO: 36847 - protein, 132 aa, Artificial Sequence
  derived and/or modified sequence
MVEPFLGTWKLVSSENFEDYMKELGVNFAARNMAGLVKPTVTISVDGKMMTIRTESSFQDTKISFKLGEEFDETTADNRKVKSTITLENGSMIHVQKWLGKETTIKRKIVDEKMVVECKMNNIVSTRIYEKV

SEQ ID NO: 36848 - DNA, 399 bp, Artificial Sequence
  derived and/or modified sequence
atggtggagcccttcctgggcacctggaagctggtgagcagcgagaacttcgaggactacatgaaggagctgggcgtgaacttcgccgccagaaacatggccggcctggtgaagcccaccgtgaccatcagcgtggacggcaagatgatgaccatcagaaccgagagcagcttccaggacaccaagatcagcttcaagctgggcgaggagttcgacgagaccaccgccgacaacagaaaggtgaagagcaccatcaccctggagaacggcagcatgatccacgtgcagaagtggctgggcaaggagaccaccatcaagagaaagatcgtggacgagaagatggtggtggagtgcaagatgaacaacatcgtgagcaccagaatctacgagaaggtgtag

SEQ ID NO: 36849 - DNA, 399 bp, Artificial Sequence
  derived and/or modified sequence
atggtagagcctttcctggggacttggaaacttgtttcatcggaaaatttcgaggattatatgaaggagctgggcgtcaatttcgccgcacgcaatatggcaggcctagtaaagccaaccgtgacgatctcggtagatgggaagatgatgacaattcgaactgagtctagcttccaggatactaaaatttccttcaagttgggggaagaatttgatgaaaccactgccgacaaccgaaaggtgaaatcaacgattactctcgagaatgggtctatgattcacgtccaaaagtggttgggcaaagaaactaccatcaagcgcaagatagtggatgagaaaatggtggtggagtgcaaaatgaacaatatagtgtccacaaggatctatgagaaagtgtag

SEQ ID NO: 36850 - DNA, 399 bp, Artificial Sequence
  derived and/or modified sequence
atggtggagcccttcctgggcacctggaagctggtgtccagtgaaaattttgaggactacatgaaggagctgggcgtgaactttgctgccaggaacatggccggcctggtgaagcccaccgtgaccatctctgtggatggcaagatgatgaccatcagaacagagagcagcttccaggacaccaagatctccttcaagctgggggaggagtttgatgagaccacagctgacaacaggaaggtgaagagcaccatcaccctggagaatggctccatgatccacgtgcagaagtggctgggcaaggagaccaccatcaagaggaagatcgtggatgagaagatggtggtggagtgcaagatgaacaacatcgtgtccacccgcatctatgagaaggtgtag

SEQ ID NO: 36851 - DNA, 497 bp, Artificial Sequence
  derived and/or modified sequence
gcctatatttctttggttttcaattacgagtggctcttctcagcaagtgttccatgatggttgagcccttcttgggaacctggaagctggtctccagtgaaaactttgaggattacatgaaagaactgggagtgaatttcgcagcccggaacatggcagggttagtgaaaccgacagtaactattagtgttgatgggaaaatgatgaccataagaacagaaagttctttccaggacactaagatctccttcaagctgggggaagaatttgatgaaactacagcagacaaccggaaagtaaagagcaccataacattagagaatggctcaatgattcacgtccaaaaatggcttggcaaagagacaacaatcaaaagaaaaattgtggatgaaaaaatggtagtggaatgtaaaatgaataatattgtcagcaccagaatctacgaaaaggtgtgaagaaaggtccacagcaatgaaaacttgttcactgacaaggaa

SEQ ID NO: 36852 - DNA, 399 bp, Artificial Sequence
  derived and/or modified sequence
atggtggagcccttcctgggcacctggaagctggtgagcagcgagaatttcgaagactacatgaaagaattgggagtgaactttgcagcccgcaatatggccggcctcgtcaaaccaaccgtgactatatctgtcgacggaaaaatgatgaccattcggacagagtccagcttccaggacacgaaaattagcttcaaactaggcgaggagttcgatgaaacaacagccgacaacagaaaggtgaagtccactataacacttgagaatggtagtatgatccacgtgcaaaaatggcttggcaaggagacgactatcaaacggaagatcgttgatgagaagatggttgtcgagtgcaagatgaacaacattgtttccacacgtatctatgaaaaagtctag

SEQ ID NO: 36853 - DNA, 399 bp, Artificial Sequence
  derived and/or modified sequence
atggtggaacctttcctggggacctggaaattagtgtcctcagagaattttgaagactatatgaaggagttaggagtcaactttgctgccagaaatatggctgggctagtcaagccaactgtgactatttccgtcgatggaaagatgatgaccatcaggacagaatcatcattccaggacactaagatatcgttcaaactcggcgaggagttcgacgaaactacagcggacaaccgcaaggtcaagtctacgattacattggaaaacggatccatgatccatgtccaaaagtggctcggaaaagagacgaccattaagcgaaagatcgttgacgagaaaatggtcgtcgagtgcaagatgaacaatatcgtgagcacgagaatatatgaaaaggtttag

SEQ ID NO: 36854 - protein, 961 aa, Artificial Sequence
  derived and/or modified sequence
MKYLLNFIGQGPATYGPFCAERLRRTYANGVRAEPPTWLELQAVKSKKHIPIQVILATGESLTVPVDSASTSREMCMHIAHKQGLSDHLGFSLQVAVYDKFWSLGSGRDHMMDAIARCEQMAQERGESQRQSPWRIYFRKEFFTPWHDSREDPVSTELIYRQVLRGVWSGEYSFEKEEELVELLARHCYVQLGASAESKAVQELLPSCIPHKLYRTKPPDRWASLVTAACAKAPYTQKQVTPLAVREQVVDAARLQWPLLFSRLFEVITLSAFTLPSLLARPPPAQDAGPAGEDAAGTLFPRGHGSGHQQVRALREDLFLHTEPHPPAPGRTAHEVLHWGITRCTGSFSLKPRSTRKGQGSVQPLAGTYLEGSFLCHGRELVAWRVQVVWEGDKGQCLAGADPHSHGSPWISLTGNFSMPFGKSTQQSGTCISGLCQVYSGHHSPLATSPRSTDSITHSADERMSKLKHAEVRWLRVSTWQSRQLISALTFAVSLRCHCTPATSLSAHSQPHTWAAPLSASERPTVVSGLVLALAEQLCVLIRWRGLLVTLSFISREAQGGQRLLLSTMHEEYEFVSPSSVAIAELVALFLEGLKERSIFAMALQDRKATDDTTLLAFKKGDLLVLTKKQGLLASENWTLGQNDRTGKTGLVPMACLYTIPTVTKPSAQLLSLLAMSPEKRKLAAQEGQFTEPRPEEPPKEKLHTLEEFSYEFFRAPEKDMVSMAVLPLARARGHLWAYSCEPLRQPLLKRVHANVDLWDIACQIFATPILRYMGDYPSRQAWPTLELTDQIFTLALQHPALQDEVYCQILKQLTHNSNRHSEERGWQLLWLCTGLFPPSKGLLPHAQKFIDTRRGKLLAPDCSRRIQKVLRTGPRKQPPHQVEVEAAEQNVSRICHKIYFPNDTSEMLEVVANTRVRDVCDSIATRLQLASWEGCSLFIKISDKVISQKEGDFFFDSLRE

SEQ ID NO: 36855 - protein, 2117 aa, Artificial Sequence
  derived and/or modified sequence
MSGFRLGDHVWLEPPSTHKTGVAIGGIIKEAKPGKVLVEDDEGKEHWIRAEDFGVLSPMHPNSVQGVDDMIRLGDLNEAGMVHNLLIRYQQHKIYTYTGSILVAVNPFQVLPLYTLEQVQLYYSRHMGELPPHVFAIANNCYFSMKRNKRDQCCIISGESGAGKTETTKLILQFLATISGQHSWIEQQVLEANPILEAFGNAKTIRNDNSSRFGKYIDIYFNPSGVIEGARIEQFLLEKSRVCRQAPEERNYHIFYCMLMGVSAEDKQLLSLGTPSEYHYLTMGNCTSCEGLNDAKDYAHIRSAMKILQFSDSESWDVIKLLAAILHLGNVGFMASVFENLDASDVMETPAFPTVMKLLEVQHQELRDCLIKHTILIRGEFVTRSLNIAQAADRRDAFVKGIYGHLFLWIVKKINAAIFTPPAQDPKNVRRAIGLLDIFGFENFENNSFEQLCINFANEHLQQFFVQHVFTMEQEEYRSENISWDYIHYTDNRPTLDLLALKPMSIISLLDEESRFPQGTDLTMLQKLNSVHANNKAFLQPKNIHDARFGIAHFAGEVYYQAEGFLEKNRDVLSTDILTLVYSSKNKFLREIFNLELAETKLGHGTIRQAKAGNHLFKSADSNKRPSTLGSQFKQSLDQLMKILTNCQPYFIRCIKPNEYKKPLLFDRELCLRQLRYSGMMETVHIRKSGFPIRYTFEEFSQRFGVLLPNAMRMQLQGKLRQMTLGITDVWLRTDKDWKAGKTKIFLRDHQDTLLEVQRSQVLDRAALSIQKVLRGYRYRKEFLRQRRAAVTLQAWWRGYCNRRNFKLILVGFERLQAIARSQPLARQYQAMRQRTVQLQALCRGYLVRQQVQAKRRAVVVIQAHARGMAARRNFQQRKANAPLVIPAEGQKSQGALPAKKRRSIYDTVTDTEMVEKVFGFLPAMIGGQEGQASPHFEDLESKTQKLLEVDLDTVPMAEEPEEDVDGLAEYTFPKFAVTYFQKSASHTHIRRPLRYPLLYHEDDTDCLAALVIWNVILRFMGDLPEPVLYARSSQQGSSVMRQIHDTLGREHGAQVPQHSRSAQVASQLNIGEEALEPDGLGADRPMSNLEKVHFIVGYAILRPSLRDEIYCQICKQLSENFKTSSLARGWILLSLCLGCFPPSERFMKYLLNFIGQGPATYGPFCAERLRRTYANGVRAEPPTWLELQAVKSKKHIPIQVILATGESLTVPVDSASTSREMCMHIAHKQGLSDHLGFSLQVAVYDKFWSLGSGRDHMMDAIARCEQMAQERGESQRQSPWRIYFRKEFFTPWHDSREDPVSTELIYRQVLRGVWSGEYSFEKEEELVELLARHCYVQLGASAESKAVQELLPSCIPHKLYRTKPPDRWASLVTAACAKAPYTQKQVTPLAVREQVVDAARLQWPLLFSRLFEVITLSGPRLPKTQLILAVNWKGLCFLDQQEKMLLELSFPEVMGLATNREAQGGQRLLLSTMHEEYEFVSPSSVAIAELVALFLEGLKERSIFAMALQDRKATDDTTLLAFKKGDLLVLTKKQGLLASENWTLGQNDRTGKTGLVPMACLYTIPTVTKPSAQLLSLLAMSPEKRKLAAQEGQFTEPRPEEPPKEKLHTLEEFSYEFFRAPEKDMVSMAVLPLARARGHLWAYSCEPLRQPLLKRVHANVDLWDIACQIFATPILRYMGDYPSRQAWPTLELTDQIFTLALQHPALQDEVYCQILKQLTHNSNRHSEERGWQLLWLCTGLFPPSKGLLPHAQKFIDTRRGKLLAPDCSRRIQKVLRTGPRKQPPHQVEVEAAEQNVSRICHKIYFPNDTSEMLEVVANTRVRDVCDSIATRLQLASWEGCSLFIKISDKVISQKEGDFFFDSLREVSDWVKKNKPQKEGAPVTLPYQVYFMRKLWLNISPGKDVNADTILHYHQELPKYLRGFHKCSREDAIHLAGLIYKAQFNNDRSQLASVPKILRELVPENLTRLMSSEEWKKSILLAYDKHKDKTVEEAKVAFLKWICRWPTFGSAFFEVKQTSEPSYPDVILIAINRHGVLLIHPKTKDLLTTYPFTKISSWSSGSTYFHMALGSLGRGSRLLCETSLGYKMDDLLTSYVQQLLSAMNKQRGSKAPALAST

SEQ ID NO: 36856 - protein, 2116 aa, Artificial Sequence
  derived and/or modified sequence
MSGFRLGDHVWLEPPSTHKTGVAIGGIIKEAKPGKVLVEDDEGKEHWIRAEDFGVLSPMHPNSVQGVDDMIRLGDLNEAGMVHNLLIRYQQHKIYTYTGSILVAVNPFQVLPLYTLEQVQLYYSRHMGELPPHVFAIANNCYFSMKRNKRDQCCIISGESGAGKTETTKLILQFLATISGQHSWIEQQVLEANPILEAFGNAKTIRNDNSSRFGKYIDIYFNPSGVIEGARIEQFLLEKSRVCRQAPEERNYHIFYCMLMGVSAEDKQLLSLGTPSEYHYLTMGNCTSCEGLNDAKDYAHIRSAMKILQFSDSESWDVIKLLAAILHLGNVGFMASVFENLDASDVMETPAFPTVMKLLEVQHQELRDCLIKHTILIRGEFVTRSLNIAQAADRRDAFVKGIYGHLFLWIVKKINAAIFTPPAQDPKNVRRAIGLLDIFGFENFENNSFEQLCINFANEHLQQFFVQHVFTMEQEEYRSENISWDYIHYTDNRPTLDLLALKPMSIISLLDEESRFPQGTDLTMLQKLNSVHANNKAFLQPKNIHDARFGIAHFAGEVYYQAEGFLEKNRDVLSTDILTLVYSSKNKFLREIFNLELAETKLGHGTIRQAKAGNHLFKSADSNKRPSTLGSQFKQSLDQLMKILTNCQPYFIRCIKPNEYKKPLLFDRELCLRQLRYSGMMETVHIRKSGFPIRYTFEEFSQRFGVLLPNAMRMQLQGKLRQMTLGITDVWLRTDKDWKAGKTKIFLRDHQDTLLEVQRSQVLDRAALSIQKVLRGYRYRKEFLRQRRAAVTLQAWWRGYCNRRNFKLILVGFERLQAIARSQPLARQYQAMRQRTVQLQALCRGYLVRQQVQAKRRAVVVIQAHARGMAARRNFQQRKANAPLVIPAEGQKSQGALPAKKRRSIYDTVTDTEMVEKVFGFLPAMIGGQEGQASPHFEDLESKTQKLLEVDLDTVPMAEEPEEDVDGLAEYTFPKFAVTYFQKSASHTHIRRPLRYPLLYHEDDTDCLAALVIWNVILRFMGDLPEPVLYARSSQQGSSVMRQIHDTLGREHGAQVPQHSRSAQVASQLNIGEEALEPDGLGADRPMSNLEKVHFIVGYAILRPSLRDEIYCQICKQLSENFKTSSLARGWILLSLCLGCFPPSERFMKYLLNFIGQGPATYGPFCAERLRRTYANGVRAEPPTWLELQAVKSKKHIPIQVILATGESLTVPVDSASTSREMCMHIAHKQGLSDHLGFSLQVAVYDKFWSLGSGRDHMMDAIARCEQMAQERGESQRQSPWRIYFRKEFFTPWHDSREDPVSTELIYRQVLRGVWSGEYSFEKEEELVELLARHCYVQLGASAESKAVQELLPSCIPHKLYRTKPPDRWASLVTAACAKAPYTQKQVTPLAVREQVVDAARLQWPLLFSRLFEVITLSGPRLPKTQLILAVNWKGLCFLDQQEKMLLELSFPEVMGLATNREAQGGQRLLLSTMHEEYEFVSPSSVAIAELVALFLEGLKERSIFAMALQDRKATDDTTLLAFKKGDLLVLTKKQGLLASENWTLGQNDRTGKTGLVPMACLYTIPTVTKPSAQLLSLLAMSPEKRKLAAQEGQFTEPRPEEPPKEKLHTLEEFSYEFFRAPEKDMVSMAVLPLARARGHLWAYSCEPLRQPLLKRVHANVDLWDIACQIFVAILRYMGDYPSRQAWPTLELTDQIFTLALQHPALQDEVYCQILKQLTHNSNRHSEERGWQLLWLCTGLFPPSKGLLPHAQKFIDTRRGKLLAPDCSRRIQKVLRTGPRKQPPHQVEVEAAEQNVSRICHKIYFPNDTSEMLEVVANTRVRDVCDSIATRLQLASWEGCSLFIKISDKVISQKEGDFFFDSLREVSDWVKKNKPQKEGAPVTLPYQVYFMRKLWLNISPGKDVNADTILHYHQELPKYLRGFHKCSREDAIHLAGLIYKAQFNNDRSQLASVPKILRELVPENLTRLMSSEEWKKSILLAYDKHKDKTVEEAKVAFLKWICRWPTFGSAFFEVKQTSEPSYPDVILIAINRHGVLLIHPKTKDLLTTYPFTKISSWSSGSTYFHMALGSLGRGSRLLCETSLGYKMDDLLTSYVQQLLSAMNKQRGSKAPALAST

SEQ ID NO: 36857 - DNA, 2886 bp, Artificial Sequence
  derived and/or modified sequence
atgaagtatctgctgaatttcattggccagggacctgccacatatggtcccttctgcgctgagcggcttagacgaacctatgctaacggagtgcgagccgaaccccccacatggcttgagctacaggctgtcaagtcaaagaagcacattcccattcaggtgattcttgcaaccggagaaagccttactgtgcctgtggattctgcaagtacctccagagagatgtgcatgcacatagcccacaagcagggtctgagcgaccacctcggcttctcccttcaagtggcagtttacgacaagttctggtccttaggctcaggcagagaccacatgatggacgcaatagcacgctgcgagcaaatggcgcaggagcgcggggaatcccaacgccagtccccctggcggatctactttaggaaagagttctttactccttggcacgatagcagagaggatcccgtgtccacggagctgatttataggcaggtgttacgaggtgtttggtccggggaatatagttttgagaaagaggaagaactggtagagctgctcgcccgccactgttatgtacagctgggcgcgtccgccgaatctaaagctgtgcaggaacttctaccctcatgtattccgcacaaattataccggaccaagcctcctgacaggtgggcaagccttgtcactgccgcctgtgcaaaggctccctacacacagaagcaggttacccctttagctgtgcgggagcaagtggtggatgcggcccgactgcaatggccattattgttcagtcgtttgttcgaggtgataaccttatccgcttttactctgccttccctgctcgctaggcctccgccggctcaagatgccggaccagccggtgaagacgctgcagggactctgttcccacgaggccacggaagcggccaccagcaggtccgcgccttaagggaagatcttttccttcacactgagccccatcccccggcccctggccggacggcacacgaggttctgcattggggaattactcgatgtacagggtcattctctctgaagcctcgtagtaccaggaaaggtcagggcagtgtgcagccactagcaggcacatatctggaagggtccttcctgtgccacgggcgcgaactggttgcatggagggttcaggtagtgtgggaaggagacaagggacagtgccttgccggagcagatccccatagccacggaagcccttggatctccctgaccggaaatttcagcatgcccttcgggaaaagcactcaacagtcaggaacgtgtatctcgggcctctgtcaggtctattcaggacaccattcgccacttgcaacctcccctagatcaaccgatagtattacccacagtgccgacgagagaatgagcaaactgaaacacgccgaggtcaggtggctgcgtgtctccacctggcaaagtcggcagctgatatccgcgctgactttcgcagtaagcctgcggtgccactgcacgccggccacatcattatccgctcactcacaaccacacacttgggcggcccctctgtccgcatctgagcggccaacagtggtcagcggcctcgtcctcgcccttgctgagcagctgtgcgtgctgattcgatggaggggcctcctcgtaaccttgagtttcatcagccgagaggcgcagggaggtcagaggttactactgtccaccatgcatgaggaatacgagtttgtgtcgccaagcagcgtggccatcgcagagttggtagccctgtttctcgaaggactcaaggaacgtagtatcttcgctatggcactacaggaccggaaagctacagatgacacaacattactggcctttaagaaaggggatctcttggtgcttacaaagaagcaaggactgctggcttcagaaaattggacactgggacagaatgatagaacaggcaaaaccggcttggtccctatggcgtgtctttacacaatccctactgtcacaaagccttccgctcagcttctgagcctgcttgcaatgtccccagagaaacgaaagcttgcagcacaggagggccagtttacggagccccggcctgaagagcccccgaaagaaaagcttcacactttagaagagttctcctacgagttctttcgggcacccgaaaaagacatggtgtccatggcggttttgcccctcgccagggcccggggccacctctgggcatactcgtgtgagccactgcggcagcctctccttaagcgagtgcacgccaatgtagacctttgggatatcgcttgccaaatcttcgccacccccatcctgagatatatgggggactaccccagcaggcaagcctggccaaccctcgagttaacggaccaaattttcacacttgccttgcagcaccccgcactccaagatgaagtctattgtcagattctgaaacagctcactcacaactctaataggcatagtgaggagagagggtggcagctgttgtggctgtgcactggattgtttccgcctagtaagggactcttaccacacgcccagaaatttatcgacacccgtagggggaagctgctggccccagactgcagccgccggattcagaaggttttaaggacaggcccacgaaagcagcctcctcaccaggtggaagtggaggcggccgagcaaaacgtcagtaggatctgccacaaaatttactttcccaacgacactagtgagatgctggaggtggtggccaatacgcgagttagggacgtctgtgattccatcgccaccagactccagttggcatcatgggagggatgtagtctgttcatcaaaatatcagacaaggtgatatctcagaaagaaggggacttttttttcgactcactcagagaatag

SEQ ID NO: 36858 - DNA, 6354 bp, Artificial Sequence
  derived and/or modified sequence
atgagcggcttccgattaggcgaccatgtatggctggaacctccgagcactcacaagactggcgtggctattgggggcattatcaaggaagccaaaccaggtaaggtcttagtggaggacgacgaagggaaggaacattggatccgagctgaggacttcggagtgctatcaccgatgcaccccaacagcgtccaaggcgtggatgatatgattaggctgggtgaccttaatgaggcaggcatggttcacaatctccttattcgatatcagcagcacaagatctacacctacacagggtcaattcttgtggccgtaaacccttttcaggtactgccgctgtatactctggagcaggtccaactctactatagccgtcacatgggagagttgcctccgcacgtcttcgcaattgccaacaactgctacttcagcatgaaacgcaacaaacgcgaccaatgttgtattatttcaggagagtccggcgccggcaaaactgaaacaactaagttgattctgcagtttctggcgactatcagcgggcagcacagttggattgaacagcaggttttagaagccaaccctattcttgaggctttcgggaatgcaaaaaccatccgcaatgacaacagttcacggttcggtaagtatatagatatttacttcaatccctcaggggtcattgagggtgcccgcatcgagcagttcctgctggagaaatctcgggtgtgcagacaagctccggaggaaaggaactatcacatcttctattgcatgttgatgggagtgagcgcagaggataagcagctgctgtccctgggtacaccctctgagtatcattatcttactatgggcaattgcaccagctgtgagggtttaaacgacgcaaaagattatgcccacatcagatcagcaatgaaaatcctgcagttctcggatagcgaatcctgggatgtgatcaagctcctcgcggccattctgcacctcggaaacgttggatttatggcctccgtgtttgagaatctggacgcctccgacgtgatggaaactcctgcgttccccactgtaatgaagctgttggaggtccagcatcaggagttaagagattgcctgatcaaacatacaattttgataagaggagaattcgtgacccggagcctcaatattgcccaggctgcagatcggcgagatgccttcgtcaaggggatttacggccatctgtttctgtggattgtcaagaagattaatgcggccattttcacacctcccgcccaagacccaaagaacgttcgacgagccatcggactgctcgacatctttgggtttgaaaacttcgagaataactctttcgaacagttgtgtataaactttgctaacgaacacctgcagcaattctttgtccagcacgtgtttaccatggaacaggaggagtaccgctccgaaaatatctcttgggactacattcattacaccgataataggcctactctagatctgctggctctgaagcctatgtccataatctctctgttagatgaggaaagccggtttccacagggtactgatcttaccatgctgcagaagttgaacagcgtccatgccaataataaggcatttcttcagccaaaaaacatacatgacgccaggttcggcatcgcgcattttgctggcgaggtttattaccaagctgaagggttcctagagaaaaatagagatgtgctgtcgaccgacatcctcactctggtttacagctccaagaacaagttcctcagagagattttcaatctggagctggcggagacaaagctaggtcatggcactattcggcaggccaaggccggaaaccatctgttcaaaagtgcagactctaataaaaggccctccacactgggctcgcagttcaaacagagcctggatcaattgatgaagattctcacaaactgccagccctatttcatacgctgcatcaagcccaatgaatataagaagccactgttatttgatcgcgaactgtgtctcaggcagcttagatacagtggcatgatggaaactgtgcacatacgtaagtccggattcccaatacggtatacttttgaggaattttcccagagatttggagtgttactgccgaacgccatgagaatgcagctgcagggtaaactgaggcagatgaccctgggtatcaccgatgtttggctgcggacagataaggactggaaagcgggtaagacgaaaattttcctgagggaccaccaagatactctcctggaggtgcagcgttctcaggtgctcgaccgggcagcgttaagtattcagaaggtgctgcgagggtatcgctacaggaaggaattcttgaggcagagacgggcagctgtgactctccaggcctggtggcgcggctactgtaataggcgcaacttcaagctgatcttagtgggcttcgaacgattacaggctattgccaggagccagcccctggctcgccagtatcaagctatgcgacagcggaccgtgcagctgcaggctctgtgtagaggctacctggttcgtcagcaggtgcaggccaaaaggagagctgtagtggtcatccaggcacatgctaggggcatggcggcaaggcgaaatttccaacagcggaaggccaatgcacccctagtgatcccggctgaggggcaaaaatcgcagggagcactgcctgcaaaaaagcgcagatctatttatgacacagtgacagatacagagatggttgagaaggtattcgggtttctgcccgccatgatagggggacaagaaggacaggcctcacctcacttcgaagacctggagtccaagacgcagaaacttttggaggtagatctggacactgtgccaatggccgaggagcccgaggaggacgtggatggccttgctgagtatactttcccgaagttcgctgtgacctattttcagaaatccgccagtcacacacacatacgtcgccccctcagatatcccctgttgtaccacgaagacgacacagattgccttgcagctctagtgatctggaacgtgatcctaaggttcatgggcgaccttccagagcctgtactttacgctcggagctcacagcaagggtcgagcgttatgcggcagattcacgataccttgggcagagaacatggcgcacaggttccccaacatagccggagcgctcaggtggcctcccagttgaacattggggaggaagcactcgaaccggacggcctgggggccgatcgccctatgtctaaccttgaaaaagtgcactttatcgtgggatatgcaatacttcgcccaagtctcagggacgaaatttactgtcaaatctgcaaacagctgtccgagaatttcaagacctcctccctggcaagaggctggatcctcttaagcctttgtttgggttgctttccgccatctgagcgctttatgaagtatctgctgaatttcatcggacagggccctgctacgtacggacctttctgcgccgaacggctgaggcgcacttacgccaatggagtgagggccgagccaccaacatggctggagctgcaggccgtaaaatccaagaagcacattcccatccaggttattctcgctacaggcgagtcgctgacagtaccagtagattccgcctccacctccagagaaatgtgcatgcatatcgcccataaacagggactctcagatcatttggggttctctctgcaggtagctgtgtatgacaaattctggtcgctggggtccggccgagatcacatgatggacgccatcgccaggtgcgagcaaatggcccaagaaaggggcgaatctcagcgccagagtccctggcgcatctactttagaaaggagttctttactccatggcacgatagccgggaagacccggtctctactgaactgatctataggcaggtgctgagaggtgtgtggagcggagagtattcgttcgagaaagaggaagaactggtggaacttcttgccaggcactgttacgtgcagctgggggcctccgcagagagcaaggcagtacaggaactgcttccttcttgtattccccacaagctgtatcgaacgaagccccccgatcgttgggcttctcttgtaacagctgcttgtgcaaaggccccatacacccagaaacaggtgacccccctggcggtcagggagcaagtagttgatgccgcgcgcctgcaatggcctctcttattttcacggctgtttgaggtgattaccttgtccggacccaggctgcctaagactcagttgatactcgccgttaactggaagggcctctgctttctcgatcagcaggaaaaaatgctgctcgaactgagctttcctgaggtcatgggtctggccaccaaccgggaagcccagggcggacagcgcttgctgttgagcactatgcatgaggagtatgaatttgttagcccttctagcgtggccattgctgagctcgtagccctctttctggaaggactcaaggagagatccatttttgccatggctctccaagacaggaaggccacagacgataccaccctgctggcctttaagaagggcgacttgctcgtcctgacgaagaaacagggacttctggccagcgaaaattggactctgggacagaatgaccgcacagggaagaccggcctggtgccaatggcatgcctgtataccatacctaccgttaccaagcccagcgctcagctgctgagccttttggccatgagccccgagaaacggaagcttgctgcccaggaaggtcagtttacagaaccgagacctgaagagcctcctaaagagaaacttcatactttagaggagttcagttatgaattttttagagctccggagaaggacatggtatcgatggcagtgctgccactcgccagggctagggggcacttgtgggcttacagttgcgaacctttgcgccaacctttactgaaaagggtgcatgccaacgttgatctgtgggatatcgcgtgtcaaatcttcgccaccccgatcctaaggtatatgggagactatcccagccgacaggcttggcctaccctggaactcactgaccaaatcttcaccctcgcattgcagcaccctgccctgcaagatgaggtttattgccagatccttaaacaattgactcacaacagtaatcggcattcggaggaacgtgggtggcagctcctgtggctttgcaccggcttgttccctccaagtaaaggactgctacctcatgcacagaagttcatagacacccggcgaggaaagttactcgcccctgactgctcaagacgcatacagaaagtgctgagaaccggccctagaaagcagcctccccatcaggtggaggttgaggcagccgagcaaaatgtttcacggatttgtcataaaatctatttcccaaatgatacgagcgagatgctggaggtggtggctaacacaagagtacgcgatgtgtgtgattcaattgccacgcggttgcagttggcctcctgggaaggctgctcattatttataaaaatctcagataaggtgatctcccagaaggagggcgactttttctttgattctctgcgagaagtgtcagactgggtgaagaagaataagcctcagaaggagggagcacctgttactctgccctaccaagtttatttcatgcgcaagctttggttgaacatttcaccaggtaaggatgtcaatgcggatacgatacttcactaccaccaagagctgccgaagtatctgcggggtttccataagtgttccagagaggatgccatacacctcgccggactgatttataaggcacaatttaataatgatcggtctcagttggcctccgtgcccaaaatcctgagggagctggttccggaaaacctgactaggctgatgagttctgaggagtggaagaaaagcatcctgctcgcttatgataaacacaaggataagactgtcgaagaagccaaagtcgctttcctcaaatggatctgtaggtggcctacttttgggtctgccttcttcgaagtgaagcagacatccgagccctcatatccggatgtaatcctgattgctattaatagacatggcgtgctgctgattcatcccaagaccaaagatctgttaacgacgtacccctttaccaagatcagttcttggtcgtccgggtccacctacttccacatggccctgggcagcttgggacgcgggagccgtctcctgtgcgaaacaagtttgggatacaaaatggacgacttgctgacctcatatgttcaacagctgctaagtgcaatgaataagcaacgtggttctaaggcaccagccttggcatccacttag

SEQ ID NO: 36859 - DNA, 6351 bp, Artificial Sequence
  derived and/or modified sequence
atgtcagggttcaggctgggggaccacgtgtggctcgagcccccttccactcacaaaacaggcgtggctatcggaggcattattaaggaggccaaacctggcaaagtgctggttgaggacgacgaaggtaaggaacactggatcagagcagaggactttggggtgctgtcacccatgcaccctaattcggtccagggcgtcgatgatatgatccgccttggcgacctaaacgaagccgggatggtgcacaatctcctgatccgctaccagcagcacaagatctacacttatactggctccatcctcgttgctgtcaacccattccaggtgctgcccctttacacactcgaacaagtgcagctgtactatagtcgccacatgggcgaactgcccccacacgtctttgcaatcgccaacaactgctatttcagcatgaagcggaacaaaagggatcagtgttgtatcatcagtggcgaaagcggagccggcaagacagaaactaccaaactcatcctgcaatttcttgccacaattagtggacagcatagttggattgaacagcaagtattggaggcaaatccaatcctcgaagccttcggtaatgctaagactatccggaacgacaactcttcgcgcttcggcaagtacatagatatctacttcaatcccagcggcgtgatagaaggcgcccggatagaacagtttctgctggaaaaaagcagggtgtgccgccaggcacctgaagaaagaaactatcacattttctattgcatgctaatgggtgtgtctgcagaagacaaacagttgctcagcctgggcacaccaagtgagtaccactatctgaccatggggaactgtacttcctgcgagggcctgaatgatgctaaggactacgcacacatccgcagcgcaatgaagattctgcagttttcagatagcgaatcctgggacgtcatcaaactgctggccgccattctccatctcggcaatgttggctttatggcgagcgtgtttgaaaacctcgacgcatctgacgtaatggaaacccctgcctttcccacagtgatgaagctgctggaagtgcagcatcaggagcttagggactgtctaataaaacacacaatcctcatccgtggagaatttgttacccgctctctaaacatcgcacaggccgccgacagaagagacgccttcgttaaaggtatttacggccacctcttcctgtggatagtcaaaaagattaatgccgcgatcttcacgcctcctgcccaggatcctaagaatgtacgccgcgctattggacttttggatatatttgggttcgagaacttcgagaataattcattcgaacagctctgtattaacttcgcaaatgagcacctccagcaattttttgttcagcatgtgttcaccatggaacaagaagagtacagatcagaaaacattagctgggactacatccactacaccgacaacagacccactttagatcttctggctctgaaacctatgagtatcatctccctgcttgacgaagaatctcggtttccacagggaacagatttgactatgcttcagaagttgaactcagtacacgcaaataacaaggcattcctacagcccaagaatattcacgatgctcggtttggaattgcacattttgcaggcgaggtgtactaccaggctgaaggatttttggagaaaaacagagacgtcctgagcactgatattctgacactggtttacagcagcaaaaacaaatttctgagggagatcttcaacctggaacttgcagagaccaaactcggccacggcaccatacggcaggctaaagcagggaaccatctttttaaaagcgccgacagcaataaacgtcccagtaccctagggtcccagttcaagcaatcacttgaccagcttatgaaaattctcacaaattgtcagccctacttcatcaggtgcatcaaacctaatgaatacaagaagccgcttttgttcgatagggagctctgtctgagacagctccggtatagcgggatgatggagactgtgcacatccgaaagagcggatttcctatcagatacacctttgaggagttttcacaaaggttcggggttcttctccccaacgccatgaggatgcagctccaagggaaactgcgacaaatgaccctcggcatcactgatgtgtggctgagaactgacaaggattggaaggcagggaaaactaaaatttttctaagagatcaccaggatacgctattggaggtgcaacgatcccaggtcctagatcgcgctgccctgagcattcaaaaggtcctcagggggtacaggtatcgaaaggagtttctccggcagagacgtgccgccgtcacactgcaagcctggtggcgtggctactgcaatagaagaaacttcaagcttattttagtaggattcgagcgccttcaggccattgctcgctcacagcctctggcccgccagtatcaggcaatgaggcaaagaactgttcagttgcaagccctgtgccggggttatctcgtgcgtcagcaggtgcaggccaaacgccgagccgtggtagttatccaggcacacgccaggggcatggctgcccggaggaacttccagcagcgcaaggccaatgcacccctcgtgatccctgcagagggacaaaagagtcagggagctctgcccgcaaagaagcgtaggagcatatacgataccgtgacggacaccgagatggtcgaaaaggtgttcgggtttcttcctgcaatgatcgggggccaggagggtcaagcgagtcctcactttgaagacctggagagtaaaacacagaaacttcttgaggtcgatcttgatacggtgccaatggccgaagagccagaagaggatgtggatgggttagctgaatataccttccccaaattcgcagtcacatactttcaaaagagtgcaagccacacccacattagacggccacttagatatcctcttttataccacgaagatgataccgattgtctggctgctctggtcatttggaacgttatcttacgattcatgggcgacctgccagagcccgttctttatgcacggagttctcagcaagggtcatccgttatgcgacagattcacgatacattaggtcgggagcacggggcacaagtccctcagcattctcggtccgctcaagtggcttcccagctgaatataggcgaggaggcgctggaaccagatggtctgggagctgacagacctatgtcgaacttagagaaggtgcattttatagtaggatatgcaattctccgaccatctcttcgcgacgagatttattgtcaaatctgcaaacagctcagcgaaaattttaaaaccagctctctggcaaggggctggatactgctcagcctgtgcctggggtgctttcccccctctgaacggttcatgaaatatcttctgaatttcattggacaggggccagctacctacggcccattttgtgccgaacggctccgtaggacctatgccaacggagttcgagccgagccacccacctggttagaactccaggccgtgaaatcgaagaaacacatccctatccaagtgattctggcaactggtgagtcgctgacagtaccagtggactcagctagtacaagtcgggaaatgtgcatgcacattgcgcataagcaagggctcagcgatcaccttggcttttctttgcaggttgccgtctacgacaaattctggagtcttggtagtggtcgggatcacatgatggatgcaattgctagatgcgagcagatggcccaggagaggggagagtctcagaggcagtccccatggaggatatattttaggaaggagttcttcaccccttggcacgatagtcgagaggacccagtgtccaccgaactgatctacagacaggtgctgcgaggcgtgtggagcggagagtactcctttgaaaaagaagaggagctggtggaattgctggccaggcattgttacgtccagctcggtgcctctgcagagagcaaggcagtgcaggaactgcttccgtcctgcatccctcacaagctgtaccgcaccaagccaccggaccgctgggcttctctcgtcacggccgcctgtgctaaggcaccctacactcagaagcaagtcacacccctcgcggtgcgggaacaagtggttgatgccgcccgactccagtggccactgctgttcagccgtctcttcgaggtgatcactctgtccggcccacggctgcccaagactcagcttatactcgcagtgaactggaagggcctgtgttttcttgatcagcaagagaaaatgctgctcgaattaagttttcctgaggtgatgggcctggccacaaatcgagaggcacagggcgggcagcggctgctgctgagtacaatgcacgaggagtacgagttcgtcagtccctcttccgtggccattgcagagttggtggccctattcctcgaggggttgaaggagaggtctatctttgcaatggccctgcaagacaggaaggccacagacgacaccacactgctggcatttaaaaagggcgacctcctcgtgcttactaaaaagcagggtctgttagcctctgagaactggacattgggtcagaacgaccgaaccggcaagactggtctcgtacctatggcctgtctttatactatccccacagtgacaaaaccctcagctcagctgctcagtctcctagcgatgagtcccgagaagcgcaagctggccgctcaggagggccaattcacagagccgaggccagaagaaccccctaaggaaaaactgcataccctcgaggagttctcctacgaattcttccgagcccctgagaaagatatggtgagtatggcagtgctgccccttgcgagggctcggggacacctgtgggcctacagttgcgaaccgctgcggcagccactgctcaagcgtgtgcatgcaaatgtcgatctctgggatatagcttgccagatattcgtggcgatccttaggtacatgggggattatccgtccaggcaggcatggcccacactggagctgaccgaccaaatattcacactcgccctgcaacaccctgccttgcaggatgaggtgtactgtcagatcctcaaacagttaacacataatagcaatcggcattctgaagagcggggctggcaactgctgtggctgtgcacaggtttgttccccccaagcaagggtctgttgccacacgctcagaaatttattgacactcgacgcggtaaactcctggcccccgactgttcacgtagaattcaaaaagttctgcgcacgggaccacggaaacaacccccacatcaggtggaggtggaggcagccgagcaaaacgtgtcccgaatttgccacaagatctatttccccaacgatactagtgaaatgttggaggtagttgccaacactagggtgcgcgacgtgtgtgacagcatcgccacacgactgcagctggcttcatgggagggctgttccctgtttatcaaaatctcagataaggtcattagtcagaaggaaggcgacttttttttcgactcgctccgtgaagtatccgattgggtgaagaagaataagccccaaaaagagggtgctcctgtgaccctgccgtaccaggtgtactttatgagaaagctgtggttgaacatttctcctgggaaagacgtgaacgctgacactatcctgcattaccatcaggagctgcccaagtacttacgtggttttcataagtgttcacgggaagacgctattcacctggcgggcctcatatacaaggcacagtttaataacgatcgttcccagctggcctccgtgccaaaaattctccgcgaactggtgcccgagaacctcactcggctaatgtcctctgaagagtggaagaaatcaatcctgctagcctatgataagcacaaagataagactgtcgaagaagccaaagttgctttcctgaaatggatatgtagatggccaacttttggatccgccttctttgaggtgaagcaaacaagtgagccctcttatccagatgttatcctgatcgccatcaaccgacatggcgtcttgctcattcatcctaaaaccaaggatctcctgactacctatccttttactaagatctcctcctggagctccggttccacctatttccatatggcacttggtagcctaggcaggggcagcagattactgtgcgagacgtccctaggctacaagatggacgacttactcacgagttacgttcagcagctgctgagcgctatgaataaacagcgcggctcaaaagcccctgcacttgccagcacgtag

SEQ ID NO: 36860 - DNA, 6351 bp, Artificial Sequence
  derived and/or modified sequence
atgagcgggtttcgcctgggggaccacgtttggctggaaccgcccagtacccacaaaaccggcgtggctatcggcggtataatcaaagaagccaagcccggtaaagtgctcgtggaggacgacgaaggtaaagagcattggattcgggccgaggactttggggtattgtcccctatgcatcctaattccgtgcagggagttgacgacatgatccggctgggggatttgaacgaggcgggaatggttcacaatttactaataaggtatcagcaacacaagatatatacttatactgggtcaattcttgttgccgtgaaccccttccaggtgcttccactgtacacattagaacaggttcaattgtactacagtagacatatgggcgagttacctccccacgtcttcgcaattgcaaataattgctattttagtatgaagcggaacaagcgcgatcagtgctgcattatcagtggtgaaagcggcgcaggcaagactgaaactactaagctcattctgcagtttctggccacaatttcaggccagcacagttggatcgagcaacaagttcttgaagcaaacccaattctcgaggcctttgggaacgcaaagactatccgtaatgacaatagtagtcgcttcggtaagtacattgacatctacttcaatccttccggcgtcatagaaggagctcgaatcgaacagtttctgctcgagaagagtcgagtgtgtagacaggctcccgaagagaggaactaccacatattttactgcatgttgatgggcgtctccgctgaggacaagcagcttttgagtttgggcactccatccgagtatcactaccttacaatgggcaattgtacgtcatgcgagggcctgaacgatgccaaagactacgcacatattaggtctgcgatgaagatcttgcagttctcagatagcgagtcatgggacgtaattaaactactggcagctatcctgcatcttggcaacgtaggcttcatggcttccgtgtttgagaacctggatgcctctgacgttatggaaacccccgcatttcctactgtgatgaaactgttagaggtgcagcatcaggaactccgagactgcctgatcaagcacaccatcttaattaggggcgaatttgtgaccagatccctcaacatcgcccaggccgctgatcggagggatgctttcgtgaaaggcatctacgggcacctgtttctttggatagtcaaaaaaattaatgcggccatcttcacacctcctgctcaggaccctaagaatgttagacgtgctatcggacttctcgacatattcggattcgagaacttcgagaataacagcttcgaacagttgtgtatcaacttcgccaacgagcatttacaacagttcttcgtgcagcacgtattcacgatggagcaggaagagtatagatcggaaaacatctcttgggactacatacactataccgacaaccggcccacactcgatctcctggctttgaaacccatgagcatcatttcactgctggatgaagagagccgctttcctcagggcacagacctcacaatgctgcaaaaattaaacagcgtccacgccaacaacaaggcttttctgcagcccaaaaatattcatgatgccaggtttggcatcgcccattttgctggtgaggtctactatcaggcagaaggtttcctggagaagaaccgggatgtgcttagtaccgacattctaacgctggtctatagcagcaaaaataagtttctccgcgagatctttaatctggaattggcggaaaccaagctcgggcatggaacgatcaggcaagccaaggcaggaaaccacctgttcaagagcgcagactctaacaagcggccctctactctgggtagtcagtttaagcagtcactggaccagcttatgaaaatcttgacaaactgtcaaccctattttatccgctgcataaaacccaacgagtacaaaaagccactgctctttgatagagagctttgcttacgacagcttcggtactcgggcatgatggagacagtacacattagaaagagtggcttccccatccggtatacatttgaggaattctctcagagatttggtgtactcctgcctaacgccatgaggatgcagttgcagggtaagctccgccagatgacattggggattaccgatgtgtggctgagaactgacaaggactggaaagccgggaaaacaaaaatcttcttgcgtgaccatcaggacactcttttggaagtacagcggagccaggtcttagaccgggcggctctttcaatacagaaagttcttcgcggctacagataccgaaaggagttcctccgccagaggcgggctgctgtgacactgcaggcttggtggaggggctattgtaataggagaaacttcaaattgatcctggtgggctttgaaaggctgcaagccatagcccgtagccagccactggcacgacaatatcaagccatgagacagcggaccgtgcaactccaggcgctttgtcgcgggtatctcgtaaggcagcaggtccaggccaagcggagagccgtggttgtgatacaggctcacgcccgggggatggctgcacgtcgcaacttccaacagaggaaagccaatgcccctttggtcattcccgccgaagggcaaaagtctcagggggctctcccagctaagaaacgccgaagtatatatgacacagtgacagacacagaaatggttgagaaagtgtttggttttctgcccgcaatgatcgggggtcaggagggccaggcctcaccacacttcgaagacctagagtccaagacccagaaactcctggaagtggatcttgatactgtgcccatggctgaggagcctgaagaggacgtggacggtcttgcagagtatacctttccaaagtttgcagtgacctacttccagaagtccgctagtcacacccacattcgccgtccactacgatatccgctgctataccacgaagatgacactgattgcttagctgccttagtgatctggaatgtgatcttacggttcatgggtgatttgccagagccagtactttacgcgcgctctagccagcaaggaagttcggtaatgagacagatccatgatacactaggccgggagcacggggctcaagttccccaacacagccgctctgcccaggtcgcatcccaactgaatattggggaagaggctttggagcccgacggattaggagcagaccgccccatgagcaacctggagaaggtgcatttcatcgtcggctatgcgattctgcggccatcgttaagggacgagatctattgtcaaatctgcaagcagcttagcgagaactttaagacatcctccttagcccgaggctggattctcctgagtctgtgtctgggctgttttccaccgtccgagcgctttatgaagtacctgcttaattttattggccaggggcctgccacatacggaccgttctgcgccgaacgcctcaggagaacatatgccaacggcgtcagggctgagccaccgacttggctggagttgcaggcggtgaagagcaagaaacacatacctatccaggtgatcctcgccaccggcgagtcattaactgtaccggttgatagcgcctctacatctagagagatgtgcatgcatatcgctcacaagcaaggtctgagcgaccatttgggcttcagcctgcaagtggcagtgtacgacaagttttggtcccttggtagcggaagagaccacatgatggacgcaatagcccgatgcgagcagatggcccaggaaagaggcgaatcacagcggcagtccccctggcgcatctatttcaggaaggagtttttcaccccgtggcatgattcacgcgaggatcccgtgagtactgagctgatatacagacaggtgctccgaggggtgtggtcaggcgaatactccttcgagaaggaggaagagcttgttgagcttcttgcccgtcactgctacgtacaattgggcgcttcagccgagtctaaggctgtgcaggagctcctgcccagctgtattccccataagctgtacagaacaaaaccccccgaccggtgggcctctttggtgacggcagcctgtgctaaggccccgtatacacagaagcaggttactccactggctgtgagggaacaggtcgtcgacgccgcccggctgcagtggcccctattgttttcaaggttatttgaggtaattacactgtcgggacctagattgcctaaaacccagttgatccttgcagtcaattggaaagggctctgcttccttgaccagcaggaaaagatgctcctggagttgtcgtttccagaggtgatgggcttggccacgaacagggaggcccaggggggccagcgactgcttctgagtacaatgcatgaggaatacgagttcgtctcaccgtcatcagttgctatcgccgaactggtagccttgtttcttgagggcttgaaggagagatctatttttgctatggctctgcaggaccgcaaagccacagatgacaccaccctcctcgctttcaaaaagggggacttattagtgttgacaaaaaagcagggattgctggcctctgagaactggacactagggcagaatgataggaccggcaagacaggcctggttcccatggcttgcctgtacacgatacccacagtcacaaaacctagtgcccagttgctgtctcttctggcgatgtctcctgagaagcggaaactcgctgcacaggagggtcagtttaccgagcccaggccagaggaacctcccaaggagaagcttcacacacttgaagagttctcgtacgaattctttcgcgcacccgaaaaagacatggtcagcatggctgtgctaccgctggcccgcgctcgcgggcatttatgggcgtacagttgtgagcctcttaggcagcccctgctgaagcgcgtacacgccaatgtcgacctgtgggacatcgcttgccagatcttcgtagcaatacttaggtacatgggtgattacccatccagacaggcctggcccacgctggaattaacagaccagattttcactctagcactgcagcaccccgccctccaagacgaagtctattgtcagatccttaaacagctgacccacaatagcaacaggcattcagaagagcggggatggcagcttctatggctgtgcaccggcctgttcccacccagcaagggactgctccctcatgcccagaagttcattgacactaggcgcggcaaactcctggcccccgattgcagcaggagaatacagaaagttctgcgtactggaccccgaaaacaacctccacatcaggttgaggtggaagccgctgagcagaacgtgtccagaatatgccataagatttattttcccaatgataccagcgagatgttagaggttgttgcaaacacaagggtgcgggatgtttgcgattcaatagccactcgactccagctggccagctgggaaggatgttccctgttcattaaaatcagcgacaaggtgatctctcagaaggagggagacttcttttttgactcgctgcgcgaggtaagcgattgggtcaagaagaacaaaccccaaaaagaaggggcacccgtcacactcccataccaggtctatttcatgcggaagctatggctcaacatctcaccaggaaaagatgtgaacgcggataccatcttgcactatcaccaagagctgccaaaatacctcaggggcttccacaagtgttcacgagaagatgctatccacttagctggccttatttacaaagcgcagtttaataatgatagatcccagctcgcatctgtcccaaagattctccgggagctggtcccggagaacctcacccggctgatgtcttccgaagaatggaaaaaatctatcctgttggcttacgataagcataaggacaagacagttgaggaggcgaaggtggctttcttgaaatggatatgcaggtggcccactttcggctcagcattcttcgaagttaagcagactagcgagccaagttaccctgacgtgatcttgatcgctattaacagacacggtgtgctcctgatccatccaaagactaaagacctgcttaccacataccctttcaccaagatctcgtcttggtcttcaggcagcacctacttccatatggctctgggaagccttggaaggggctcacgcctgctctgtgaaacgtcattgggctacaagatggacgatctcctgaccagctacgtccaacagctactctcagcaatgaacaagcagagggggagcaaggcacccgcacttgcgtcaacttag

SEQ ID NO: 36861 - DNA, 2886 bp, Artificial Sequence
  derived and/or modified sequence
atgaagtacctgctgaacttcatcggccagggccctgccacctacggccccttctgtgccgagcggctgcggaggacctacgccaatggagtgcgggcagagccccccacctggctggagctgcaggccgtgaagagcaagaagcacatccccatccaggtgatcctggccaccggggagagcctgactgtgcctgtggacagcgccagcaccagccgggagatgtgcatgcacatcgcccacaagcagggcctgagtgaccacctgggcttcagcctgcaggtggccgtgtatgacaagttctggagcctgggcagcggccgggaccacatgatggatgccatcgcccgctgtgagcagatggcccaggagcggggggagagccagaggcagagcccctggaggatctacttcaggaaggagttcttcaccccctggcatgacagcagagaagatcctgtgtccacagagctgatctaccggcaggtgctgcggggcgtgtggagcggggagtacagctttgagaaggaggaggagctggtggagctgctggcccggcactgctacgtgcagctgggcgccagcgctgagagcaaggctgtgcaggagctgctgcccagctgcatcccccacaagctgtaccgcaccaagcccccagaccgctgggccagcctggtgacagctgcctgtgccaaggccccctacacccagaagcaggtgacccccctggccgtgcgggagcaggtggtggatgctgcccggctgcagtggcccctgctcttcagccggctgtttgaagtcatcaccctgagcgccttcaccctgcccagcctgctggcccggcccccaccagcccaggatgctggccctgctggagaagatgctgctggcaccctcttcccccggggccacggcagcggccaccagcaggtgcgggccctgcgggaggacctcttcctgcacacagagccccaccccccagcccctggccgcacagcccacgaggtgctgcactggggcatcacccgctgcaccggcagcttcagcctgaagcccaggagcaccaggaagggccagggctctgtgcagcccctggccggcacctacctggagggcagcttcctgtgccacggccgggagctggtggcctggagggtgcaggtggtgtgggagggggacaagggccagtgcctggccggggctgacccccacagccacggcagcccctggatcagcctgaccggcaacttctccatgccctttgggaagagcacccagcagagcggcacctgcatcagcggcctgtgccaggtgtacagcggccaccacagccccctggccaccagccccaggagcacagacagcatcacccacagcgcagatgagaggatgagcaagctgaagcacgccgaggtgcgctggctgcgggtgtccacctggcagagccggcagctgatcagcgccctgacctttgctgtgtccctgcgctgccactgcaccccagccaccagcctgagcgcccacagccagccccacacctgggccgcccccctgagcgccagcgagcggcccaccgtggtgtctggcctggtgctggccctggccgagcagctgtgtgtgctgatccgctggaggggcctgctggtgaccctgtccttcatcagccgggaggcccagggcggccagaggctgctgctgagcaccatgcatgaggagtatgaatttgtgagccccagctctgtggccatcgccgagctggtggccctcttcctggagggcctgaaggagaggagcatctttgccatggccctgcaggacaggaaggccacagatgacaccaccctgctggccttcaagaagggggacctgctggtgctgaccaagaagcagggcctgctggccagcgagaactggaccctgggccagaatgacagaacaggcaagacaggcctggtgcccatggcctgcctgtacaccatccccaccgtgaccaagcccagcgcccagctgctgagcctgctggccatgagccctgagaagaggaagctggccgcccaggagggccagttcacagagcccaggcctgaggagccccccaaggagaagctgcacaccctggaggagttctcctatgagttcttccgggcccctgagaaggacatggtgtccatggctgtgctgcccctggcccgggcccggggccacctgtgggcctacagctgtgagcccctgcggcagcccctgctgaagagggtgcacgccaacgtggacctgtgggacatcgcctgccagatctttgccacccccatcctgcgctacatgggagactaccccagccggcaggcctggcccaccctggagctgacagaccagatcttcaccctggccctgcagcacccagccctgcaggatgaggtgtactgccagatcctgaagcagctgacccacaacagcaacagacacagcgaggagcggggctggcagctgctgtggctgtgcaccggcctcttcccccccagcaagggcctgctgccccacgcccagaagttcatcgacacccggcggggcaagctgctggccccagactgcagccgccgcatccagaaggtgctgaggacaggccccaggaagcagcccccccaccaggtggaggtggaggccgctgagcagaatgtgagccgcatctgccacaagatctacttccccaatgacaccagcgagatgctggaggtggtggccaacaccagggtgagagatgtgtgtgacagcatcgccacccggctgcagctggcctcctgggagggctgcagcctcttcatcaagatcagtgacaaggtgatcagccagaaggagggggacttcttctttgacagcctgcgggagtag

SEQ ID NO: 36862 - DNA, 6354 bp, Artificial Sequence
  derived and/or modified sequence
atgagcggcttccggctgggggaccacgtgtggctggagccccccagcacccacaagacaggagtggccatcggcggcatcatcaaggaggccaagccaggcaaggtgctggtggaggatgatgagggcaaggagcactggatccgggcagaagattttggagtgctgagccccatgcaccccaacagcgtgcagggcgtggatgacatgatccggctgggggacctgaatgaagctggcatggtgcacaacctgctgatccgctaccagcagcacaagatctacacctacacaggcagcatcctggtggccgtgaaccccttccaggtgctgcccctgtacaccctggagcaggtgcagctgtactacagccgccacatgggagagctgccccctcatgtgtttgccatcgccaacaactgctacttctccatgaagaggaacaagagggaccagtgctgcatcatctctggagagagcggggccggcaagacagagaccaccaagctgatcctgcagttcctggccaccatcagcggccagcacagctggattgagcagcaggtgctggaggccaaccccatcctggaggcctttggaaatgccaagaccatcagaaatgacaacagcagcagatttgggaagtacatcgacatctacttcaaccccagcggcgtgattgaaggagcccgcatcgagcagttcctgctggagaagagccgggtgtgccggcaggcccctgaggagaggaactaccacatcttctactgcatgctgatgggcgtgtctgctgaggacaagcagctgctgagcctgggcacccccagcgagtaccactacctgaccatgggcaactgcaccagctgtgagggcctgaatgatgccaaggactatgcccacatccgcagcgccatgaagatcctgcagttcagtgacagcgagagctgggatgtgatcaagctgctggccgccatcctgcacctgggcaatgtgggcttcatggcctctgtgtttgagaacctggatgccagtgatgtgatggagaccccagccttccccaccgtgatgaagctgctggaggtgcagcaccaggagctgcgggactgcctgatcaagcacaccatcctgatccggggggagtttgtgaccaggagcctgaacatcgcccaggccgctgacagaagagatgcctttgtgaagggcatctacggccacctgttcctgtggatcgtgaagaagatcaatgctgccatcttcaccccaccagcccaggaccccaagaatgtgcggcgggccatcggcctgctggacatctttggatttgagaactttgagaacaacagctttgagcagctgtgcatcaactttgccaatgagcacctgcagcagttctttgtgcagcacgtgttcaccatggagcaggaggagtacagaagtgagaacatctcctgggactacatccactacacagacaaccggcccaccctggacctgctggccctgaagcccatgagcatcatcagcctgctggatgaggagagccgcttcccccagggcacagacctgaccatgctgcagaagctgaacagcgtgcacgccaacaacaaggccttcctgcagcccaagaacatccatgatgccaggtttggaattgcccactttgctggggaggtgtactaccaggccgagggcttcctggagaagaacagagatgtgctgagcacagacatcctgaccctggtgtacagcagcaagaacaagttcctgcgggagatcttcaacctggagctggccgagaccaagctgggccacggcaccatccggcaggccaaggccggcaaccacctgttcaagtctgctgacagcaacaagaggcccagcaccctgggcagccagttcaagcagagcctggaccagctgatgaagatcctgaccaactgccagccctacttcatccgctgcatcaagcccaatgagtacaagaagcccctgctgtttgaccgggagctgtgcctgcggcagctgcgctacagcggcatgatggagaccgtgcacatcaggaagagcggcttccccatccgctacacctttgaggagttcagccagcgcttcggcgtgctgctgcccaatgccatgaggatgcagctgcagggcaagctgcggcagatgaccctgggcatcacagatgtgtggctgaggacagacaaggactggaaggccggcaagaccaagatcttcctgcgggaccaccaggacaccctgctggaggtgcagaggagccaggtgctggaccgggccgccctgagcatccagaaggtgctgcggggctaccgctacaggaaggagttcctgcggcagaggagagctgctgtgaccctgcaggcctggtggaggggctactgcaacagaagaaacttcaagctgatcctggtgggctttgagcggctgcaggccatcgcccggagccagcccctggcccggcagtaccaggccatgaggcagaggacagtgcagctgcaggccctgtgccggggctacctggtgcggcagcaggtgcaggccaagagaagagctgtggtggtgatccaggcccacgcccggggcatggccgcccggaggaacttccagcagaggaaggccaatgcccccctggtgatcccagctgagggccagaagagccagggcgccctgcctgccaagaagaggaggagcatctatgacacagtgacagacacagagatggtggagaaggtgtttggcttcctgcctgccatgattggaggccaggagggccaggccagcccccactttgaggacctggagagcaagacccagaagctgctggaggtggacctggacacagtgcccatggccgaggagccagaagaagatgtggatggcctggccgagtacaccttccccaagtttgctgtgacctacttccagaagagcgccagccacacccacatcagaagacccctgcgctaccccctgctgtaccatgaagatgacacagactgcctggccgccctggtgatctggaatgtcatcctgcgcttcatgggagacctgcctgagcctgtgctgtatgcccggagcagccagcagggcagctctgtgatgaggcagatccatgacaccctgggccgggagcacggggcccaggtgccccagcacagccgcagcgcccaggtggccagccagctgaacattggagaggaggccctggagccagatggcctgggcgctgaccggcccatgagcaacctggagaaggtgcacttcatcgtgggctacgccatcctgcggcccagcctgagagatgagatctactgccagatctgcaagcagctgtctgagaacttcaagaccagcagcctggcccggggctggatcctgctgagcctgtgcctgggctgcttcccccccagcgagcgcttcatgaagtacctgctgaacttcatcggccagggccctgccacctacggccccttctgtgccgagcggctgcggaggacctacgccaacggggtgcgggcagagccccccacctggctggagctgcaggccgtgaagagcaagaagcacatccccatccaggtgatcctggccactggagagagcctgactgtgcctgtggacagcgccagcaccagccgggagatgtgcatgcacatcgcccacaagcagggcctgagtgaccacctgggcttcagcctgcaggtggccgtgtatgacaagttctggagcctgggcagcggccgggaccacatgatggatgccatcgcccgctgtgagcagatggcccaggagcggggggagagccagaggcagagcccctggaggatctacttcaggaaggagttcttcaccccctggcatgacagccgggaggaccctgtgtccacagagctgatctaccggcaggtgctgcggggcgtgtggagcggggagtacagctttgagaaggaggaggagctggtggagctgctggcccggcactgctacgtgcagctgggcgccagcgctgagagcaaggctgtgcaggagctgctgcccagctgcatcccccacaagctgtaccgcaccaagcccccagaccgctgggccagcctggtgacagctgcctgtgccaaggccccctacacccagaagcaggtgacccccctggccgtgcgggagcaggtggtggatgctgcccggctgcagtggcccctgctcttcagccggctgtttgaggtgatcaccctgagcggcccccggctgcccaagacccagctgatcctggccgtgaactggaagggcctgtgcttcctggaccagcaggagaagatgctgctggagctgtccttccctgaggtgatgggcctggccaccaaccgggaggcccagggcggccagaggctgctgctgagcaccatgcatgaggagtatgaatttgtgagccccagctctgtggccatcgccgagctggtggccctcttcctggagggcctgaaggagaggagcatctttgccatggccctgcaggacaggaaggccacagatgacaccaccctgctggccttcaagaagggggacctgctggtgctgaccaagaagcagggcctgctggccagcgagaactggaccctgggccagaatgacagaacaggcaagacaggcctggtgcccatggcctgcctgtacaccatccccaccgtgaccaagcccagcgcccagctgctgagcctgctggccatgagccctgagaagaggaagctggccgcccaggagggccagttcacagagcccaggcctgaggagccccccaaggagaagctgcacaccctggaggagttctcctatgagttcttccgggcccctgagaaggacatggtgtccatggctgtgctgcccctggcccgggcccggggccacctgtgggcctacagctgtgagcccctgcggcagcccctgctgaagagggtgcacgccaacgtggacctgtgggacatcgcctgccagatctttgccacccccatcctgcgctacatgggagactaccccagccggcaggcctggcccaccctggagctgacagaccagatcttcaccctggccctgcagcacccagccctgcaggatgaggtgtactgccagatcctgaagcagctgacccacaacagcaacagacattctgaggagcggggctggcagctgctgtggctgtgcaccggcctcttcccccccagcaagggcctgctgccccacgcccagaagttcatcgacacccggcggggcaagctgctggccccagactgcagccgccgcatccagaaggtgctgaggacaggccccaggaagcagcccccccaccaggtggaggtggaggccgctgagcagaatgtgagccgcatctgccacaagatctacttccccaatgacaccagcgagatgctggaggtggtggccaacaccagggtgagagatgtgtgtgacagcatcgccacccggctgcagctggcctcctgggagggctgcagcctcttcatcaagatcagtgacaaggtgatcagccagaaggagggggacttcttctttgacagcctgcgggaggtgtctgactgggtgaagaagaacaagccccagaaggagggcgcccctgtgaccctgccctaccaggtgtacttcatgaggaagctgtggctgaacatcagccctgggaaggatgtgaatgctgacaccatcctgcactaccaccaggagctgcccaagtacctgcggggcttccacaagtgcagccgggaggatgccatccacctggccggcctcatctacaaggcccagttcaacaatgacaggagccagctggcctctgtgcccaagatcctgcgggagctggtgcctgagaacctgacccggctgatgagcagcgaggagtggaagaagagcatcctgctggcctatgacaagcacaaggacaagacagtggaggaggccaaggtggccttcctgaagtggatctgccgctggcccaccttcggcagcgccttctttgaggtgaagcagaccagcgagcccagctacccagatgtgatcctgattgccatcaacagacatggagtgctgctgatccaccccaagaccaaggacctgctgaccacctaccccttcaccaagatcagctcctggagcagcggcagcacctacttccacatggccctgggcagcctgggccggggcagccggctgctgtgtgagaccagcctgggctacaagatggatgacctgctgaccagctatgtgcagcagctgctgagcgccatgaacaagcagaggggcagcaaggccccagccctggccagcacctag

SEQ ID NO: 36863 - DNA, 6351 bp, Artificial Sequence
  derived and/or modified sequence
atgagcggcttccggctgggggaccacgtgtggctggagccccccagcacccacaagacaggagtggccatcggcggcatcatcaaggaggccaagccaggcaaggtgctggtggaggatgatgagggcaaggagcactggatccgggcagaagattttggagtgctgagccccatgcaccccaacagcgtgcagggcgtggatgacatgatccggctgggggacctgaatgaagctggcatggtgcacaacctgctgatccgctaccagcagcacaagatctacacctacacaggcagcatcctggtggccgtgaaccccttccaggtgctgcccctgtacaccctggagcaggtgcagctgtactacagccgccacatgggagagctgccccctcatgtgtttgccatcgccaacaactgctacttctccatgaagaggaacaagagggaccagtgctgcatcatctctggagagagcggggccggcaagacagagaccaccaagctgatcctgcagttcctggccaccatcagcggccagcacagctggattgagcagcaggtgctggaggccaaccccatcctggaggcctttggaaatgccaagaccatcagaaatgacaacagcagcagatttgggaagtacatcgacatctacttcaaccccagcggcgtgattgaaggagcccgcatcgagcagttcctgctggagaagagccgggtgtgccggcaggcccctgaggagaggaactaccacatcttctactgcatgctgatgggcgtgtctgctgaggacaagcagctgctgagcctgggcacccccagcgagtaccactacctgaccatgggcaactgcaccagctgtgagggcctgaatgatgccaaggactatgcccacatccgcagcgccatgaagatcctgcagttcagtgacagcgagagctgggatgtgatcaagctgctggccgccatcctgcacctgggcaatgtgggcttcatggcctctgtgtttgagaacctggatgccagtgatgtgatggagaccccagccttccccaccgtgatgaagctgctggaggtgcagcaccaggagctgcgggactgcctgatcaagcacaccatcctgatccggggggagtttgtgaccaggagcctgaacatcgcccaggccgctgacagaagagatgcctttgtgaagggcatctacggccacctgttcctgtggatcgtgaagaagatcaatgctgccatcttcaccccaccagcccaggaccccaagaatgtgcggcgggccatcggcctgctggacatctttggatttgagaactttgagaacaacagctttgagcagctgtgcatcaactttgccaatgagcacctgcagcagttctttgtgcagcacgtgttcaccatggagcaggaggagtacagaagtgagaacatctcctgggactacatccactacacagacaaccggcccaccctggacctgctggccctgaagcccatgagcatcatcagcctgctggatgaggagagccgcttcccccagggcacagacctgaccatgctgcagaagctgaacagcgtgcacgccaacaacaaggccttcctgcagcccaagaacatccatgatgccaggtttggaattgcccactttgctggggaggtgtactaccaggccgagggcttcctggagaagaacagagatgtgctgagcacagacatcctgaccctggtgtacagcagcaagaacaagttcctgcgggagatcttcaacctggagctggccgagaccaagctgggccacggcaccatccggcaggccaaggccggcaaccacctgttcaagtctgctgacagcaacaagaggcccagcaccctgggcagccagttcaagcagagcctggaccagctgatgaagatcctgaccaactgccagccctacttcatccgctgcatcaagcccaatgagtacaagaagcccctgctgtttgaccgggagctgtgcctgcggcagctgcgctacagcggcatgatggagaccgtgcacatcaggaagagcggcttccccatccgctacacctttgaggagttcagccagcgcttcggcgtgctgctgcccaatgccatgaggatgcagctgcagggcaagctgcggcagatgaccctgggcatcacagatgtgtggctgaggacagacaaggactggaaggccggcaagaccaagatcttcctgcgggaccaccaggacaccctgctggaggtgcagaggagccaggtgctggaccgggccgccctgagcatccagaaggtgctgcggggctaccgctacaggaaggagttcctgcggcagaggagagctgctgtgaccctgcaggcctggtggaggggctactgcaacagaagaaacttcaagctgatcctggtgggctttgagcggctgcaggccatcgcccggagccagcccctggcccggcagtaccaggccatgaggcagaggacagtgcagctgcaggccctgtgccggggctacctggtgcggcagcaggtgcaggccaagagaagagctgtggtggtgatccaggcccacgcccggggcatggccgcccggaggaacttccagcagaggaaggccaatgcccccctggtgatcccagctgagggccagaagagccagggcgccctgcctgccaagaagaggaggagcatctatgacacagtgacagacacagagatggtggagaaggtgtttggcttcctgcctgccatgattggaggccaggagggccaggccagcccccactttgaggacctggagagcaagacccagaagctgctggaggtggacctggacacagtgcccatggccgaggagccagaagaagatgtggatggcctggccgagtacaccttccccaagtttgctgtgacctacttccagaagagcgccagccacacccacatcagaagacccctgcgctaccccctgctgtaccatgaagatgacacagactgcctggccgccctggtgatctggaatgtcatcctgcgcttcatgggagacctgcctgagcctgtgctgtatgcccggagcagccagcagggcagctctgtgatgaggcagatccatgacaccctgggccgggagcacggggcccaggtgccccagcacagccgcagcgcccaggtggccagccagctgaacattggagaggaggccctggagccagatggcctgggcgctgaccggcccatgagcaacctggagaaggtgcacttcatcgtgggctacgccatcctgcggcccagcctgagagatgagatctactgccagatctgcaagcagctgtctgagaacttcaagaccagcagcctggcccggggctggatcctgctgagcctgtgcctgggctgcttcccccccagcgagcgcttcatgaagtacctgctgaacttcatcggccagggccctgccacctacggccccttctgtgccgagcggctgcggaggacctacgccaacggggtgcgggcagagccccccacctggctggagctgcaggccgtgaagagcaagaagcacatccccatccaggtgatcctggccactggagagagcctgactgtgcctgtggacagcgccagcaccagccgggagatgtgcatgcacatcgcccacaagcagggcctgagtgaccacctgggcttcagcctgcaggtggccgtgtatgacaagttctggagcctgggcagcggccgggaccacatgatggatgccatcgcccgctgtgagcagatggcccaggagcggggggagagccagaggcagagcccctggaggatctacttcaggaaggagttcttcaccccctggcatgacagccgggaggaccctgtgtccacagagctgatctaccggcaggtgctgcggggcgtgtggagcggggagtacagctttgagaaggaggaggagctggtggagctgctggcccggcactgctacgtgcagctgggcgccagcgctgagagcaaggctgtgcaggagctgctgcccagctgcatcccccacaagctgtaccgcaccaagcccccagaccgctgggccagcctggtgacagctgcctgtgccaaggccccctacacccagaagcaggtgacccccctggccgtgcgggagcaggtggtggatgctgcccggctgcagtggcccctgctcttcagccggctgtttgaggtgatcaccctgagcggcccccggctgcccaagacccagctgatcctggccgtgaactggaagggcctgtgcttcctggaccagcaggagaagatgctgctggagctgtccttccctgaggtgatgggcctggccaccaaccgggaggcccagggcggccagaggctgctgctgagcaccatgcatgaggagtatgaatttgtgagccccagctctgtggccatcgccgagctggtggccctcttcctggagggcctgaaggagaggagcatctttgccatggccctgcaggacaggaaggccacagatgacaccaccctgctggccttcaagaagggggacctgctggtgctgaccaagaagcagggcctgctggccagcgagaactggaccctgggccagaatgacagaacaggcaagacaggcctggtgcccatggcctgcctgtacaccatccccaccgtgaccaagcccagcgcccagctgctgagcctgctggccatgagccctgagaagaggaagctggccgcccaggagggccagttcacagagcccaggcctgaggagccccccaaggagaagctgcacaccctggaggagttctcctatgagttcttccgggcccctgagaaggacatggtgtccatggctgtgctgcccctggcccgggcccggggccacctgtgggcctacagctgtgagcccctgcggcagcccctgctgaagagggtgcacgccaacgtggacctgtgggacatcgcctgccagatctttgtggccatcctgcgctacatgggagactaccccagccggcaggcctggcccaccctggagctgacagaccagatcttcaccctggccctgcagcacccagccctgcaggatgaggtgtactgccagatcctgaagcagctgacccacaacagcaacagacacagcgaggagcggggctggcagctgctgtggctgtgcaccggcctcttcccccccagcaagggcctgctgccccacgcccagaagttcatcgacacccggcggggcaagctgctggccccagactgcagccgccgcatccagaaggtgctgaggacaggccccaggaagcagcccccccaccaggtggaggtggaggccgctgagcagaatgtgagccgcatctgccacaagatctacttccccaatgacaccagcgagatgctggaggtggtggccaacaccagggtgagagatgtgtgtgacagcatcgccacccggctgcagctggcctcctgggagggctgcagcctcttcatcaagatcagtgacaaggtgatcagccagaaggagggggacttcttctttgacagcctgcgggaggtgtctgactgggtgaagaagaacaagccccagaaggagggcgcccctgtgaccctgccctaccaggtgtacttcatgaggaagctgtggctgaacatcagccctgggaaggatgtgaatgctgacaccatcctgcactaccaccaggagctgcccaagtacctgcggggcttccacaagtgcagcagagaagatgccatccacctggccggcctcatctacaaggcccagttcaacaatgacaggagccagctggcctctgtgcccaagatcctgcgggagctggtgcctgagaacctgacccggctgatgagcagcgaggagtggaagaagagcatcctgctggcctatgacaagcacaaggacaagacagtggaggaggccaaggtggccttcctgaagtggatctgccgctggcccacctttggaagtgccttctttgaggtgaagcagaccagcgagcccagctacccagatgtgatcctgattgccatcaacagacatggagtgctgctgatccaccccaagaccaaggacctgctgaccacctaccccttcaccaagatcagctcctggagcagcggcagcacctacttccacatggccctgggcagcctgggccggggcagccggctgctgtgtgagaccagcctgggctacaagatggatgacctgctgaccagctatgtgcagcagctgctgagcgccatgaacaagcagaggggcagcaaggccccagccctggccagcacctag

SEQ ID NO: 36864 - DNA, 7444 bp, Artificial Sequence
  derived and/or modified sequence
gggagtcagccagacccccatcctgacaaggcttgtggaactgctgactcaggatgtcggggttcaggctgggtgaccacgtgtggctggagcctccctccacccacaagaccggcgtggccatcgggggcatcatcaaagaggcaaagccaggcaaagtcttggttgaagatgacgagggcaaggaacactggatccgagcagaggactttggtgtcctcagtcccatgcaccccaactcagtccagggtgtggacgacatgatccgcctgggggacctgaacgaggcaggcatggtgcacaacctcctgatccgctaccagcagcacaagatctatacatacacaggctccatcctggtggccgtcaacccgttccaggtgctgccgctctacaccctggagcaggtacagctctactacagccgccatatgggcgagctgcccccgcatgtctttgccatcgccaacaactgctacttcagcatgaagaggaacaagagggaccagtgctgcatcatcagcggcgagtctggggctggcaagacggagaccaccaagctcatcctgcagttcctggccaccatcagtggccagcattcgtggattgagcagcaggtcctggaagccaaccccatcctggaggcctttggaaatgccaagacaatccgcaacgacaactcaagccgctttgggaagtacattgacatctactttaaccccagcggggtgatcgagggcgcgcgcatcgagcaatttctcctggagaagtcccgggtctgccggcaggctcccgaggagcggaactaccatatcttctactgcatgctcatgggggtgagtgctgaggacaagcagctgctgagcctgggcacgccctccgagtaccactacctgaccatggggaactgcacttcctgtgaggggctcaacgacgccaaggactacgcccacatccgctcggccatgaagatcctccagttctccgactccgagagctgggacgtcatcaagctgctggctgccattctccacctggggaatgtggggttcatggcttcggtcttcgagaacctggacgcctcagacgtgatggagacgcccgcctttcccaccgtgatgaagttactggaggtgcagcaccaggagctccgggactgtctgatcaagcacaccatcctcatccgaggggaatttgtcaccaggtccctgaacattgcccaggctgctgaccggagggacgcctttgtcaagggcatctatgggcacctcttcctgtggattgtcaagaagatcaatgccgccatcttcacaccaccagcccaggaccccaaaaatgtgcggagggccatcggcctcctggacatatttggctttgaaaatttcgagaacaatagcttcgagcagctctgcatcaacttcgccaacgagcacctgcagcagttctttgtgcagcacgtgttcaccatggagcaagaggagtaccgctcggagaacatctcctgggactatatccactacaccgacaatcggcccaccctggacctgctggccctcaagcccatgagcatcatctccctcctggacgaagaaagccgcttcccgcaggggacagatctcaccatgctgcaaaagctgaacagcgtccatgccaacaacaaggccttcctacagcccaagaacatccacgatgccagatttggcattgcccattttgccggcgaggtgtactaccaagcagaaggcttcctggagaagaaccgagacgtgctgagcacagatatcctcaccctggtttactcctccaaaaacaagtttctgagggagatattcaacttggagttagcagagaccaagctgggccatgggaccatccgccaggcaaaggcaggaaaccatctcttcaagtctgcagactcaaataaacggccctccaccttaggaagccagttcaaacagtctctggaccagctgatgaaaatcctgaccaactgccagccttacttcatccgctgcatcaaacctaatgagtacaagaagccgctgctgttcgaccgggagctgtgcctgcggcagctgcgatactcgggcatgatggagaccgtgcacatccgcaagtcgggcttccccatccgctacacgttcgaggagttctcgcagaggttcggcgtgttgctgcccaacgccatgcggatgcagctgcaaggcaagctccgccagatgaccctgggcatcactgacgtgtggctgcggacagacaaagactggaaagcggggaagacaaaaattttcctgagggatcatcaggacactctgctggaggtacagagaagccaggtgctagacagagcggcgctcagcatccagaaagtccttcggggctacagatacaggaaggagttcctgaggcagaggcgggcagctgtgaccctgcaggcctggtggagaggctactgcaacaggaggaatttcaagctgatcctcgtgggctttgagcgcctgcaggctattgcccggagccagccgctggcgaggcagtaccaggccatgcggcagaggacagtccagctgcaggccctgtgcaggggatacctggtgcgccagcaagtccaggccaagaggagggcagtggtggtcattcaggcccatgccaggggcatggctgcccggcgcaacttccagcaaaggaaggccaatgcgccgctggtcatcccggccgaggggcagaaaagccaaggcgctctccctgccaagaagcgcagatccatctacgacaccgtcactgacacggagatggtggagaaggtgttcggcttcctccctgccatgattgggggccaggagggccaggcctcgccgcactttgaggatctggaatcgaagacccagaagctgcttgaggttgacctggacacagtccccatggcggaggagcctgaggaggatgtggatggcctggccgagtacaccttccccaagtttgctgtgacttacttccagaaatcagccagccacacacacatccggcggcccctccgatacccgttgctttaccacgaagatgacactgactgcttggccgccctggtcatatggaacgtcatcctgaggttcatgggtgatctcccagagccagtgctgtatgccaggagcagccagcagggcagctcagtgatgcggcagatccatgacacgctgggcagggagcacggtgcccaggttccacagcacagtagatctgcacaggtggccagccagctgaacattggagaggaggcattggagcctgatggccttggtgcagaccggcccatgtccaacctggagaaggtgcacttcatcgtgggctacgccatcctgcggcccagcctcagggatgagatttactgccagatctgcaagcagctctcggagaacttcaaaacaagcagcctggcccggggctggatcctgctcagcctctgcctcggctgcttcccaccctcagagaggttcatgaagtatctactgaacttcatcggccaagggccggcgacctacggccccttctgtgccgagcgcctgagacgcacctatgccaatggggtgcgtgcggagccccccacctggctggagctgcaggctgtcaagtccaagaagcacatccccatccaagtcatcttggccactggagagagcctaaccgtccccgtggactcagcctccacatctcgggaaatgtgcatgcacatcgctcacaagcagggcctcagcgaccacctgggcttctccctccaggtcgccgtgtacgacaagttctggtccctgggcagcgggcgcgaccacatgatggatgccatcgcccggtgtgagcagatggcccaggagaggggcgagagccagcgccagtcaccctggcgcatctacttccggaaggaattcttcaccccctggcacgactcccgggaggaccctgtcagcaccgagcttatttaccgccaagtcctccgaggagtctggtctggcgagtacagcttcgagaaggaggaagagctggttgagctgctggcccggcactgctacgtgcagctcggcgcctcagcagagagcaaggctgtccaggagctgctgcccagctgcatcccccacaagctgtacaggaccaagcccccagacaggtgggcgagcctcgtcactgccgcctgcgccaaggccccatacactcagaagcaagtcacaccactggccgtgcgagagcaggtggtggacgccgcccgcctgcagtggccgctgctcttctcccggctcttcgaagtcatcacactctcagccttcacactgccgtctctcctggccaggcccccgcctgcccaagacgcaggaccagcaggagaagatgctgctggaactctctttcccagaggtcatgggtctggccaccaacaggtgcgggccctgagggaagatctcttcttacacacggagccccaccctcctgcaccaggccgtactgcccatgaagtactccattggggcatcacgcgttgcactggcagcttctctttgaaacccaggtccacccggaaggggcagggaagcgtgcagcctctggcgggcacttatttagaaggctcctttctttgtcatggacgagaactggtggcctggagggtacaggttgtctgggaaggcgacaagggacagtgcctggctggggctgacccccactcccatgggtctccatggatctcattgactgggaacttttccatgccctttgggaagtccacacaacagagtggcacatgcatctctgggctgtgccaggtgtacagtggccaccactccccactggccacctcgccacgaagtaccgacagcatcacccattctgcagatgagcggatgagtaaactgaagcacgccgaggttaggtggctcagagtaagcacatggcagagccggcagctcatctcagctctgacctttgcagtgtccctgcggtgtcactgcacaccagccacctcattatctgcccacagccaaccccacacatgggctgcaccactctcagcctccgagagacccacagtggtgtctggcctagtcctggccctggcagagcagctctgtgtcctcataaggtggagggggctcctggtcacgctgtccttcatctccagggaggcccagggcgggcagaggctgctgctctccacgatgcatgaggagtacgagtttgtgtcacccagcagtgtggccatcgctgagctggtggccctgttcctggagggcctgaaggagaggtccattttcgccatggccctgcaggacaggaaggccacagatgacaccaccctcctggccttcaagaagggggacctgttggtcctcacaaagaagcaggggctgctggcctctgagaactggaccctcggccagaacgacaggacaggcaagacggggctggtgcccatggcctgcctctacaccatccccacggtcactaagccctcggcacagctgctgagcttgcttgccatgtcaccagagaagaggaagctggcggctcaggaggggcagttcacagagccacgtcctgaggagccacccaaggaaaagctgcacaccctggaggagttctcctatgagttcttcagggctccagagaaggacatggtgagcatggccgtgctgcccctggcccgtgcccgtggccacctgtgggcctattcctgcgagccgctgcgacagccgctgctcaagcgagtccacgccaacgtcgacctctgggacatcgcctgccagatctttgccacacccatcctccggtacatgggcgactacccttctcggcaggcctggcccaccctggagctcaccgaccagatcttcacactggccctgcagcacccggccctccaggacgaggtctactgccagatcctgaagcagctgacgcacaactccaacaggcacagcgaagagcggggctggcagctgctgtggctgtgcacgggcctcttcccgcccagcaaggggctgctgccccatgcccagaagtttatagacactcggagggggaagctgctggcccccgactgcagccgccgaatccagaaggtcctgaggacggggccccggaagcagcccccgcaccaggtggaggtggaggccgcagagcagaacgtctcccgcatctgccacaagatctacttccccaatgacaccagtgagatgctggaggtggttgccaacacacgggtgcgggatgtgtgtgacagcattgccaccaggctgcagctggcctcctgggagggctgcagcctcttcatcaagatttcagacaaggtcatcagccagaaggagggagacttcttctttgattccttgagggaggtgtctgactgggtgaagaagaacaagccccagaaagaaggggcccccgtgacgctcccctaccaggtgtacttcatgcggaaattgtggctcaacatatctccagggaaggatgtgaatgcagacaccatactccattaccaccaggagctgcccaagtacctgcgcggattccacaagtgttcgcgggaggatgccatccacctggcgggcctcatctacaaggcccagttcaacaacgaccggtcccagctggctagtgtccccaagatcctgagggaactggtgcctgagaacctcacacgcctgatgtcctcggaggagtggaaaaagagcatccttctagcctatgacaagcataaggacaagacagtggaggaggccaaggtggccttcctgaagtggatctgccggtggcccaccttcggatccgccttcttcgaggtgaagcaaacctcggagccttcctacccggacgtcatcctcatcgccatcaaccgacatggggttctgctcatccaccccaagaccaaggacctgctcaccacctatcccttcaccaagatctccagctggagcagcggcagcacctacttccacatggcgctggggagcctgggccgtggcagccgcctgctgtgcgagacctccctgggctataagatggatgacctgctgacctcatatgtgcagcagctcctgagtgccatgaacaagcagcggggctccaaggccccagccctggccagcacctagcagcggatgctggcgtgtctgctcaggcgcccttcccgacctctagcctggcggcaccttcccaggccctctcaacccagggcctgtccttggcgggcagccttccatgctgccccccatacaaagcccactcagccccgcaggcggccccctctgtcctgggcgctgcccagggaggccaaaagacgggcccagaatggggtcgggagtctcggacccccaggctattggtggatgactgactgacaggacacctcccaaccccaccccaccccaccagaatgttcaataaaaactcctggagcaggaga

SEQ ID NO: 36865 - DNA, 6718 bp, Artificial Sequence
  derived and/or modified sequence
gggagtcagccagacccccatcctgacaaggcttgtggaactgctgactcaggatgtcggggttcaggctgggtgaccacgtgtggctggagcctccctccacccacaagaccggcgtggccatcgggggcatcatcaaagaggcaaagccaggcaaagtcttggttgaagatgacgagggcaaggaacactggatccgagcagaggactttggtgtcctcagtcccatgcaccccaactcagtccagggtgtggacgacatgatccgcctgggggacctgaacgaggcaggcatggtgcacaacctcctgatccgctaccagcagcacaagatctatacatacacaggctccatcctggtggccgtcaacccgttccaggtgctgccgctctacaccctggagcaggtacagctctactacagccgccatatgggcgagctgcccccgcatgtctttgccatcgccaacaactgctacttcagcatgaagaggaacaagagggaccagtgctgcatcatcagcggcgagtctggggctggcaagacggagaccaccaagctcatcctgcagttcctggccaccatcagtggccagcattcgtggattgagcagcaggtcctggaagccaaccccatcctggaggcctttggaaatgccaagacaatccgcaacgacaactcaagccgctttgggaagtacattgacatctactttaaccccagcggggtgatcgagggcgcgcgcatcgagcaatttctcctggagaagtcccgggtctgccggcaggctcccgaggagcggaactaccatatcttctactgcatgctcatgggggtgagtgctgaggacaagcagctgctgagcctgggcacgccctccgagtaccactacctgaccatggggaactgcacttcctgtgaggggctcaacgacgccaaggactacgcccacatccgctcggccatgaagatcctccagttctccgactccgagagctgggacgtcatcaagctgctggctgccattctccacctggggaatgtggggttcatggcttcggtcttcgagaacctggacgcctcagacgtgatggagacgcccgcctttcccaccgtgatgaagttactggaggtgcagcaccaggagctccgggactgtctgatcaagcacaccatcctcatccgaggggaatttgtcaccaggtccctgaacattgcccaggctgctgaccggagggacgcctttgtcaagggcatctatgggcacctcttcctgtggattgtcaagaagatcaatgccgccatcttcacaccaccagcccaggaccccaaaaatgtgcggagggccatcggcctcctggacatatttggctttgaaaatttcgagaacaatagcttcgagcagctctgcatcaacttcgccaacgagcacctgcagcagttctttgtgcagcacgtgttcaccatggagcaagaggagtaccgctcggagaacatctcctgggactatatccactacaccgacaatcggcccaccctggacctgctggccctcaagcccatgagcatcatctccctcctggacgaagaaagccgcttcccgcaggggacagatctcaccatgctgcaaaagctgaacagcgtccatgccaacaacaaggccttcctacagcccaagaacatccacgatgccagatttggcattgcccattttgccggcgaggtgtactaccaagcagaaggcttcctggagaagaaccgagacgtgctgagcacagatatcctcaccctggtttactcctccaaaaacaagtttctgagggagatattcaacttggagttagcagagaccaagctgggccatgggaccatccgccaggcaaaggcaggaaaccatctcttcaagtctgcagactcaaataaacggccctccaccttaggaagccagttcaaacagtctctggaccagctgatgaaaatcctgaccaactgccagccttacttcatccgctgcatcaaacctaatgagtacaagaagccgctgctgttcgaccgggagctgtgcctgcggcagctgcgatactcgggcatgatggagaccgtgcacatccgcaagtcgggcttccccatccgctacacgttcgaggagttctcgcagaggttcggcgtgttgctgcccaacgccatgcggatgcagctgcaaggcaagctccgccagatgaccctgggcatcactgacgtgtggctgcggacagacaaagactggaaagcggggaagacaaaaattttcctgagggatcatcaggacactctgctggaggtacagagaagccaggtgctagacagagcggcgctcagcatccagaaagtccttcggggctacagatacaggaaggagttcctgaggcagaggcgggcagctgtgaccctgcaggcctggtggagaggctactgcaacaggaggaatttcaagctgatcctcgtgggctttgagcgcctgcaggctattgcccggagccagccgctggcgaggcagtaccaggccatgcggcagaggacagtccagctgcaggccctgtgcaggggatacctggtgcgccagcaagtccaggccaagaggagggcagtggtggtcattcaggcccatgccaggggcatggctgcccggcgcaacttccagcaaaggaaggccaatgcgccgctggtcatcccggccgaggggcagaaaagccaaggcgctctccctgccaagaagcgcagatccatctacgacaccgtcactgacacggagatggtggagaaggtgttcggcttcctccctgccatgattgggggccaggagggccaggcctcgccgcactttgaggatctggaatcgaagacccagaagctgcttgaggttgacctggacacagtccccatggcggaggagcctgaggaggatgtggatggcctggccgagtacaccttccccaagtttgctgtgacttacttccagaaatcagccagccacacacacatccggcggcccctccgatacccgttgctttaccacgaagatgacactgactgcttggccgccctggtcatatggaacgtcatcctgaggttcatgggtgatctcccagagccagtgctgtatgccaggagcagccagcagggcagctcagtgatgcggcagatccatgacacgctgggcagggagcacggtgcccaggttccacagcacagtagatctgcacaggtggccagccagctgaacattggagaggaggcattggagcctgatggccttggtgcagaccggcccatgtccaacctggagaaggtgcacttcatcgtgggctacgccatcctgcggcccagcctcagggatgagatttactgccagatctgcaagcagctctcggagaacttcaaaacaagcagcctggcccggggctggatcctgctcagcctctgcctcggctgcttcccaccctcagagaggttcatgaagtatctactgaacttcatcggccaagggccggcgacctacggccccttctgtgccgagcgcctgagacgcacctatgccaatggggtgcgtgcggagccccccacctggctggagctgcaggctgtcaagtccaagaagcacatccccatccaagtcatcttggccactggagagagcctaaccgtccccgtggactcagcctccacatctcgggaaatgtgcatgcacatcgctcacaagcagggcctcagcgaccacctgggcttctccctccaggtcgccgtgtacgacaagttctggtccctgggcagcgggcgcgaccacatgatggatgccatcgcccggtgtgagcagatggcccaggagaggggcgagagccagcgccagtcaccctggcgcatctacttccggaaggaattcttcaccccctggcacgactcccgggaggaccctgtcagcaccgagcttatttaccgccaagtcctccgaggagtctggtctggcgagtacagcttcgagaaggaggaagagctggttgagctgctggcccggcactgctacgtgcagctcggcgcctcagcagagagcaaggctgtccaggagctgctgcccagctgcatcccccacaagctgtacaggaccaagcccccagacaggtgggcgagcctcgtcactgccgcctgcgccaaggccccatacactcagaagcaagtcacaccactggccgtgcgagagcaggtggtggacgccgcccgcctgcagtggccgctgctcttctcccggctcttcgaagtcatcacactctcaggcccccgcctgcccaagacgcagctgatcttggctgttaactggaaggggctttgcttcctggaccagcaggagaagatgctgctggaactctctttcccagaggtcatgggtctggccaccaacagggaggcccagggcgggcagaggctgctgctctccacgatgcatgaggagtacgagtttgtgtcacccagcagtgtggccatcgctgagctggtggccctgttcctggagggcctgaaggagaggtccattttcgccatggccctgcaggacaggaaggccacagatgacaccaccctcctggccttcaagaagggggacctgttggtcctcacaaagaagcaggggctgctggcctctgagaactggaccctcggccagaacgacaggacaggcaagacggggctggtgcccatggcctgcctctacaccatccccacggtcactaagccctcggcacagctgctgagcttgcttgccatgtcaccagagaagaggaagctggcggctcaggaggggcagttcacagagccacgtcctgaggagccacccaaggaaaagctgcacaccctggaggagttctcctatgagttcttcagggctccagagaaggacatggtgagcatggccgtgctgcccctggcccgtgcccgtggccacctgtgggcctattcctgcgagccgctgcgacagccgctgctcaagcgagtccacgccaacgtcgacctctgggacatcgcctgccagatctttgccacacccatcctccggtacatgggcgactacccttctcggcaggcctggcccaccctggagctcaccgaccagatcttcacactggccctgcagcacccggccctccaggacgaggtctactgccagatcctgaagcagctgacgcacaactccaacaggcacagcgaagagcggggctggcagctgctgtggctgtgcacgggcctcttcccgcccagcaaggggctgctgccccatgcccagaagtttatagacactcggagggggaagctgctggcccccgactgcagccgccgaatccagaaggtcctgaggacggggccccggaagcagcccccgcaccaggtggaggtggaggccgcagagcagaacgtctcccgcatctgccacaagatctacttccccaatgacaccagtgagatgctggaggtggttgccaacacacgggtgcgggatgtgtgtgacagcattgccaccaggctgcagctggcctcctgggagggctgcagcctcttcatcaagatttcagacaaggtcatcagccagaaggagggagacttcttctttgattccttgagggaggtgtctgactgggtgaagaagaacaagccccagaaagaaggggcccccgtgacgctcccctaccaggtgtacttcatgcggaaattgtggctcaacatatctccagggaaggatgtgaatgcagacaccatactccattaccaccaggagctgcccaagtacctgcgcggattccacaagtgttcgcgggaggatgccatccacctggcgggcctcatctacaaggcccagttcaacaacgaccggtcccagctggctagtgtccccaagatcctgagggaactggtgcctgagaacctcacacgcctgatgtcctcggaggagtggaaaaagagcatccttctagcctatgacaagcataaggacaagacagtggaggaggccaaggtggccttcctgaagtggatctgccggtggcccaccttcggatccgccttcttcgaggtgaagcaaacctcggagccttcctacccggacgtcatcctcatcgccatcaaccgacatggggttctgctcatccaccccaagaccaaggacctgctcaccacctatcccttcaccaagatctccagctggagcagcggcagcacctacttccacatggcgctggggagcctgggccgtggcagccgcctgctgtgcgagacctccctgggctataagatggatgacctgctgacctcatatgtgcagcagctcctgagtgccatgaacaagcagcggggctccaaggccccagccctggccagcacctagcagcggatgctggcgtgtctgctcaggcgcccttcccgacctctagcctggcggcaccttcccaggccctctcaacccagggcctgtccttggcgggcagccttccatgctgccccccatacaaagcccactcagccccgcaggcggccccctctgtcctgggcgctgcccagggaggccaaaagacgggcccagaatggggtcgggagtctcggacccccaggctattggtggatgactgactgacaggacacctcccaaccccaccccaccccaccagaatgttcaataaaaactcctggagcaggaga

SEQ ID NO: 36866 - DNA, 6694 bp, Artificial Sequence
  derived and/or modified sequence
tccatacaggcttgtggaactgctgactcaggatgtcggggttcaggctgggtgaccacgtgtggctggagcctccctccacccacaagaccggcgtggccatcgggggcatcatcaaagaggcaaagccaggcaaagtcttggttgaagatgacgagggcaaggaacactggatccgagcagaggactttggtgtcctcagtcccatgcaccccaactcagtccagggtgtggacgacatgatccgcctgggggacctgaacgaggcaggcatggtgcacaacctcctgatccgctaccagcagcacaagatctatacatacacaggctccatcctggtggccgtcaacccgttccaggtgctgccgctctacaccctggagcaggtacagctctactacagccgccatatgggcgagctgcccccgcatgtctttgccatcgccaacaactgctacttcagcatgaagaggaacaagagggaccagtgctgcatcatcagcggcgagtctggggctggcaagacggagaccaccaagctcatcctgcagttcctggccaccatcagtggccagcattcgtggattgagcagcaggtcctggaagccaaccccatcctggaggcctttggaaatgccaagacaatccgcaacgacaactcaagccgctttgggaagtacattgacatctactttaaccccagcggggtgatcgagggcgcgcgcatcgagcaatttctcctggagaagtcccgggtctgccggcaggctcccgaggagcggaactaccatatcttctactgcatgctcatgggggtgagtgctgaggacaagcagctgctgagcctgggcacgccctccgagtaccactacctgaccatggggaactgcacttcctgtgaggggctcaacgacgccaaggactacgcccacatccgctcggccatgaagatcctccagttctccgactccgagagctgggacgtcatcaagctgctggctgccattctccacctggggaatgtggggttcatggcttcggtcttcgagaacctggacgcctcagacgtgatggagacgcccgcctttcccaccgtgatgaagttactggaggtgcagcaccaggagctccgggactgtctgatcaagcacaccatcctcatccgaggggaatttgtcaccaggtccctgaacattgcccaggctgctgaccggagggacgcctttgtcaagggcatctatgggcacctcttcctgtggattgtcaagaagatcaatgccgccatcttcacaccaccagcccaggaccccaaaaatgtgcggagggccatcggcctcctggacatatttggctttgaaaatttcgagaacaatagcttcgagcagctctgcatcaacttcgccaacgagcacctgcagcagttctttgtgcagcacgtgttcaccatggagcaagaggagtaccgctcggagaacatctcctgggactatatccactacaccgacaatcggcccaccctggacctgctggccctcaagcccatgagcatcatctccctcctggacgaagaaagccgcttcccgcaggggacagatctcaccatgctgcaaaagctgaacagcgtccatgccaacaacaaggccttcctacagcccaagaacatccacgatgccagatttggcattgcccattttgccggcgaggtgtactaccaagcagaaggcttcctggagaagaaccgagacgtgctgagcacagatatcctcaccctggtttactcctccaaaaacaagtttctgagggagatattcaacttggagttagcagagaccaagctgggccatgggaccatccgccaggcaaaggcaggaaaccatctcttcaagtctgcagactcaaataaacggccctccaccttaggaagccagttcaaacagtctctggaccagctgatgaaaatcctgaccaactgccagccttacttcatccgctgcatcaaacctaatgagtacaagaagccgctgctgttcgaccgggagctgtgcctgcggcagctgcgatactcgggcatgatggagaccgtgcacatccgcaagtcgggcttccccatccgctacacgttcgaggagttctcgcagaggttcggcgtgttgctgcccaacgccatgcggatgcagctgcaaggcaagctccgccagatgaccctgggcatcactgacgtgtggctgcggacagacaaagactggaaagcggggaagacaaaaattttcctgagggatcatcaggacactctgctggaggtacagagaagccaggtgctagacagagcggcgctcagcatccagaaagtccttcggggctacagatacaggaaggagttcctgaggcagaggcgggcagctgtgaccctgcaggcctggtggagaggctactgcaacaggaggaatttcaagctgatcctcgtgggctttgagcgcctgcaggctattgcccggagccagccgctggcgaggcagtaccaggccatgcggcagaggacagtccagctgcaggccctgtgcaggggatacctggtgcgccagcaagtccaggccaagaggagggcagtggtggtcattcaggcccatgccaggggcatggctgcccggcgcaacttccagcaaaggaaggccaatgcgccgctggtcatcccggccgaggggcagaaaagccaaggcgctctccctgccaagaagcgcagatccatctacgacaccgtcactgacacggagatggtggagaaggtgttcggcttcctccctgccatgattgggggccaggagggccaggcctcgccgcactttgaggatctggaatcgaagacccagaagctgcttgaggttgacctggacacagtccccatggcggaggagcctgaggaggatgtggatggcctggccgagtacaccttccccaagtttgctgtgacttacttccagaaatcagccagccacacacacatccggcggcccctccgatacccgttgctttaccacgaagatgacactgactgcttggccgccctggtcatatggaacgtcatcctgaggttcatgggtgatctcccagagccagtgctgtatgccaggagcagccagcagggcagctcagtgatgcggcagatccatgacacgctgggcagggagcacggtgcccaggttccacagcacagtagatctgcacaggtggccagccagctgaacattggagaggaggcattggagcctgatggccttggtgcagaccggcccatgtccaacctggagaaggtgcacttcatcgtgggctacgccatcctgcggcccagcctcagggatgagatttactgccagatctgcaagcagctctcggagaacttcaaaacaagcagcctggcccggggctggatcctgctcagcctctgcctcggctgcttcccaccctcagagaggttcatgaagtatctactgaacttcatcggccaagggccggcgacctacggccccttctgtgccgagcgcctgagacgcacctatgccaatggggtgcgtgcggagccccccacctggctggagctgcaggctgtcaagtccaagaagcacatccccatccaagtcatcttggccactggagagagcctaaccgtccccgtggactcagcctccacatctcgggaaatgtgcatgcacatcgctcacaagcagggcctcagcgaccacctgggcttctccctccaggtcgccgtgtacgacaagttctggtccctgggcagcgggcgcgaccacatgatggatgccatcgcccggtgtgagcagatggcccaggagaggggcgagagccagcgccagtcaccctggcgcatctacttccggaaggaattcttcaccccctggcacgactcccgggaggaccctgtcagcaccgagcttatttaccgccaagtcctccgaggagtctggtctggcgagtacagcttcgagaaggaggaagagctggttgagctgctggcccggcactgctacgtgcagctcggcgcctcagcagagagcaaggctgtccaggagctgctgcccagctgcatcccccacaagctgtacaggaccaagcccccagacaggtgggcgagcctcgtcactgccgcctgcgccaaggccccatacactcagaagcaagtcacaccactggccgtgcgagagcaggtggtggacgccgcccgcctgcagtggccgctgctcttctcccggctcttcgaagtcatcacactctcaggcccccgcctgcccaagacgcagctgatcttggctgttaactggaaggggctttgcttcctggaccagcaggagaagatgctgctggaactctctttcccagaggtcatgggtctggccaccaacagggaggcccagggcgggcagaggctgctgctctccacgatgcatgaggagtacgagtttgtgtcacccagcagtgtggccatcgctgagctggtggccctgttcctggagggcctgaaggagaggtccattttcgccatggccctgcaggacaggaaggccacagatgacaccaccctcctggccttcaagaagggggacctgttggtcctcacaaagaagcaggggctgctggcctctgagaactggaccctcggccagaacgacaggacaggcaagacggggctggtgcccatggcctgcctctacaccatccccacggtcactaagccctcggcacagctgctgagcttgcttgccatgtcaccagagaagaggaagctggcggctcaggaggggcagttcacagagccacgtcctgaggagccacccaaggaaaagctgcacaccctggaggagttctcctatgagttcttcagggctccagagaaggacatggtgagcatggccgtgctgcccctggcccgtgcccgtggccacctgtgggcctattcctgcgagccgctgcgacagccgctgctcaagcgagtccacgccaacgtcgacctctgggacatcgcctgccagatctttgtcgccatcctccggtacatgggcgactacccttctcggcaggcctggcccaccctggagctcaccgaccagatcttcacactggccctgcagcacccggccctccaggacgaggtctactgccagatcctgaagcagctgacgcacaactccaacaggcacagcgaagagcggggctggcagctgctgtggctgtgcacgggcctcttcccgcccagcaaggggctgctgccccatgcccagaagtttatagacactcggagggggaagctgctggcccccgactgcagccgccgaatccagaaggtcctgaggacggggccccggaagcagcccccgcaccaggtggaggtggaggccgcagagcagaacgtctcccgcatctgccacaagatctacttccccaatgacaccagtgagatgctggaggtggttgccaacacacgggtgcgggatgtgtgtgacagcattgccaccaggctgcagctggcctcctgggagggctgcagcctcttcatcaagatttcagacaaggtcatcagccagaaggagggagacttcttctttgattccttgagggaggtgtctgactgggtgaagaagaacaagccccagaaagaaggggcccccgtgacgctcccctaccaggtgtacttcatgcggaaattgtggctcaacatatctccagggaaggatgtgaatgcagacaccatactccattaccaccaggagctgcccaagtacctgcgcggattccacaagtgttcgcgggaggatgccatccacctggcgggcctcatctacaaggcccagttcaacaacgaccggtcccagctggctagtgtccccaagatcctgagggaactggtgcctgagaacctcacacgcctgatgtcctcggaggagtggaaaaagagcatccttctagcctatgacaagcataaggacaagacagtggaggaggccaaggtggccttcctgaagtggatctgccggtggcccaccttcggatccgccttcttcgaggtgaagcaaacctcggagccttcctacccggacgtcatcctcatcgccatcaaccgacatggggttctgctcatccaccccaagaccaaggacctgctcaccacctatcccttcaccaagatctccagctggagcagcggcagcacctacttccacatggcgctggggagcctgggccgtggcagccgcctgctgtgcgagacctccctgggctataagatggatgacctgctgacctcatatgtgcagcagctcctgagtgccatgaacaagcagcggggctccaaggccccagccctggccagcacctagcagcggatgctggcgtgtctgctcaggcgcccttcccgacctctagcctggcggcaccttcccaggccctctcaacccagggcctgtccttggcgggcagccttccatgctgccccccatacaaagcccactcagccccgcaggcggccccctctgtcctgggcgctgcccagggaggccaaaagacgggcccagaatggggtcgggagtctcggacccccaggctattggtggatgactgactgacaggacacctcccaaccccaccccaccccaccagaatgttcaataaaaactcctggagcaggaga

SEQ ID NO: 36867 - DNA, 6715 bp, Artificial Sequence
  derived and/or modified sequence
gggagtcagccagacccccatcctgacaaggcttgtggaactgctgactcaggatgtcggggttcaggctgggtgaccacgtgtggctggagcctccctccacccacaagaccggcgtggccatcgggggcatcatcaaagaggcaaagccaggcaaagtcttggttgaagatgacgagggcaaggaacactggatccgagcagaggactttggtgtcctcagtcccatgcaccccaactcagtccagggtgtggacgacatgatccgcctgggggacctgaacgaggcaggcatggtgcacaacctcctgatccgctaccagcagcacaagatctatacatacacaggctccatcctggtggccgtcaacccgttccaggtgctgccgctctacaccctggagcaggtacagctctactacagccgccatatgggcgagctgcccccgcatgtctttgccatcgccaacaactgctacttcagcatgaagaggaacaagagggaccagtgctgcatcatcagcggcgagtctggggctggcaagacggagaccaccaagctcatcctgcagttcctggccaccatcagtggccagcattcgtggattgagcagcaggtcctggaagccaaccccatcctggaggcctttggaaatgccaagacaatccgcaacgacaactcaagccgctttgggaagtacattgacatctactttaaccccagcggggtgatcgagggcgcgcgcatcgagcaatttctcctggagaagtcccgggtctgccggcaggctcccgaggagcggaactaccatatcttctactgcatgctcatgggggtgagtgctgaggacaagcagctgctgagcctgggcacgccctccgagtaccactacctgaccatggggaactgcacttcctgtgaggggctcaacgacgccaaggactacgcccacatccgctcggccatgaagatcctccagttctccgactccgagagctgggacgtcatcaagctgctggctgccattctccacctggggaatgtggggttcatggcttcggtcttcgagaacctggacgcctcagacgtgatggagacgcccgcctttcccaccgtgatgaagttactggaggtgcagcaccaggagctccgggactgtctgatcaagcacaccatcctcatccgaggggaatttgtcaccaggtccctgaacattgcccaggctgctgaccggagggacgcctttgtcaagggcatctatgggcacctcttcctgtggattgtcaagaagatcaatgccgccatcttcacaccaccagcccaggaccccaaaaatgtgcggagggccatcggcctcctggacatatttggctttgaaaatttcgagaacaatagcttcgagcagctctgcatcaacttcgccaacgagcacctgcagcagttctttgtgcagcacgtgttcaccatggagcaagaggagtaccgctcggagaacatctcctgggactatatccactacaccgacaatcggcccaccctggacctgctggccctcaagcccatgagcatcatctccctcctggacgaagaaagccgcttcccgcaggggacagatctcaccatgctgcaaaagctgaacagcgtccatgccaacaacaaggccttcctacagcccaagaacatccacgatgccagatttggcattgcccattttgccggcgaggtgtactaccaagcagaaggcttcctggagaagaaccgagacgtgctgagcacagatatcctcaccctggtttactcctccaaaaacaagtttctgagggagatattcaacttggagttagcagagaccaagctgggccatgggaccatccgccaggcaaaggcaggaaaccatctcttcaagtctgcagactcaaataaacggccctccaccttaggaagccagttcaaacagtctctggaccagctgatgaaaatcctgaccaactgccagccttacttcatccgctgcatcaaacctaatgagtacaagaagccgctgctgttcgaccgggagctgtgcctgcggcagctgcgatactcgggcatgatggagaccgtgcacatccgcaagtcgggcttccccatccgctacacgttcgaggagttctcgcagaggttcggcgtgttgctgcccaacgccatgcggatgcagctgcaaggcaagctccgccagatgaccctgggcatcactgacgtgtggctgcggacagacaaagactggaaagcggggaagacaaaaattttcctgagggatcatcaggacactctgctggaggtacagagaagccaggtgctagacagagcggcgctcagcatccagaaagtccttcggggctacagatacaggaaggagttcctgaggcagaggcgggcagctgtgaccctgcaggcctggtggagaggctactgcaacaggaggaatttcaagctgatcctcgtgggctttgagcgcctgcaggctattgcccggagccagccgctggcgaggcagtaccaggccatgcggcagaggacagtccagctgcaggccctgtgcaggggatacctggtgcgccagcaagtccaggccaagaggagggcagtggtggtcattcaggcccatgccaggggcatggctgcccggcgcaacttccagcaaaggaaggccaatgcgccgctggtcatcccggccgaggggcagaaaagccaaggcgctctccctgccaagaagcgcagatccatctacgacaccgtcactgacacggagatggtggagaaggtgttcggcttcctccctgccatgattgggggccaggagggccaggcctcgccgcactttgaggatctggaatcgaagacccagaagctgcttgaggttgacctggacacagtccccatggcggaggagcctgaggaggatgtggatggcctggccgagtacaccttccccaagtttgctgtgacttacttccagaaatcagccagccacacacacatccggcggcccctccgatacccgttgctttaccacgaagatgacactgactgcttggccgccctggtcatatggaacgtcatcctgaggttcatgggtgatctcccagagccagtgctgtatgccaggagcagccagcagggcagctcagtgatgcggcagatccatgacacgctgggcagggagcacggtgcccaggttccacagcacagtagatctgcacaggtggccagccagctgaacattggagaggaggcattggagcctgatggccttggtgcagaccggcccatgtccaacctggagaaggtgcacttcatcgtgggctacgccatcctgcggcccagcctcagggatgagatttactgccagatctgcaagcagctctcggagaacttcaaaacaagcagcctggcccggggctggatcctgctcagcctctgcctcggctgcttcccaccctcagagaggttcatgaagtatctactgaacttcatcggccaagggccggcgacctacggccccttctgtgccgagcgcctgagacgcacctatgccaatggggtgcgtgcggagccccccacctggctggagctgcaggctgtcaagtccaagaagcacatccccatccaagtcatcttggccactggagagagcctaaccgtccccgtggactcagcctccacatctcgggaaatgtgcatgcacatcgctcacaagcagggcctcagcgaccacctgggcttctccctccaggtcgccgtgtacgacaagttctggtccctgggcagcgggcgcgaccacatgatggatgccatcgcccggtgtgagcagatggcccaggagaggggcgagagccagcgccagtcaccctggcgcatctacttccggaaggaattcttcaccccctggcacgactcccgggaggaccctgtcagcaccgagcttatttaccgccaagtcctccgaggagtctggtctggcgagtacagcttcgagaaggaggaagagctggttgagctgctggcccggcactgctacgtgcagctcggcgcctcagcagagagcaaggctgtccaggagctgctgcccagctgcatcccccacaagctgtacaggaccaagcccccagacaggtgggcgagcctcgtcactgccgcctgcgccaaggccccatacactcagaagcaagtcacaccactggccgtgcgagagcaggtggtggacgccgcccgcctgcagtggccgctgctcttctcccggctcttcgaagtcatcacactctcaggcccccgcctgcccaagacgcagctgatcttggctgttaactggaaggggctttgcttcctggaccagcaggagaagatgctgctggaactctctttcccagaggtcatgggtctggccaccaacagggaggcccagggcgggcagaggctgctgctctccacgatgcatgaggagtacgagtttgtgtcacccagcagtgtggccatcgctgagctggtggccctgttcctggagggcctgaaggagaggtccattttcgccatggccctgcaggacaggaaggccacagatgacaccaccctcctggccttcaagaagggggacctgttggtcctcacaaagaagcaggggctgctggcctctgagaactggaccctcggccagaacgacaggacaggcaagacggggctggtgcccatggcctgcctctacaccatccccacggtcactaagccctcggcacagctgctgagcttgcttgccatgtcaccagagaagaggaagctggcggctcaggaggggcagttcacagagccacgtcctgaggagccacccaaggaaaagctgcacaccctggaggagttctcctatgagttcttcagggctccagagaaggacatggtgagcatggccgtgctgcccctggcccgtgcccgtggccacctgtgggcctattcctgcgagccgctgcgacagccgctgctcaagcgagtccacgccaacgtcgacctctgggacatcgcctgccagatctttgtcgccatcctccggtacatgggcgactacccttctcggcaggcctggcccaccctggagctcaccgaccagatcttcacactggccctgcagcacccggccctccaggacgaggtctactgccagatcctgaagcagctgacgcacaactccaacaggcacagcgaagagcggggctggcagctgctgtggctgtgcacgggcctcttcccgcccagcaaggggctgctgccccatgcccagaagtttatagacactcggagggggaagctgctggcccccgactgcagccgccgaatccagaaggtcctgaggacggggccccggaagcagcccccgcaccaggtggaggtggaggccgcagagcagaacgtctcccgcatctgccacaagatctacttccccaatgacaccagtgagatgctggaggtggttgccaacacacgggtgcgggatgtgtgtgacagcattgccaccaggctgcagctggcctcctgggagggctgcagcctcttcatcaagatttcagacaaggtcatcagccagaaggagggagacttcttctttgattccttgagggaggtgtctgactgggtgaagaagaacaagccccagaaagaaggggcccccgtgacgctcccctaccaggtgtacttcatgcggaaattgtggctcaacatatctccagggaaggatgtgaatgcagacaccatactccattaccaccaggagctgcccaagtacctgcgcggattccacaagtgttcgcgggaggatgccatccacctggcgggcctcatctacaaggcccagttcaacaacgaccggtcccagctggctagtgtccccaagatcctgagggaactggtgcctgagaacctcacacgcctgatgtcctcggaggagtggaaaaagagcatccttctagcctatgacaagcataaggacaagacagtggaggaggccaaggtggccttcctgaagtggatctgccggtggcccaccttcggatccgccttcttcgaggtgaagcaaacctcggagccttcctacccggacgtcatcctcatcgccatcaaccgacatggggttctgctcatccaccccaagaccaaggacctgctcaccacctatcccttcaccaagatctccagctggagcagcggcagcacctacttccacatggcgctggggagcctgggccgtggcagccgcctgctgtgcgagacctccctgggctataagatggatgacctgctgacctcatatgtgcagcagctcctgagtgccatgaacaagcagcggggctccaaggccccagccctggccagcacctagcagcggatgctggcgtgtctgctcaggcgcccttcccgacctctagcctggcggcaccttcccaggccctctcaacccagggcctgtccttggcgggcagccttccatgctgccccccatacaaagcccactcagccccgcaggcggccccctctgtcctgggcgctgcccagggaggccaaaagacgggcccagaatggggtcgggagtctcggacccccaggctattggtggatgactgactgacaggacacctcccaaccccaccccaccccaccagaatgttcaataaaaactcctggagcaggaga

SEQ ID NO: 36868 - DNA, 2886 bp, Artificial Sequence
  derived and/or modified sequence
atgaagtacctgctgaacttcatcggccagggccccgccacctacggtcctttctgtgctgaacgactgcgccgcacctatgcaaacggagtgagagctgagccacctacatggctggagctccaggcagttaagtcaaagaagcacatccccatccaggtgattctggccactggcgaatcgctgacagtgcctgtcgattccgctagcacatctcgcgagatgtgcatgcatatcgcacacaagcagggattgtctgaccatcttggctttagcctccaggttgctgtctacgacaagttctggtctctcgggagtggacgggatcatatgatggacgccatagccaggtgcgaacagatggcccaggaacgcggcgagagtcagaggcagagtccctggaggatctattttagaaaggagtttttcactccatggcacgacagccgcgaggatcccgtctcaaccgaactcatctatagacaggtgcttagaggtgtatggagtggcgagtactcattcgagaaagaggaggaactggtcgagctcctggcccgccactgttatgttcagcttggggccagtgccgaatctaaagccgtccaggaattactcccctcctgcatcccacataagctttaccgcaccaagccacctgataggtgggcatcactcgtgactgccgcatgcgccaaagccccatatacccagaagcaggtgacgcccctggccgtgagagagcaggtggtggacgccgcccgcctgcagtggcctctcctgttcagcagactgttcgaggtcattacccttagcgccttcactttgcctagcctgctggcaaggccgcctcctgcccaggatgccggaccagcaggagaggatgccgctgggacactctttcccagaggacatggtagtggccaccagcaggtcagagcactgcgagaggacttattcctacacacggagccccacccgcctgccccaggaagaacggctcatgaggtgctgcactggggcatcacaagatgcaccggatctttcagcctgaaaccaaggtctacccggaaaggacagggctcagtgcaacccctcgctggaacataccttgaagggtcattcctgtgccacgggcgtgaacttgtcgcatggagagtgcaggtcgtgtgggagggcgataagggccagtgtctggccggggctgacccgcactctcatggctctccctggattagcttaacggggaacttcagtatgccctttggaaagtctacgcagcagagcggcacttgtattagtggactatgccaagtgtactcaggtcatcatagccccctggcaacctcccccagaagtaccgacagcatcactcatagcgctgacgagagaatgtcaaagctaaaacacgccgaagtccgctggctgagggtctcaacctggcagtcccgacaactgatctccgccttgacattcgcagtttcattaaggtgtcactgtacccccgctacatccctgtcagcccatagccagcctcacacctgggcagcgcctttgtcagcttcagagaggccaaccgtggtcagcggcttggttctggcattggccgagcagctctgcgttcttattcgctggcgcggactcttggttaccctgtcgtttatatcccgcgaggcccagggaggacaaagactgctactgtctacaatgcatgaagagtacgagtttgtcagcccaagctcagtagctatcgccgagctcgtggccctgtttctggaaggcctcaaagagcgcagtatctttgctatggcattgcaggacagaaaggcgactgacgacacaacccttctggccttcaaaaaaggcgacttactcgttctgaccaagaaacaggggctgctcgccagtgaaaactggacacttggacagaacgaccggaccgggaaaaccggtctggtccccatggcgtgcctgtataccatccccacagtcaccaagccttcagcccagctgcttagtctactggcgatgtcaccagagaaaagaaagcttgctgcccaggaaggccagttcacggaaccacggccagaggagcccccgaaagagaaattgcacacactggaggagttttcatacgagtttttcagagccccagaaaaagacatggttagtatggcagtgcttccattggccagggccaggggtcacctgtgggcgtactcctgtgagccccttcggcaaccactactcaaaagagtgcacgcaaacgtggacctgtgggatattgcatgccaaatttttgctactcccatacttagatacatgggagactatccctcccgccaggcatggcccactctggagctcaccgaccagatttttactctggctctgcaacaccccgctttgcaggacgaggtctactgtcagattcttaaacaactgactcataactcgaaccgacactccgaggaacgtgggtggcagctgctgtggctatgtaccggactctttccgccttcaaaaggtctgttgccacacgcacagaagttcatcgataccagacgcgggaagctgcttgccccggattgctcacggcggatacaaaaagtgctcagaaccggccccaggaaacagcccccacaccaggtcgaagtcgaggccgccgaacagaacgtaagccgcatctgccacaaaatctattttccaaacgatacctccgaaatgcttgaggtagtagccaacacgcgggtcagggacgtttgcgactctatcgctactcgactgcagcttgcttcctgggagggctgttcactcttcattaagatctcagacaaggtgatctcccagaaggagggggatttttttttcgattccctacgcgagtag

SEQ ID NO: 36869 - DNA, 6354 bp, Artificial Sequence
  derived and/or modified sequence
atgagcggcttccggctgggcgaccacgtgtggctggagcccccctccactcataagaccggagtggctattggggggataatcaaagaagcaaaacctggtaaagtgctggttgaggacgacgaaggtaaggaacactggatcagggctgaagattttggtgttctctcccccatgcacccaaatagcgtccagggagtcgacgacatgattcggttgggggacctcaatgaagcaggaatggtgcataaccttctgatccgttaccagcaacacaagatttatacctacacgggatctatcctcgtggccgtgaatcccttccaggtgctgccgctttataccctcgagcaagtccaactgtactattcaagacacatgggggagcttccacctcacgtcttcgctatcgctaataactgctatttcagtatgaaacgcaacaagagggaccaatgttgcattatctcgggcgaatccggggctggcaagacagagaccactaaactgatactccagttccttgcaaccattagcggccaacacagttggatcgagcagcaggttttagaagctaatcctatcctggaggcctttggcaacgccaagacaatccggaatgacaacagctctcgattcgggaagtacattgacatttattttaatccctctggagtgatcgaaggcgcccgtattgagcagttcctgctggaaaaatccagggtttgcagacaggcacccgaagaacgcaattaccacatcttctactgtatgctaatgggagtatccgctgaggataagcaactactgtcgctcgggactccctcagaataccactacctcacaatgggcaactgcaccagctgtgaaggactgaatgatgctaaggactacgctcacattcggtccgctatgaaaatactacagttctccgatagtgaatcatgggatgtgatcaaattattggcggcgattctccatctcggcaacgtggggttcatggcatcagtgttcgagaacctggatgcatctgatgtgatggagacacccgcattcccgactgtgatgaagctgctggaggtgcaacaccaggagctgcgggattgcctgatcaagcacactattctgatcaggggtgagtttgttacaagaagcttgaatattgctcaggccgcagaccgcagagatgcctttgtaaaggggatatatggtcatctgtttttgtggattgttaagaaaataaacgccgcgattttcacgccaccggcccaggaccctaagaacgttcgccgtgcaatcgggctcctggacatcttcggtttcgagaactttgagaacaatagcttcgaacagctgtgcattaacttcgcgaacgagcacctccaacagttttttgtccagcacgtgttcaccatggagcaggaggagtaccgaagcgagaacatctcttgggactatattcattataccgacaaccgcccgaccttagacctgctagccctgaagccaatgtccattatctccctgctcgacgaagagtccaggtttccccagggtacagacctcaccatgctgcagaaacttaatagtgtccacgcaaataacaaagcatttttgcagccaaaaaacatccacgatgccaggtttggaatcgcccatttcgcgggcgaagtgtactaccaggctgaggggttcctggaaaagaacagggacgtgttgagtaccgatatcctcactttagtgtactcctcaaagaacaaattcttaagggagatcttcaatctggagctggcggagacgaagctgggccatggcacgatccggcaggccaaagctggcaatcacctttttaagtctgctgactctaataagcggccttctacgctgggttctcagtttaagcagtctctcgatcaattaatgaaaatccttacaaactgccagccttatttcattcgctgtataaagcctaacgagtacaagaagccgctcctttttgacagggaactgtgcctgcggcagctgcgctatagcggcatgatggagaccgtccatatcagaaaaagcgggtttcctataagatacactttcgaggaattctctcaacgtttcggagtcttgttgccaaatgccatgaggatgcagcttcaggggaagctccggcagatgaccctggggatcacagatgtatggttacggactgataaggattggaaggccggcaagactaagatctttctgcgggatcatcaggatacgctcctcgaggtccagcgttctcaggtactggaccgggccgccttgtccatccagaaggtgctgcggggttaccgctatcgcaaagagtttctgaggcagagaagagccgccgtaaccttgcaggcttggtggagaggatattgtaatagacgcaatttcaagctcatcctggtcggattcgagagactccaagcaattgcgagatctcagcccctcgcccggcagtaccaagcaatgaggcagagaaccgtccagcttcaagccctgtgtagagggtatctggtgaggcaacaagtgcaggcaaagagaagagcggtcgtagtgatacaggcacacgctagaggcatggccgccagaagaaacttccagcagagaaaagcgaacgctcctttggtgattcccgccgagggccagaagagccagggcgcgctgccggccaagaagcgacggagcatttacgacactgtgaccgatactgaaatggtggagaaggttttcggctttctaccggcaatgatcggtggccaggaggggcaagctagcccacactttgaggacctcgagagtaagacacaaaagttactcgaagttgacctggatactgtgccgatggcagaagagcctgaagaagatgtggatggattggctgagtacaccttccctaagtttgccgttacctatttccagaagagcgcctcacatacccacattcgaaggccactgcgctatcccctgttataccacgaggatgatacagactgcctggctgccctagtgatctggaatgtgatcctccgatttatgggagatctccctgagcccgttctgtacgccaggagttctcagcaggggtcgagcgtaatgcggcagatacacgacactctgggaagggagcatggtgcccaggtgccccagcatagccgctccgcccaggttgcatctcaattaaatattggcgaggaagctcttgagcccgacggacttggcgctgataggcctatgtccaacctggagaaggtacattttatcgttggttatgccatcctcagaccgagcttgcgggatgaaatttattgtcaaatatgtaagcaactgtcagaaaatttcaagactagttccctcgcaagggggtggatcctcctatctctgtgtctggggtgtttcccgccctccgaaaggttcatgaaatatctcctgaatttcattggccaggggcctgccacatacggaccgttttgcgctgagcggctaagaaggacgtacgccaacggcgttagagccgaacctccaacctggctagaattgcaagctgttaagagcaagaaacacatacccatacaagtgatcctggccaccggagagtccttgacagtccccgtggacagtgcatctacgtcccgtgagatgtgtatgcatattgcccataagcagggattgagtgatcacttaggcttctcccttcaggtggctgtttatgacaagttctggagcctaggtagtggcagagaccatatgatggacgctatcgcacggtgcgaacagatggctcaggaacgtggtgaatcccagagacagtccccgtggcgcatatattttagaaaggagttcttcaccccctggcatgactcccgggaggaccccgttagcacggagctaatctacaggcaagtgctgaggggggtgtggtcaggtgaatactcgtttgagaaggaggaggagctggtagaactgctggccaggcactgctatgtgcaactgggagccagcgcagagtccaaggcagtccaggaactactcccatcatgtattcctcataagctgtacaggactaagccgcccgatcgttgggcctccctggttacagcagcatgtgcaaaggctccgtacactcagaagcaagtgacccccctggcagtgagagagcaagtcgttgacgccgctcggttgcaatggcccttactttttagccgcctgttcgaggtgattaccctgtctggccctcgtctgcctaagactcagctgattttggccgtcaattggaagggactctgttttctggatcagcaggagaagatgttgctagaactctcattcccagaggtcatgggactggcaaccaacagagaggcccagggagggcaacgattactcctgtccaccatgcatgaggaatacgaatttgtctctccttcctccgtggctatcgctgaactggttgctttgttcctcgaagggttgaaggagaggtcgatattcgcaatggcactgcaagaccgcaaggctactgatgataccacacttctggccttcaagaaaggcgacctattggtgctcaccaagaagcagggactccttgccagtgagaactggactcttgggcagaacgatagaacagggaagactgggttggtgccgatggcttgcctgtacaccattccgactgtgaccaagccctccgcacagctgctgagcttacttgccatgtctccagagaagaggaagctggcagcccaggaaggacagtttaccgagccccggccagaagaaccacccaaagaaaagctgcatacacttgaagaattctcatatgagttcttccgggccccagaaaaagacatggtttccatggccgtgcttccgctggcaagagctcgcggccatctctgggcttactcctgtgaacccctccggcaacccctgctcaagcgtgtccatgccaacgtcgacctgtgggacatcgcttgccagatcttcgccactcctatccttcggtacatgggggattacccatctaggcaggcatggccgactctcgaactgaccgatcaaatctttaccctcgcgctacagcacccagcactgcaggatgaagtctattgtcagatcctgaagcagctgactcacaatagcaaccggcattccgaagaaaggggatggcagctgctgtggctctgcacggggttgttccctccatcgaagggactcctgccccatgcccagaagttcatagatacgagacgcggaaagctgctggcaccagactgctcgaggcgaattcagaaagtactgcgtactgggccccgcaagcaacccccccatcaggtcgaagtggaggccgctgagcagaacgtgtctcgcatatgccacaaaatctacttcccgaatgatactagcgagatgctggaggttgtagcaaacaccagggtcagggatgtgtgtgactcaattgccacgcgactgcaactggcctcttgggaagggtgctccttgtttatcaaaatcagcgacaaggtcatttctcagaaggagggcgacttcttctttgactctttgcgcgaggtgtcagattgggtaaaaaaaaacaaaccccaaaaagagggggctccagtcactcttccataccaggtttactttatgagaaagctttggctaaatatttcacctggcaaggacgtcaacgctgatacaatcttgcactaccaccaggagctgcccaagtatctgcgtggatttcataaatgtagtcgggaggacgcaatccatctagccggtcttatctataaggcccaatttaacaatgatcgcagtcagctcgcttcagtgccgaagatcctccgcgagctcgttcctgaaaacctgacccgactgatgtcctcagaggagtggaagaaatcaatcctcctggcctacgacaagcacaaggataaaaccgtggaggaagccaaggttgcgtttctcaagtggatttgccgctggcccaccttcggatcggccttctttgaagtaaagcagaccagcgaaccttcataccccgacgttattcttatagcaatcaacagacacggggtgctcttgattcaccccaagacaaaagacctcttgacgacgtaccccttcacaaagattagttcgtggagtagcggatctacttattttcatatggctctcgggtctctcgggagaggatcaaggctactgtgcgagacatctctgggatataagatggacgacttgcttacgagttatgtgcaacaactgctgagcgcaatgaataaacaaaggggttctaaggcacctgctttggcttctacatag

SEQ ID NO: 36870 - DNA, 6351 bp, Artificial Sequence
  derived and/or modified sequence
atgagcggcttccggctgggcgaccacgtgtggctggagcccccctctacacacaagacgggggtggcgattggagggatcattaaagaggcaaagcccggcaaggtgctggtagaggacgacgagggaaaggaacattggattcgggccgaggatttcggcgtcctctcccccatgcatccaaactcagtgcagggcgtggacgatatgatccggctcggcgatctcaacgaagccggcatggtgcataatctgcttattaggtaccagcagcacaagatatacacctataccggaagcatcctggtagcagttaatcccttccaagttttgccgctatatacgctcgagcaggtccagctgtactactccagacacatgggggagctgccaccccatgtgtttgctatagctaacaactgctacttttccatgaagagaaacaaaagggatcaatgctgcattatttctggggaatccggcgccgggaagactgaaaccacaaagttgattctgcagttcctcgccacgatctccggtcagcatagctggatcgagcaacaagtgcttgaggccaatccgattttggaggcttttgggaacgcaaaaacaattcggaacgacaatagctctcgcttcggcaaatacatcgatatctacttcaatccatctggggttattgagggcgctcgcattgagcagtttctgttggagaagagccgcgtgtgccgccaggcccctgaagaacgtaattatcatattttttattgcatgctgatgggtgtgtcagcagaggacaagcaactgctgagcttagggacaccatctgagtatcactatctaaccatgggaaactgtacaagctgcgagggcctaaacgatgcgaaggactatgcgcatatccgttcagccatgaaaattctccagttttccgactcagaatcctgggacgtaatcaagctccttgctgccattctgcacctgggaaatgtgggcttcatggccagcgtattcgaaaatctagatgcctccgatgttatggagaccccagcatttcctaccgtgatgaaactccttgaagtccagcaccaggagctcagggactgccttatcaagcacacaatcctgatacgaggtgaatttgtgacaagatcactgaatatcgcccaggccgcggacagacgggatgccttcgtgaagggtatctacggccacctgtttctctggatcgttaagaaaatcaacgctgccatctttactcccccggcgcaagacccaaaaaacgtgagaagggccatcggcctcttggatatcttcggctttgaaaacttcgagaataacagttttgagcagctgtgcatcaactttgccaacgaacaccttcaacaatttttcgtgcagcacgtgttcacaatggaacaggaagagtatcgatcggaaaacattagttgggattatatccattatacagacaaccgtcccaccctcgatctcttggcactaaaaccaatgagcatcatatccctgctggacgaggagtccagattcccgcaagggacagatcttactatgctgcagaaacttaattccgttcacgccaacaataaagccttcttacaacctaagaatattcacgacgcccgttttggtattgcccacttcgctggagaggtgtattaccaagctgaaggctttctggaaaagaacagggacgtgctcagcaccgatattcttacccttgtttactcaagcaaaaataagtttctccgagagatctttaatctggaactggccgaaaccaagctgggccacggcacaattcgccaggctaaagctggaaaccacttattcaaatccgccgactcgaacaagcgcccttccacactgggcagccagttcaagcaaagtctcgatcagctgatgaagattctgacaaattgccagccgtactttatccgctgcatcaaacccaatgagtataagaaacccctgctgttcgatagggaactgtgcctgaggcagctccgatattctggaatgatggaaacagtgcatatcagaaagtcagggtttcccataaggtacacatttgaggaattttctcagagatttggggtgctgttgccgaacgccatgcgaatgcagctccaggggaagctgcggcagatgaccctcggaatcacagatgtgtggcttcgaacagacaaggactggaaggcaggcaagaccaaaatcttcctcagagaccatcaggacaccctacttgaggtgcagaggagccaagtgctcgacagggctgctctgtcaattcaaaaagtgctccgtgggtatagataccggaaggagtttctacgtcaacgaagggcggctgttacattgcaggcatggtggcgcggatactgtaacagaaggaacttcaagttgattctcgttggttttgaaagactgcaggcgatcgcaaggtctcagcctctcgcaaggcagtatcaggccatgcggcaacgcaccgtgcaacttcaggcactgtgtcgaggctatctggttaggcagcaggtacaggcaaaaagacgcgccgtcgttgttatccaagctcacgcacgggggatggctgctaggagaaacttccagcagcgtaaggctaacgctcctttggtcatccctgctgaaggtcagaagtcgcaaggtgcgcttcctgcaaagaaacggcgaagcatatacgacaccgtgaccgacacagagatggtggagaaggtctttgggtttctgccggctatgatcggtgggcaggagggtcaggcttccccccattttgaggacctggagtctaaaactcaaaagctgctggaggttgatctcgacaccgtgccaatggctgaggaacctgaggaggatgtcgatggcctggccgaatacactttcccaaaatttgcagtgacatacttccaaaaaagtgcctcccacacccatataaggcgccccctgcggtatcccttgctataccacgaagacgataccgactgcttagccgcactggttatttggaacgttattcttcggttcatgggcgatctgccagagcctgtgctgtacgccaggtcctctcaacagggatcttcggttatgcgccaaatacatgacacactgggtagggagcacggcgcacaggtaccgcagcattctcgaagcgcgcaggtcgccagccaactcaatatcggcgaagaggctctggaacctgatggccttggcgccgacaggcctatgtccaatctggaaaaagtccactttattgtggggtacgccatactacgtccctctctgcgggacgaaatctattgtcagatatgtaaacagctctccgagaactttaaaacgtcatctctggccagaggttggatacttctctcactgtgtctgggctgctttccgccgtccgagcgttttatgaaatacctgctgaacttcattggacaaggccctgccacatacggacccttttgtgcagagcgactgcggcgaacttatgcgaatggcgttcgcgctgaaccaccgacgtggttggagctgcaagctgtgaagtccaaaaagcatattcctatacaagttatcctggctacaggtgaaagcctcacagtgcccgtcgatagcgcatccacctcaagagagatgtgtatgcacattgctcataagcaggggctgtcagaccatctgggattcagcttacaggtcgcagtttatgacaagttttggtctctaggaagtggccgtgatcacatgatggatgccattgcccggtgtgagcagatggctcaggagaggggagagtctcagagacagagcccatggcgcatttatttcaggaaagagttcttcaccccgtggcatgattcacgggaagatcctgtttccaccgagctcatctaccgacaggttcttcgtggcgtttggtcaggcgaatattcattcgagaaggaagaagagctggtagaactgctggccaggcattgctacgtacaactgggcgcaagcgcagaatctaaggcagtacaggaactactgccctcctgtataccgcacaagctgtataggactaaacctccagacagatgggctagccttgttacggccgcgtgtgctaaggctccctacacgcagaagcaggtgacacccctggctgtgcgtgagcaggtcgtggatgctgccagactccagtggccgctcctattttccagattgttcgaggtgattacattgtctggtccccgcctgcctaagactcagctgatcttggccgtaaattggaaagggctctgtttcctcgaccagcaggaaaagatgctcctggagctctctttccctgaagtcatgggactggcgactaatagggaagcccaaggaggacagcggcttctcctttctactatgcatgaagagtacgagtttgtgtctccctcctccgtcgccatcgcagagctcgtggctcttttcttggagggcttgaaagagcgctcaatttttgcaatggccctgcaggatcgaaaagccaccgacgacacaactctactggcgttcaaaaagggcgatctcctcgtgctaaccaagaaacagggactgctcgccagcgagaattggacgctggggcagaacgacagaactggcaaaaccggactcgtgccaatggcctgtctctacaccatccccaccgtaacaaaaccttcggctcagttgctgtcgctgttggccatgtcacccgaaaagcggaagctggccgcccaggaggggcaatttacggagccacggccggaggagcctcctaaagagaagcttcatacccttgaagagttctcgtatgagttctttcgagctccagagaaggatatggtctctatggccgtgctacccctggcgagggcacgcgggcacctgtgggcatatagttgcgagcccttgcggcagcccctgctcaagcgggtgcatgcaaacgtggatctgtgggatatagcctgtcagatctttgtggccattttacgttatatgggcgattaccctagtagacaggcctggcccacgctggagttgaccgaccagatattcaccctcgccttgcaacaccccgctttgcaggatgaggtctattgtcagattctcaaacagctgacacacaattctaaccgacattcagaagaaaggggctggcaacttctgtggctttgcacaggtttgttccccccctcaaagggacttctgccccacgcacagaagtttattgatacacggcgggggaaacttctggcccccgactgtagtaggaggattcaaaaggttctccgaaccggaccaaggaagcagcctccgcaccaggtggaggtcgaggcagcagagcagaatgtctcgagaatttgtcacaagatctatttccctaatgacaccagtgaaatgctagaagtagtggccaatacacgcgtgagagacgtgtgcgattcaatcgctacacgactgcagctcgcttcctgggagggatgctcactgttcataaaaatctctgacaaggtgatctcccagaaggagggtgattttttcttcgacagtctccgcgaagtctctgactgggtgaaaaaaaataagccacagaaggaaggggcgccagttacactgccgtaccaggtttacttcatgcgcaagctgtggcttaacattagtccaggcaaagacgtgaacgcagatactattctacactaccatcaggagctgcccaaatacttgagagggtttcacaagtgctccagagaggatgccattcacctcgccggcttgatctacaaggcacagtttaacaacgatcgcagccagctggcaagtgtgccaaaaatactcagggagcttgtgcctgaaaacctgacacggctgatgtcgtccgaagagtggaagaagtccatcctcctcgcttatgacaagcacaaagataagactgttgaggaggctaaggtggcattccttaaatggatttgccggtggcctactttcgggtcagcattcttcgaggtcaagcagaccagcgagcccagttaccccgatgtgatcttaatcgctataaatcggcatggagtgctgcttatccacccaaaaaccaaggacctgttaacaacatacccgttcaccaaaattagctcctggtcaagcggttccacctacttccacatggcattgggaagtctgggccgggggtccagattgctgtgcgagacaagtctgggatataaaatggatgaccttcttacaagctatgtccagcagctcctgagcgccatgaacaagcagcgcggaagcaaggctcctgcactggctagcacttag

SEQ ID NO: 36871 - DNA, 6351 bp, Artificial Sequence
  derived and/or modified sequence
atgagcggcttccggctgggcgaccacgtgtggctggagcccccctcaacacataagacaggcgtggcaatcgggggcataatcaaggaagcaaagcccggtaaagttctcgtagaggatgatgagggcaaggaacattggatcagagcagaagactttggggtgcttagccctatgcacccaaatagcgtacaaggagtggatgatatgatccgtctgggcgacctgaacgaagcggggatggtgcacaacctcttgatcaggtaccagcaacacaagatctatacatatactggaagcatcttggtggcagtgaatccctttcaagttctgcctttatacaccctggaacaggtgcaattatattactctagacacatgggagagttaccgccacatgtctttgctattgctaataactgctatttctcaatgaaacggaataagagggaccaatgctgcattatttctggagagtctggcgctggaaagaccgaaacaacaaaattgattctgcaattcctggccactatttcaggccagcacagttggatcgaacagcaggtcctcgaggccaaccccatcctcgaggcttttggtaatgctaaaaccatcagaaacgataactcatctagattcggaaaatacatagacatttacttcaatccttctggcgtgatcgagggagcccggattgagcagttcctcctcgagaaatctcgcgtctgtaggcaagcccctgaggagcgaaactaccatattttttactgcatgttgatgggcgtcagtgcagaagacaaacagctcttgtctttgggaaccccatccgaatatcactatctcacgatgggcaactgcacgagttgcgaaggactgaacgatgccaaggactacgcccacattagaagtgctatgaagatactgcagttttctgatagcgaatcatgggatgtgattaaactcctggccgccatcctgcatcttgggaatgtcggcttcatggcatctgttttcgagaacctggatgcctctgatgtgatggagaccccggcatttccgaccgtcatgaaactgctggaagttcagcatcaggaacttcgcgactgcctaattaaacacacaattctgattcgcggcgaatttgtgacccgatctctcaacatagctcaggccgcagatcgcagggatgctttcgtcaaggggatctacggacatctcttcctatggatcgtgaagaagatcaacgccgccatattcaccccgcctgctcaagatcccaagaatgtgcggcgggctattggattgttggacatcttcggctttgaaaacttcgaaaataatagctttgaacagctttgcatcaattttgcgaacgagcacctgcaacagtttttcgtccagcatgtgtttacaatggaacaggaagagtacagatctgagaacatatcatgggattatatccattacaccgacaatcggcctactttagatttgcttgccttgaaacctatgtccattattagcttgctcgacgaagagtcacgctttccccaagggacagaccttacaatgcttcagaagctcaattcagttcatgcgaataacaaggctttccttcaacccaaaaacattcatgacgctaggtttggcattgcccatttcgctggcgaagtgtactatcaagcagaaggtttcctggaaaaaaaccgggatgtgttatccaccgacattttgacgctggtctattcttcaaagaataagttcctgcgggagatctttaacttagagttggccgagaccaaactggggcatggaacaattaggcaggccaaggctggtaaccacctgtttaagtcagccgactctaacaaaaggccgtccacccttggaagccagtttaaacagagcctggatcagctgatgaaaattctgactaactgccagccttattttattcggtgtattaagcctaacgaatataagaaacctcttctattcgatagagaattgtgtctgaggcagctccgatacagcggaatgatggaaacagtgcatatcagaaaatccgggttcccgatcaggtatacttttgaagagttttcacagcggtttggcgtgctgctgcccaatgctatgcggatgcagctccagggaaaactgagacagatgacactcggcatcaccgacgtgtggttacgaacagacaaggactggaaagccggtaagaccaaaatttttctgcgtgatcaccaggacactcttctggaagtccagcggtcccaggtactggacagggctgcattgtctatccaaaaagtcctgaggggttacagataccgcaaagagtttctgaggcagagacgggccgcagtcactttgcaagcttggtggcgtggctactgtaatagacggaactttaaactgattcttgttggatttgaacgcctacaggccatagcccgtagccagccgctggctcgccagtatcaggccatgaggcagcgcacagtgcagctgcaggcgctctgtcggggctatttagtacggcagcaggtccaggctaagcggagagcggtggttgtgattcaggcccatgcccgtgggatggcagcccgtcgcaatttccaacagaggaaggccaatgctcccttggtgatccctgccgaggggcaaaaatctcaaggcgcactaccagctaaaaagcgccgctccatttacgacacagtgactgatactgaaatggtggagaaagtgttcggatttcttccggccatgattggcggccaggagggccaggcctccccccactttgaggacctcgagagcaagacacagaagctgttggaggtggatctggataccgtgcccatggcggaagagcctgaggaggatgtcgacggattagctgagtacacatttccgaagtttgctgttacttatttccagaagtctgcctcccacacccacatccgaaggccactgcggtacccacttctatatcatgaagacgatacggattgtttagccgcactcgttatctggaatgtaatactgcgcttcatgggggacttgcccgagccggttctttacgcgcggtcgtctcagcagggcagttcggtgatgagacagattcatgacaccctgggtcgggagcacggcgcccaagtgccacagcattccaggtccgcccaggtggcttcacagctgaatattggcgaggaggctctggaaccagatggacttggtgccgaccgccccatgtccaacctagagaaggtccactttattgtgggatatgccatactcaggccctccctgcgtgatgagatctactgtcagatatgtaaacagctgtctgaaaattttaagacctcatccctcgccagagggtggatcctgctcagcctttgtttaggttgctttccaccatctgagagatttatgaaatacctattgaacttcattggtcagggcccagccacctacggccctttctgcgctgaacggttgagaagaacatacgctaacggagttagagcagagccgcccacctggctggaactccaagcagtgaaatcaaagaagcatatcccgatccaggtgattctcgccactggcgagtcccttaccgtccctgtggactctgcatctacctcaagagaaatgtgcatgcacatcgcacacaagcaaggcctgtccgatcatttgggcttctccctacaggtggccgtatatgacaagttctggagtctgggcagcgggagagaccacatgatggacgcgatcgcacgctgtgaacagatggcccaggagcgcggcgagtcacagcggcaaagtccatggcgtatctactttcggaaagagttcttcaccccttggcacgatagtcgcgaagatcctgtttcaacagagctcatatataggcaggtgctcagaggcgtgtggagtggggagtacagctttgagaaagaggaagagctggttgaactgctggcgagacattgctacgtgcagctaggagccagtgctgagagcaaagcagtgcaggagctcctcccctcctgcattccccacaagctgtaccgcacaaagcctccagaccggtgggcctctctggtcactgctgcctgtgcaaaagccccgtacacacagaagcaagtaacaccactcgctgtacgggaacaagtggtcgatgcagcacgcctgcagtggccccttctcttctcccgactgtttgaggtgatcaccctgtcaggccctcgactccccaaaacacagcttattcttgccgtgaattggaaaggattatgtttcctggatcagcaagagaagatgctcctcgagctttcattccctgaagtaatgggattggcaaccaaccgggaagcacaagggggccagcgattgctgctgagcacaatgcatgaggagtacgaattcgtcagcccttcctccgttgcgatcgccgagctggtggcgctgtttcttgaaggtttgaaagaaaggtcaatctttgccatggcactgcaggacaggaaggctacagatgacaccactctgctagctttcaaaaagggcgatttattggttctgaccaagaagcaggggctcctagcgtcagaaaattggactctgggacaaaacgatcgaacaggcaaaacaggcctcgtccccatggcttgtttatatacgatcccgaccgtcacaaaaccctccgctcagctcctgagtcttctcgcaatgtccccagagaaaaggaagctggcggcgcaggagggacagttcaccgaaccacgccccgaggaaccccctaaggagaagcttcacacgctggaagaattttcctacgaatttttcagggcacccgagaaagatatggtgtcgatggccgtcctacctctggccagagcgcgcggtcacttgtgggcgtattcttgtgaacccctgcggcaaccccttctcaagagggtccacgctaatgtcgacctctgggacatcgcctgtcagatcttcgtggctatccttaggtatatgggggactacccaagtcggcaggcttggcccacactagagctgacagaccagatattcactctggccctgcagcacccagcactgcaggatgaggtgtactgtcaaatcctgaagcagctaacacacaattccaacaggcactcggaggaacgaggctggcagcttctgtggctgtgtactgggctctttcctccgagtaaaggattactgccccacgctcaaaaattcattgacactaggcgaggcaagctgctcgcgccagactgcagtcgacggatccaaaaagtactgagaacggggcctaggaaacaacctcctcatcaagtggaagtggaagcagccgagcaaaacgtgagccggatttgtcataagatctacttcccaaacgataccagcgagatgctggaggttgtggctaacacaagggtaagagatgtttgcgactccatcgcgacacgtctgcagctggcatcttgggaggggtgctccctgtttataaagattagcgacaaggtgatcagtcagaaagagggagatttttttttcgatagtcttagggaagtgagcgactgggtgaagaaaaacaaacctcagaaggagggagctccagtcaccttaccttaccaagtgtactttatgcgcaagctgtggctgaatatcagccccgggaaagatgtcaatgccgacaccattctccattaccaccaagagctgcccaaatatctcagaggtttccacaaatgctcccgtgaagatgcaattcacctcgctggattgatatacaaggctcaatttaacaacgacaggagccagctagcctctgtgcccaagatcctaagagagttggtccccgagaacctcacacggctgatgagttccgaagagtggaaaaagagcatcttactggcatacgacaagcataaggataagacagtggaagaggcgaaagtggcattcctgaaatggatttgccgctggcccacttttggttcggccttcttcgaggtgaaacagacatctgagccttcataccctgacgtgattctgatcgccattaaccgccacggggtcttgttgatccaccccaaaaccaaagatttacttacaacgtatccttttaccaaaatttccagttggtcttcaggcagcacctactttcacatggccctcggctccctcggtcgtggctccaggcttctgtgcgagacatcccttggctataagatggatgatctgctgacatcctacgtgcaacagctgttatccgcgatgaacaagcaacgcggtagcaaggccccagcgctcgccagtacctag

SEQ ID NO: 36872 - DNA, 2886 bp, Artificial Sequence
  derived and/or modified sequence
atgaaatacctgttaaacttcattggccagggcccagccacatatggacccttctgcgcagagagattgcgcaggacatatgcaaacggggtgcgcgctgagccgcctacctggctcgagcttcaggctgtgaaaagtaagaaacacattccaatccaggtcatccttgccaccggagagtctctgactgtgcccgtggattcagctagcacatcaagggagatgtgcatgcatatcgctcacaagcagggcctctcagatcacttagggttctctctgcaggtggcagtgtacgacaagttctggagcctagggtctggtagagatcacatgatggacgcaatagcccgatgtgaacagatggcccaggaacggggagaaagtcaacgccagtctccttggcgaatatactttcgaaaagaattttttacaccctggcacgacagccgcgaagatcctgtctctacagagttgatctaccggcaagtcctgaggggggtgtggtccggggagtactcgtttgagaaagaggaagagctggtggaactgcttgcccgacattgttacgtccagctgggagcgtccgctgagtctaaggcggtgcaggagctgctgccatcatgtatcccccacaagctctacagaacaaagccacccgaccgttgggcaagcctagtgacagccgcttgtgctaaggctccctacacacagaagcaagtcacacctctggctgtgcgagagcaggtagtcgatgccgcaaggttacagtggcctctcttgtttagccgtctgttcgaggtgattactctctccgctttcactcttccgagtctgttggccagaccccctcctgcccaggatgccggaccggctggggaagacgccgcaggaacactattccccagaggacacggatctggacaccagcaggtgagggcgttgcgtgaggatctgttcctccacaccgaaccccatcccccagctcccggtcgaacggcccatgaagtgctgcactgggggattactcggtgtacaggatcattttctctgaagcccagaagtaccaggaaaggtcagggaagcgtccagccactcgccggtacctacctggaaggcagcttcctttgccacggaagagaactggtcgcatggcgagtccaagtggtgtgggaaggcgataagggccagtgtctggccggtgctgatccccactcacatggatccccctggatttctctcactggaaatttcagcatgcccttcgggaaaagcactcagcagtccggtacgtgcatttcaggcctctgtcaagtatacagtggtcatcatagccctctcgcgacttcgccacgctcaacggacagtataactcactctgccgacgaaaggatgtctaagcttaagcacgcagaggtgcgctggctgcgggtgagcacctggcaaagccggcagctgatctcggctctgacttttgccgtgtccttgcggtgccattgcacaccggcaactagcttgtcggctcactcacagcctcacacatgggcagcccctctgagtgcttccgagaggcctaccgttgtttcaggtctggtgttagctctggccgaacagctctgcgtgctgatccgatggcggggtctgctggtgacactgagcttcattagcagggaggcccagggagggcagcgcctgctcctcagcaccatgcatgaagagtatgaatttgtttctcccagttccgtggcgatcgcagagttagtagccttgtttctggaaggattaaaggagcgttcgatttttgccatggctctccaggatcgcaaagccacagacgacaccacattactcgcatttaaaaaaggcgaccttctggtgctgacgaagaagcagggacttctggcttccgaaaattggactctgggacaaaacgacagaaccggaaagactggcctggtgcctatggcctgcttgtacacaattcccaccgttactaagccctccgctcaacttctgagcctgctggcgatgtcacctgagaagcggaaactggctgcccaagaaggccagtttactgaacctagaccagaggagccccctaaggagaagctacacacccttgaggaattcagctacgaattctttcgtgctcccgaaaaagatatggtgagtatggctgtcctccctctcgccagggccagaggtcacctgtgggcttattcatgtgaaccgcttagacagcctctcctcaagcgggtccacgccaatgtcgacttgtgggacatcgcctgccagattttcgctacccccatacttcggtacatgggggattacccttccagacaggcttggcccactcttgagctcaccgatcagatttttacattggctctgcagcaccccgctcttcaggatgaagtatactgtcagatcctgaagcagttgacccataatagtaatcgccacagtgaggagcggggatggcaacttctgtggctgtgcacaggcctttttccaccgtccaagggattactgccccacgctcaaaagttcatcgatactaggcggggaaaactgctagccccagattgctccagacgtatccagaaggtattgcgcaccgggccaaggaagcaaccccctcatcaagtggaagtggaagccgcagaacagaacgtttctcgaatctgccataagatatatttcccaaatgacacttcagaaatgcttgaggttgtggcgaacacacgtgtcagggacgtatgcgacagcatcgcaaccagactgcagctagctagctgggaagggtgctccttatttatcaagatcagcgataaagtgatctctcaaaaggagggcgattttttttttgattcactgagagagtag

SEQ ID NO: 36873 - DNA, 6353 bp, Artificial Sequence
  derived and/or modified sequence
atgagcggctttcgcctcggcgatcacgtctggctggagccaccctccacgcataagactggagtggcaattggtggaataattaaagaagccaaacccggtaaggtgctggtcgaggatgatgagggcaaggaacattggataagagcagaggactttggagttctgagcccaatgcaccctaatagcgtccaaggcgtggacgatatgatccggcttggagacttaaacgaggccggaatggtgcacaatctactgatccggtaccagcagcacaaaatctatacgtacaccggatccatcctagttgccgtgaatcctttccaggtgttacccctgtatacattagaacaggttcagctgtactattctaggcacatgggcgagcttccaccacacgtgttcgccattgcgaacaattgctacttcagtatgaagagaaataagagagatcagtgttgtataatctctggcgaatctggggctggtaaaacagaaacaaccaaactcatcctgcaatttctggccaccatttctggacagcatagttggattgaacagcaggtactcgaagctaatcctatcttggaagcattcggcaacgccaagacaataaggaacgacaactcctcaaggtttggcaagtacattgatatctacttcaatccatcaggggttatcgaaggcgctcgaatcgaacagttcttactggagaagagccgtgtctgcaggcaggctcccgaggagcgcaactatcacattttctattgtatgctcatgggcgtgtctgccgaagataaacagcttctctcccttggcactccatcagaataccactacctcaccatggggaactgtacctcttgcgagggacttaacgatgccaaggactatgcacatatccgatcagctatgaaaattttgcagtttagcgactccgaaagctgggatgtaatcaagttgcttgcagctatcttgcacctaggcaatgtcggcttcatggcctccgtgtttgagaacctcgatgcctccgatgtcatggaaacgcccgctttcccgacagtaatgaaactcctggaggttcagcatcaagaactgagagactgtttaataaagcacacaatcctcatacggggagagttcgttacaagaagtctgaacattgctcaggccgctgatcggagggacgcctttgtgaagggcatatatgggcatctgttcctatggatcgtgaagaagattaacgcagctatctttactcctccagcccaggaccccaagaatgttcggagagctattggcctcctggatattttcggctttgagaacttcgagaacaactccttcgaacaactgtgcatcaatttcgcaaatgagcatctacaacagttcttcgtgcagcacgtttttacaatggagcaggaagagtatcgctcggaaaatatttcatgggactacatccactatacagacaaccggcctactcttgatctcctcgcccttaaacctatgtctataatcagtctgctggatgaagagtctaggttcccacagggcaccgacctcactatgctccaaaagctgaactccgtgcacgccaacaacaaagcattcctgcagccaaagaatattcacgatgctaggttcgggatcgctcacttcgcgggagaggtgtactatcaagccgaagggtttctggagaagaacagagatgtactgtccacagatatcttgacccttgtctattcctccaaaaataagttcctccgtgaaatctttaatctggagctcgcagaaaccaaactgggtcacggcactatcagacaggccaaggcaggtaaccacctgttcaaaagcgctgattctaacaagaggccatcaacattagggagccagttcaagcagagcttggaccagctcatgaaaattctcactaattgtcagccttactttatacggtgtatcaaacccaacgagtataagaagcccctgctttttgatcgcgagctgtgcctgaggcaactgcgatattccgggatgatggagacggtgcatatcagaaagagtggatttcctattcgctataccttcgaagaattctcacagcgatttggcgtcctcttgcccaatgctatgcggatgcagctgcagggtaagcttagacaaatgaccctggggatcaccgatgtctggctacgcacggacaaagattggaaggccggaaagactaagatctttctgcgggatcatcaggacacactcctggaggtccagcgatcccaggtactagaccgggctgcactgtcgatccagaaggtgctgagaggatacagatataggaaagaatttcttaggcagcgtcgcgcagcggtaaccctacaagcatggtggcgcggttactgtaatagacgaaatttcaagcttatcctggtgggctttgagagactccaggctatcgctcgatcgcagccccttgccagacaataccaggccatgcgccagcgaaccgttcagctgcaggccctgtgccggggttacctggttagacagcaggttcaagccaaaagacgagctgtggtggttatccaggctcacgctcgtggcatggcagcgaggagaaacttccaacagagaaaagccaacgcgccactggtgatcccagccgaaggccagaaatctcagggcgctctgccagccaagaaacggaggtcaatttacgacaccgtgactgataccgaaatggtcgaaaaagttttcggattcctgcctgccatgatcggcggacaggaggggcaagctagtccccatttcgaagacctcgaatcaaagacccagaagctcctcgaggtggatctcgatacggttccaatggccgaagagcctgaagaagatgtcgatggccttgctgagtacaccttccccaaattcgctgtgacctactttcagaagagtgctagtcatacacacatcagacgcccattaagatatcccctgctgtatcatgaggacgatacggactgcttggctgccctcgtcatctggaatgttatcctcagattcatgggagatttgcccgagcccgtcctttacgcacgctcaagccaacagggttctagcgtgatgaggcagatccacgatactttgggtcgagagcacggagcccaggttccgcagcacagcagaagcgcccaggttgcctcccagctgaacatcggtgaagaggctttggaacccgacggtctaggtgccgacaggcctatgtccaatctggagaaagtgcactttatagttggctatgcaattttgcgtccatcgttgcgagacgagatctattgtcagatctgtaagcagctgagcgagaactttaaaacaagttccctggcccgaggatggatcctgttatccctgtgcctgggttgttttcctcctagtgagaggttcatgaagtatcttctgaactttatcggccaggggcctgccacgtatggccctttttgcgccgagcgcctgaggcggacttacgcaaacggggtgcgggctgagccccctacttggttggaactgcaggctgtcaagtcaaagaagcacatcccaattcaggtgatactcgccaccggagagagcctgaccgtaccagttgactcggcctctacctctcgagaaatgtgcatgcatattgcgcataagcagggcctgtcagaccatctcggctttagcttgcaagtggctgtctacgacaaattttggagcctgggttctggtagagatcatatgatggacgccatcgctcggtgcgagcagatggcccaggagaggggcgagagtcaaagacagtcaccctggaggatttactttaggaaggaattctttaccccctggcatgactcccgcgaagatccggtcagcactgagctaatctaccgccaggtcttgcgcggtgtgtggtcaggagaatattcttttgagaaggaggaagagctcgtggaacttttagcacgacactgctatgtccagctgggtgccagcgccgagtctaaggctgtgcaggagttgcttcctagctgcatcccccacaagctttaccgtaccaagcctcctgaccgatgggcttccctggtcactgccgcttgcgccaaggccccttacacccagaagcaggtgaccccgctggcagtgagggagcaggtggttgatgctgcacgactccagtggcccttgcttttttcccgcctcttcgaggtgataacactgagcggtccgagactcccaaagacacaactgattctcgctgtcaactggaagggcctttgttttctcgatcagcaggaaaaaatgttgctggagctgtctttccctgaggtgatgggactggcaactaatcgcgaggctcagggcggacagcggctgctgttgagtactatgcatgaggaatatgaattcgtaagcccgagttcagtagccatcgccgagctggttgcactttttttggaaggactgaaagagcgttctatctttgcaatggccttacaagaccgcaaagcaactgatgatacaactctgctagcattcaagaaaggggacttgcttgtccttaccaaaaaacaggggctgctggcaagcgagaactggactcttggtcaaaatgaccgaacaggaaagactggtctcgtacccatggcatgcttgtacactatcccaaccgtaactaaaccttcagctcagctgttgagcctgttggccatgagccctgagaagcggaaattggccgcacaagaaggccagttcacagagccaagaccggaggagccccctaaagagaagttacatacgcttgaggaattttcttatgaattctttcgggcacctgagaaggacatggtttccatggctgtgcttcccctagcgagggcccgtggtcacctttgggcatattcatgtgagcctcttagacagccccttctcaaaagggttcacgccaatgttgacctttgggatatagcttgtcagatattcgccacaccaatcctcagatacatgggtgattaccctagccgccaggcttggcctaccctggaactgactgatcaaatctttactctggctctacagcatccagctctgcaagatgaagtttattgccaaattctaaaacagctgactcataactctaaccgccattcagaagaacgtggctggcagctgctgtggctgtgcactgggctgtttccaccctcaaagggtctgttgccccacgctcagaagtttattgatacacgccgtggaaagctgttggctcccgattgtagccgaagaatccaaaaggtcctccgcaccggccctagaaaacagccaccacatcaggtcgaggtggaggcagctgagcagaatgtgagccgcatctgccataaaatctatttcccgaatgatacatctgaaatgctagaggttgttgccaataccagagtgcgggatgtgtgcgactccatcgcgacgcgcctccagctagcctcttgggagggatgttccctgttcattaaaatctctgacaaagtgatctctcagaaagagggggactttttttttgacagtctacgcgaggtcagtgactgggttaagaagaacaaacctcaaaaagagggcgctccagtgaccttaccttatcaggtgtactttatgcgtaaactctggctgaatatttcgcctggcaaggatgtcaatgccgataccatcctccactatcaccaggaattgccaaagtacctcaggggattccataagtgttcgagggaggatgcaatacaccttgcaggcctgatttacaaagcccagttcaataatgacaggagtcagctggcatccgtccctaaaattctgcgtgagctggtgcctgaaaacttaacccgccttatgtcaagcgaggagtggaagaaaagtatcctgctggcttatgataaacacaaagacaagacagtggaagaggccaaagtggcatttctcaaatggatttgtagatggccgactttcgggtctgcctttttcgaggtgaagcagacctccgaaccttcttatccagacgttatcctaattgccatcaatagacacggagttctgctaattcatccaaagacaaaagacctgctgacaacctatcccttcaccaaaatcagttcatggtccagcggcagtacctacttccacatggcgctggggtcactcggcaggggtagccgcctgctttgtgaaacgagccttggctataaaatggacgatcttctgacgagttacgtccagcagttgctgagtgctatgaacaagcaacgcggatccaaggcgccagccctggccagcacata

SEQ ID NO: 36874 - DNA, 6350 bp, Artificial Sequence
  derived and/or modified sequence
atgtcaggcttcaggctgggagatcacgtctggctggaaccgccatcgacccacaagaccggggtggccattggcggaatcattaaggaggccaagccagggaaggtgttggttgaagatgacgaagggaaagagcattggatccgagccgaggactttggtgtgctaagccctatgcaccccaactctgtccagggggttgatgacatgatacggcttggggatctaaatgaggctggaatggtacataacctgctgatccggtaccagcagcataagatttacacgtatacaggaagtatactcgtcgccgtgaaccctttccaggtgctgcctttgtatacacttgaacaggtccagctgtactacagcagacacatgggcgagctgccaccccacgtattcgcaattgcaaataactgctacttctctatgaaaagaaacaagcgtgaccagtgctgcattatctccggcgaaagtggcgctgggaaaaccgagaccacaaagctcatcctccaatttctagcaacgatttctggacagcacagctggatcgagcagcaggttcttgaagcgaacccgatcctggaagcattcggtaatgccaagacaatacgaaatgataactctagccggttcggaaaatacatagatatctattttaaccccagcggcgtgattgagggggctagaatcgagcagttccttctggagaaatctagagtgtgccgccaggctccggaggagcgcaactaccacatcttctactgcatgctgatgggcgtgagcgcagaggataaacagctgttaagtttgggaacacccagtgaatatcactacctaaccatgggcaactgtacctcttgtgagggtctgaacgacgctaaagactacgctcacatccggagcgctatgaaaatcttgcagttcagcgatagcgagtcctgggacgttattaagctgctcgcagctatcctgcatctcggcaacgttggttttatggcgtccgtattcgaaaacctcgacgcctccgacgtcatggagacgcctgcttttccgacagtcatgaagcttctcgaggtgcagcaccaagaactccgggactgtcttatcaaacataccatcttgatcagaggggaattcgtaacgcggagtctcaatatcgctcaggccgctgatcgcagggatgccttcgttaagggaatctatgggcacctgtttttgtggattgttaaaaagattaacgccgcaatatttacgccacctgcccaggatcctaagaatgtgcggagggccattggactgctcgacattttcggcttcgaaaatttcgagaacaatagttttgagcagctttgcattaatttcgctaatgagcacctccaacaattttttgttcagcatgtctttactatggagcaggaagaataccggtctgagaacatctcctgggactatatacactatacagataacagacctacactagacctcctcgccttaaaacccatgagcattatctccctgctggacgaagagtctcgatttcctcaaggcaccgacctcactatgcttcaaaaactgaattctgtgcacgctaacaacaaagccttcctgcagcccaagaacatccacgatgctaggtttggtatcgcgcacttcgccggagaagtgtattaccaagctgaaggcttcttggaaaaaaatcgagatgttctatcaactgacatcctcacactggtttacagctccaaaaacaagttcctcagagagattttcaatctggagctggcggagaccaagctgggccacggcaccatcagacaggctaaagctggcaaccatctgtttaagtcagccgattccaataaacgtccctcaaccctcggatcacagttcaagcagtccctggaccagttaatgaagatcctgaccaattgtcaaccgtacttcataaggtgcatcaagcctaacgagtacaaaaaaccactgctttttgaccgtgagttgtgtttgagacagctgcgctactcaggtatgatggagactgtccatattcgaaagtcaggctttccaattaggtatacttttgaggaattctcacagcgcttcggggtgctgcttcctaacgcaatgaggatgcaactgcagggaaagctacggcagatgacattgggtattacagacgtgtggctccgaaccgacaaagattggaaagcgggaaaaactaagatcttcctccgggaccaccaggacactctgctggaagtccaaagatcccaggtgttggatcgggctgcgctgagtattcagaaagtgctgagagggtacaggtatcggaaagagttcctgcgccagcggcgtgcagctgtgacacttcaagcttggtggaggggctactgtaacaggcgtaactttaagctgatcctggtggggttcgaaagattgcaggcaatagcccgttctcaacccctggcaagacaataccaggccatgaggcagcgtaccgtgcagctgcaggcactgtgccggggatatttggtgagacagcaggtgcaggctaaaaggagagctgttgtggtcatacaggcccacgcccgagggatggccgcaaggagaaatttccagcaaagaaaagcaaacgccccactggtgatccctgccgagggacagaagagccaaggtgccctgcctgccaaaaagcggaggagtatttacgacactgtgacagatacagagatggtcgaaaaggttttcgggttcttgcctgccatgattggtggacaagaaggccaagcatcaccccacttcgaggatctcgaaagcaagacacagaaacttctcgaggtcgacttggacaccgtgcctatggctgaagagcccgaggaagatgtggacggcctagcagagtatacttttcccaaatttgccgtaacctattttcagaagagcgctagtcacacacacatccgaagacccctgaggtatcccctgttgtatcacgaggacgataccgactgtctggctgccctggttatatggaacgtaattctgcgattcatgggcgatctgcccgaaccagtgctctatgcacgtagctcccaacagggaagctccgtaatgcggcagattcacgatacgttaggcagagaacacggagctcaagtgccacagcattctaggtccgcccaggtggcctcccagctgaacattggcgaagaggctctggaacccgacgggttgggcgcagacaggcccatgagcaatcttgagaaggtgcatttcatcgtgggttatgccattttacgaccatcactgagagacgagatctattgtcaaatatgcaaacaactctcggagaactttaaaacctcctctctggctagaggctggattctgctttccctgtgcttggggtgcttccccccatccgaacggtttatgaagtacctactaaacttcattgggcagggacctgcaacatatggcccattctgcgccgaaagactgcgccgtacatatgcaaatggtgtgagggcggaacctccaacatggctagagttacaggcagtgaaatccaagaagcacattcctatccaggtgatattggcaaccggtgaatctctcacagtccccgtggacagtgcttccacctcacgggagatgtgcatgcacattgcccacaagcagggtctgtcagatcacctcgggttcagcctgcaggtggcagtttatgataaattctggagtttaggatctggacgtgaccacatgatggacgcaattgctcggtgcgagcagatggctcaggaaaggggcgaatcacagcggcagtccccctggcggatttatttcaggaaggagtttttcactccatggcacgactccagggaagacccagtgtctaccgagttgatttatcggcaggttctcaggggagtctggtccggagaatatagctttgagaaggaggaggaactagtggaactgctggcccgacactgttacgtccaactcggtgcatcagcagagtcaaaagctgtccaagaactgcttcccagctgtataccccacaagctgtaccgaacgaagcctccagaccgctgggcatctctcgtcactgcagcttgcgcgaaggccccttatactcagaaacaggtgacgcctctggcggtaagagaacaggtggtagacgccgctaggttgcagtggcccctgctcttcagtcggcttttcgaggtgattacactgagtgggccacggctcccgaagacccaactcatacttgcagtgaactggaaaggattgtgtttcctcgaccagcaggaaaagatgctgcttgaactctctttccccgaagtgatgggattggctacaaaccgagaagcacaaggcggacaacggctgctcctcagtaccatgcatgaggagtatgaattcgtctctcctagcagcgtggctattgcggagctcgtggcactgttccttgagggtttaaaggagaggtccatctttgccatggctctacaagatagaaaggccacggatgataccactctgctcgctttcaaaaaaggcgatttgctggtgctcaccaagaagcagggacttctggccagtgagaactggacactgggccaaaatgacagaacaggcaagaccggcctggtcccaatggcatgcctctacacaatccctactgtaactaaacccagtgcacagctcctgtccctcctcgctatgtcacccgaaaaacgcaaacttgctgcacaggaaggccagttcactgagcctagacctgaagagcctcccaaagagaagttacataccttagaggagttcagctacgaattcttccgcgctcccgaaaaagacatggtttccatggctgtgttgcccttggctcgggctcgtggacacttgtgggcttactcttgcgaaccccttcgtcaacctttgctgaaacgggtgcatgccaatgtggacttgtgggacattgcctgtcagatattcgtcgcaatcttgaggtacatgggcgattacccctctcggcaggcttggccgaccttggagctcaccgaccaaattttcaccttagcgctgcagcaccccgctctccaagatgaagtctattgccagattctgaagcagctgacgcataacagcaataggcatagtgaggaaaggggctggcaacttctctggctgtgcacaggcctgtttccaccctctaaaggtctgcttccgcatgcccaaaaatttattgatacccgcagagggaaactgctagcacctgattgctcacgacggattcagaaggtgttacggactggaccacgcaagcagcccccacaccaggtcgaagtggaggctgccgaacagaacgtctccagaatttgccataagatatacttccctaatgacacatcagaaatgctggaagtggtggcaaacacaagggttcgagacgtgtgtgattctatcgctaccaggctgcagctggcttcctgggagggctgttccctgttcatcaaaatcagtgataaggtgatttcacaaaaagagggtgatttcttcttcgattcactgcgggaagtatctgattgggtgaagaaaaacaagcctcagaaggagggcgcacctgttaccctcccgtaccaggtctatttcatgaggaagctgtggcttaacataagtcctggaaaggacgtgaacgccgatacgattttacattaccatcaggagctgcctaagtatctccgcggtttccataaatgcagtagggaagatgccatccacctggcaggactaatatacaaggctcagtttaataatgaccgatcacagctggcctctgtaccaaagatcttgagagagctggtgccggagaacctcacgcggttgatgagtagtgaggagtggaagaagagtatcctgttggcatacgacaaacataaggataaaaccgtcgaagaggcaaaagtggccttcctgaagtggatctgcaggtggcccacgttcggctcagcattctttgaagtgaagcagacaagtgagcccagctatccggacgtcatcctgatagccataaatcggcatggggtattgctcatccaccccaagacaaaggacctgctgaccacgtaccctttcacaaaaatttcttcttggagctcaggaagcacttatttccacatggccctgggatctctggggagaggtagtagattgctatgtgagaccagcctagggtataagatggacgatctgctcacctcatacgtgcagcagctactatccgccatgaataagcagagggggagcaaggctccagcccttgccagcacata

SEQ ID NO: 36875 - DNA, 6350 bp, Artificial Sequence
  derived and/or modified sequence
atgagcggcttccgcctgggcgatcatgtttggttagagcccccatccacccacaagacaggcgtggcaattggagggatcattaaggaggcgaaacctggaaaggtcctagtggaggatgacgagggcaaagagcactggatacgtgcagaggacttcggtgtcctttctccaatgcaccccaatagtgtccagggtgtcgacgatatgattcggctcggtgacctgaatgaggctggcatggttcataacttgctgattcgctaccagcagcacaaaatatacacctacaccggctccattctggttgccgtgaatccattccaagtgctgccgctctacacactggaacaggtgcaactttactacagtcgacacatgggggagctgccccctcacgtctttgccatcgccaacaactgttatttctcaatgaagcgcaataagcgagaccaatgttgcatcattagcggggaaagcggtgctggcaagaccgagaccaccaaactcatcttgcaatttttagctactattagtgggcagcactcctggatcgaacagcaggtcctagaagccaaccccattttggaagctttcggcaacgctaaaaccatccgaaatgataacagtagtagattcggaaagtacatcgatatatatttcaatcctagcggagtgatcgaaggggctcgtatcgagcaattccttctggagaagtctcgcgtatgtagacaggcccctgaagagcgcaactatcacattttttattgcatgctgatgggtgtgagcgccgaagacaagcagcttttatcattaggaacaccctctgaatatcattatttgacaatgggcaattgtacttcttgtgagggccttaacgatgcaaaagattacgcacacattcgctcagccatgaagatcttgcaatttagcgattctgagagctgggatgtgatcaaattgctggccgctatccttcacctgggcaatgtcggttttatggcttccgtattcgaaaacttggacgcctctgacgtcatggagacacccgcattcccaaccgttatgaagcttctggaagtccagcatcaggaactccgtgactgtcttatcaagcatactatcttgattagaggagaattcgtgaccagaagtcttaacatcgcacaagcagctgaccgtcgggacgccttcgtgaaaggaatctatggccacctgttcctgtggatcgtgaaaaaaatcaatgcggcaatcttcacgccacccgctcaggaccccaagaatgtgcgaagagccatcggcctgctggatatctttggttttgaaaactttgagaataactctttcgagcagctttgcatcaactttgccaatgagcaccttcaacagttctttgtgcagcatgtattcacgatggaacaagaagaatatcggtctgaaaatatctcctgggactacatacactacaccgacaaccgacccacgctggacttactcgccctcaaacccatgtcgatcatatctctgctggatgaggagtcaagatttccgcagggtaccgacctcactatgctgcagaaactcaactcagtacatgccaataataaggcgttcctgcagcctaagaacatccatgatgcgaggtttggcattgcccattttgccggtgaagtgtactatcaggcggagggttttctggaaaaaaacagggatgtcctgtctactgatattctcaccctggtgtattcatctaaaaataaattcctgcgggaaatcttcaacctcgagctggcagaaaccaaactcggccacggtacaatccggcaagcgaaagcaggtaaccacctgttcaaatctgctgactctaacaagagaccttcaaccctcggcagccagttcaagcaatcccttgaccagctcatgaaaattctgaccaactgtcagccgtatttcataagatgcataaaaccaaacgaatacaagaaacccttactgttcgaccgcgaactgtgcctgcggcaactacgatactctggaatgatggagaccgtgcatattcggaagagcggattccccataagatacacattcgaagaattctcccaacggtttggcgtccttctgccaaatgctatgaggatgcagctgcagggaaaactccggcagatgaccttggggattaccgacgtgtggctccgtacagataaggactggaaggcaggaaagactaaaatttttctgagagatcaccaggatacgctgctcgaggtacagagatcacaggtgttagatagggctgcgctatccatacagaaagtgctgcggggataccggtatcggaaagagtttctcaggcagcgacgggcagccgtgacgcttcaggcatggtggagaggatactgcaaccgcagaaacttcaagctgatcttggtgggtttcgagagactacaggctatagcaaggtcccagcctctcgctaggcagtaccaagctatgagacagcggacggtacagttgcaggccctttgccgtgggtatctggtgcgtcagcaagtgcaagccaaaaggagggctgtagttgtaatacaggcgcacgcccgaggcatggccgctcgcagaaactttcagcaacggaaagcaaacgcccctctggtgattccagccgaggggcagaaaagccagggggcacttcccgctaagaagcgcaggtcaatttacgacaccgttaccgatactgagatggtagaaaaagttttcggatttctgccggctatgataggcggacaggaaggtcaggccagcccacatttcgaggatttggaatctaagacccaaaaactactggaagttgatttggatacagtccccatggctgaggaacccgaggaagacgttgacgggctcgctgagtacacctttccgaagttcgcagtgacatattttcagaaaagtgctagtcacacacacataagaagaccactccggtatcctctgctttaccatgaagacgacacggattgcctggccgcactggttatctggaacgttatcctacgattcatgggggatctgccagaaccggttttatacgcaagatctagtcagcaggggagcagtgtgatgcgtcaaatccacgacactttggggagagaacacggggcacaggtgcctcagcattcacgaagtgcacaggttgcctcccagctgaacatcggggaagaggcactcgagcctgatggactcggggcagatagaccgatgagcaatcttgagaaagttcacttcatcgttgggtatgccatcctacgcccatccttacgtgacgaaatctactgccaaatttgcaaacaattgtccgagaacttcaagacatcatctctggcaaggggctggattctcctgtcactctgcctgggctgcttcccaccctctgaaaggttcatgaagtacctcctcaacttcatcggacagggccctgctacctacggacctttttgtgctgaaaggctcaggcgcacctatgccaacggcgtccgtgctgaaccacctacgtggctggagctgcaggctgtgaagagcaagaagcatatccctattcaggtaatcctggccaccggcgaaagcctgaccgtgcccgtggactcggcctctacttcccgagagatgtgtatgcacattgcgcataaacagggactgagtgatcacctcgggtttagtctccaggtcgcggtttacgacaagttttggtcactgggcagtggccgagatcacatgatggatgccatagctagatgtgaacagatggctcaggagcggggtgagtcccagcggcagtccccatggcgcatatacttccgaaaagagtttttcaccccatggcacgacagccgtgaggaccctgtcagcaccgagcttatctatcgccaagtgctgcgtggtgtctggtcgggagagtactccttcgaaaaagaggaggaattggtggagcttctcgcacggcactgctatgtgcaactgggtgcttctgccgaatccaaggccgtgcaggagctgctgccgagttgtattccacacaagttgtaccggactaaaccccctgacaggtgggcctctctggtgaccgcagcctgcgcgaaggccccttatactcagaagcaggtaactccattggctgtgcgggagcaggttgtcgatgccgctcgacttcagtggccattacttttctcacgcctgtttgaagtgatcaccctgtccggtcccaggttacctaagacccagctcatcttagctgtgaattggaaaggactttgttttctggaccaacaggagaagatgctcttagagctctccttccctgaggtaatgggactggccactaatcgcgaagcacaggggggacagcggctcctactttccactatgcacgaggagtatgagttcgtgagtccatcgtccgtggccatcgcggagctcgttgctctctttctggagggattgaaagagagatctatcttcgcaatggctcttcaggatagaaaagcgactgatgacacgacacttctcgcttttaaaaaaggcgatctgctcgttctgaccaaaaagcagggtcttctggccagcgaaaactggaccctggggcagaacgatcggaccggcaaaaccggcctggtacctatggcctgcctatatacaattcccactgtgacaaagccttcagctcaactcctctcgttgcttgctatgtcaccagagaagagaaagctagcagcacaggaaggacagtttaccgaaccacgtccagaggaacctcccaaggagaagttacatactctggaggagttctcttatgagttttttcgagccccagaaaaggacatggtgtccatggccgttttacccctcgcaagagcaaggggccatctgtgggcatactcctgcgagcccctcaggcaaccactgctgaaacgcgtccacgccaacgtggacctttgggatattgcttgccagattttcgttgcgatactgcgttatatgggagactacccatctcgccaggcttggcccacgctcgagctcacagatcagattttcaccctagccctgcaacatccagccctgcaggacgaggtatactgccagatactgaaacagctgacgcacaacagtaaccggcatagtgaggaaagaggttggcagctgttgtggctgtgcactggtctgttcccgccatctaaagggctgcttccacatgcccagaagtttatcgatactcgcagagggaaattattagccccagattgtagcaggaggattcaaaaggtgcttaggacaggaccaaggaagcagccccctcaccaggtggaggtggaggctgccgagcagaatgtgtcccggatatgccataaaatttacttccccaatgataccagtgaaatgctggaggtcgtcgccaatactcgtgtgcgggacgtgtgtgattccatagccacaaggcttcagctcgcatcctgggagggctgctctctgtttattaagatttctgataaggtgatcagtcaaaaggaaggggactttttcttcgatagcttgcgggaggtgtctgactgggtcaaaaagaataagcctcagaaagagggagctcccgtgactctgccataccaagtctattttatgcggaagctctggctcaatatttccccaggtaaggatgtgaacgccgatacaatcctgcattaccaccaagagcttcctaagtatttgcgtggattccacaagtgttcccgcgaagacgctattcacctcgccggacttatctacaaggcccagttcaataacgacagatctcagctcgccagcgtccctaaaatactgagagaattggtcccagagaatctgacccgactcatgtcctctgaggaatggaaaaagtccatcttactcgcttacgacaagcacaaggacaaaaccgtggaggaggccaaagttgcttttctgaaatggatctgtaggtggccgaccttcggaagcgctttcttcgaggtcaagcagacatcagagccctcataccccgatgtgatactaatcgctataaatcggcacggcgttctgctgatccaccccaagaccaaggatctgctgacaacataccctttcactaaaatttcctcttggtcctctggcagcacatattttcatatggcactcgggagccttggccgagggtcacgtttgctttgcgaaacgagcctgggctataagatggatgatctacttacttcatacgtccagcagctactctccgccatgaacaagcagcgtgggtctaaagcgcctgctctcgcttctacata

SEQ ID NO: 36876 - DNA, 2886 bp, Artificial Sequence
  derived and/or modified sequence
atgaagtacctgctgaacttcatcggccagggccccgccacctacggccccttctgcgccgagagactgagaagaacctacgccaacggcgtgagagccgagccccccacctggctggagctgcaggccgtgaagagcaagaagcacatccccatccaggtgatcctggccaccggcgagagcctgaccgtgcccgtggacagcgccagcaccagcagagagatgtgcatgcacatcgcccacaagcagggcctgagcgaccacctgggcttcagcctgcaggtggccgtgtacgacaagttctggagcctgggcagcggcagagaccacatgatggacgccatcgccagatgcgagcagatggcccaggagagaggcgagagccagagacagagcccctggagaatctacttcagaaaggagttcttcaccccctggcacgacagcagagaggaccccgtgagcaccgagctgatctacagacaggtgctgagaggcgtgtggagcggcgagtacagcttcgagaaggaggaggagctggtggagctgctggccagacactgctacgtgcagctgggcgccagcgccgagagcaaggccgtgcaggagctgctgcccagctgcatcccccacaagctgtacagaaccaagccccccgacagatgggccagcctggtgaccgccgcctgcgccaaggccccctacacccagaagcaggtgacccccctggccgtgagagagcaggtggtggacgccgccagactgcagtggcccctgctgttcagcagactgttcgaggtgatcaccctgagcgccttcaccctgcccagcctgctggccagacccccccccgcccaggacgccggccccgccggcgaggacgccgccggcaccctgttccccagaggccacggcagcggccaccagcaggtgagagccctgagagaggacctgttcctgcacaccgagccccacccccccgcccccggcagaaccgcccacgaggtgctgcactggggcatcaccagatgcaccggcagcttcagcctgaagcccagaagcaccagaaagggccagggcagcgtgcagcccctggccggcacctacctggagggcagcttcctgtgccacggcagagagctggtggcctggagagtgcaggtggtgtgggagggcgacaagggccagtgcctggccggcgccgacccccacagccacggcagcccctggatcagcctgaccggcaacttcagcatgcccttcggcaagagcacccagcagagcggcacctgcatcagcggcctgtgccaggtgtacagcggccaccacagccccctggccaccagccccagaagcaccgacagcatcacccacagcgccgacgagagaatgagcaagctgaagcacgccgaggtgagatggctgagagtgagcacctggcagagcagacagctgatcagcgccctgaccttcgccgtgagcctgagatgccactgcacccccgccaccagcctgagcgcccacagccagccccacacctgggccgcccccctgagcgccagcgagagacccaccgtggtgagcggcctggtgctggccctggccgagcagctgtgcgtgctgatcagatggagaggcctgctggtgaccctgagcttcatcagcagagaggcccagggcggccagagactgctgctgagcaccatgcacgaggagtacgagttcgtgagccccagcagcgtggccatcgccgagctggtggccctgttcctggagggcctgaaggagagaagcatcttcgccatggccctgcaggacagaaaggccaccgacgacaccaccctgctggccttcaagaagggcgacctgctggtgctgaccaagaagcagggcctgctggccagcgagaactggaccctgggccagaacgacagaaccggcaagaccggcctggtgcccatggcctgcctgtacaccatccccaccgtgaccaagcccagcgcccagctgctgagcctgctggccatgagccccgagaagagaaagctggccgcccaggagggccagttcaccgagcccagacccgaggagccccccaaggagaagctgcacaccctggaggagttcagctacgagttcttcagagcccccgagaaggacatggtgagcatggccgtgctgcccctggccagagccagaggccacctgtgggcctacagctgcgagcccctgagacagcccctgctgaagagagtgcacgccaacgtggacctgtgggacatcgcctgccagatcttcgccacccccatcctgagatacatgggcgactaccccagcagacaggcctggcccaccctggagctgaccgaccagatcttcaccctggccctgcagcaccccgccctgcaggacgaggtgtactgccagatcctgaagcagctgacccacaacagcaacagacacagcgaggagagaggctggcagctgctgtggctgtgcaccggcctgttcccccccagcaagggcctgctgccccacgcccagaagttcatcgacaccagaagaggcaagctgctggcccccgactgcagcagaagaatccagaaggtgctgagaaccggccccagaaagcagcccccccaccaggtggaggtggaggccgccgagcagaacgtgagcagaatctgccacaagatctacttccccaacgacaccagcgagatgctggaggtggtggccaacaccagagtgagagacgtgtgcgacagcatcgccaccagactgcagctggccagctgggagggctgcagcctgttcatcaagatcagcgacaaggtgatcagccagaaggagggcgacttcttcttcgacagcctgagagagtag

SEQ ID NO: 36877 - DNA, 6354 bp, Artificial Sequence
  derived and/or modified sequence
atgagcggcttcagactgggcgaccacgtgtggctggagccccccagcacccacaagaccggcgtggccatcggcggcatcatcaaggaggccaagcccggcaaggtgctggtggaggacgacgagggcaaggagcactggatcagagccgaggacttcggcgtgctgagccccatgcaccccaacagcgtgcagggcgtggacgacatgatcagactgggcgacctgaacgaggccggcatggtgcacaacctgctgatcagataccagcagcacaagatctacacctacaccggcagcatcctggtggccgtgaaccccttccaggtgctgcccctgtacaccctggagcaggtgcagctgtactacagcagacacatgggcgagctgcccccccacgtgttcgccatcgccaacaactgctacttcagcatgaagagaaacaagagagaccagtgctgcatcatcagcggcgagagcggcgccggcaagaccgagaccaccaagctgatcctgcagttcctggccaccatcagcggccagcacagctggatcgagcagcaggtgctggaggccaaccccatcctggaggccttcggcaacgccaagaccatcagaaacgacaacagcagcagattcggcaagtacatcgacatctacttcaaccccagcggcgtgatcgagggcgccagaatcgagcagttcctgctggagaagagcagagtgtgcagacaggcccccgaggagagaaactaccacatcttctactgcatgctgatgggcgtgagcgccgaggacaagcagctgctgagcctgggcacccccagcgagtaccactacctgaccatgggcaactgcaccagctgcgagggcctgaacgacgccaaggactacgcccacatcagaagcgccatgaagatcctgcagttcagcgacagcgagagctgggacgtgatcaagctgctggccgccatcctgcacctgggcaacgtgggcttcatggccagcgtgttcgagaacctggacgccagcgacgtgatggagacccccgccttccccaccgtgatgaagctgctggaggtgcagcaccaggagctgagagactgcctgatcaagcacaccatcctgatcagaggcgagttcgtgaccagaagcctgaacatcgcccaggccgccgacagaagagacgccttcgtgaagggcatctacggccacctgttcctgtggatcgtgaagaagatcaacgccgccatcttcaccccccccgcccaggaccccaagaacgtgagaagagccatcggcctgctggacatcttcggcttcgagaacttcgagaacaacagcttcgagcagctgtgcatcaacttcgccaacgagcacctgcagcagttcttcgtgcagcacgtgttcaccatggagcaggaggagtacagaagcgagaacatcagctgggactacatccactacaccgacaacagacccaccctggacctgctggccctgaagcccatgagcatcatcagcctgctggacgaggagagcagattcccccagggcaccgacctgaccatgctgcagaagctgaacagcgtgcacgccaacaacaaggccttcctgcagcccaagaacatccacgacgccagattcggcatcgcccacttcgccggcgaggtgtactaccaggccgagggcttcctggagaagaacagagacgtgctgagcaccgacatcctgaccctggtgtacagcagcaagaacaagttcctgagagagatcttcaacctggagctggccgagaccaagctgggccacggcaccatcagacaggccaaggccggcaaccacctgttcaagagcgccgacagcaacaagagacccagcaccctgggcagccagttcaagcagagcctggaccagctgatgaagatcctgaccaactgccagccctacttcatcagatgcatcaagcccaacgagtacaagaagcccctgctgttcgacagagagctgtgcctgagacagctgagatacagcggcatgatggagaccgtgcacatcagaaagagcggcttccccatcagatacaccttcgaggagttcagccagagattcggcgtgctgctgcccaacgccatgagaatgcagctgcagggcaagctgagacagatgaccctgggcatcaccgacgtgtggctgagaaccgacaaggactggaaggccggcaagaccaagatcttcctgagagaccaccaggacaccctgctggaggtgcagagaagccaggtgctggacagagccgccctgagcatccagaaggtgctgagaggctacagatacagaaaggagttcctgagacagagaagagccgccgtgaccctgcaggcctggtggagaggctactgcaacagaagaaacttcaagctgatcctggtgggcttcgagagactgcaggccatcgccagaagccagcccctggccagacagtaccaggccatgagacagagaaccgtgcagctgcaggccctgtgcagaggctacctggtgagacagcaggtgcaggccaagagaagagccgtggtggtgatccaggcccacgccagaggcatggccgccagaagaaacttccagcagagaaaggccaacgcccccctggtgatccccgccgagggccagaagagccagggcgccctgcccgccaagaagagaagaagcatctacgacaccgtgaccgacaccgagatggtggagaaggtgttcggcttcctgcccgccatgatcggcggccaggagggccaggccagcccccacttcgaggacctggagagcaagacccagaagctgctggaggtggacctggacaccgtgcccatggccgaggagcccgaggaggacgtggacggcctggccgagtacaccttccccaagttcgccgtgacctacttccagaagagcgccagccacacccacatcagaagacccctgagataccccctgctgtaccacgaggacgacaccgactgcctggccgccctggtgatctggaacgtgatcctgagattcatgggcgacctgcccgagcccgtgctgtacgccagaagcagccagcagggcagcagcgtgatgagacagatccacgacaccctgggcagagagcacggcgcccaggtgccccagcacagcagaagcgcccaggtggccagccagctgaacatcggcgaggaggccctggagcccgacggcctgggcgccgacagacccatgagcaacctggagaaggtgcacttcatcgtgggctacgccatcctgagacccagcctgagagacgagatctactgccagatctgcaagcagctgagcgagaacttcaagaccagcagcctggccagaggctggatcctgctgagcctgtgcctgggctgcttcccccccagcgagagattcatgaagtacctgctgaacttcatcggccagggccccgccacctacggccccttctgcgccgagagactgagaagaacctacgccaacggcgtgagagccgagccccccacctggctggagctgcaggccgtgaagagcaagaagcacatccccatccaggtgatcctggccaccggcgagagcctgaccgtgcccgtggacagcgccagcaccagcagagagatgtgcatgcacatcgcccacaagcagggcctgagcgaccacctgggcttcagcctgcaggtggccgtgtacgacaagttctggagcctgggcagcggcagagaccacatgatggacgccatcgccagatgcgagcagatggcccaggagagaggcgagagccagagacagagcccctggagaatctacttcagaaaggagttcttcaccccctggcacgacagcagagaggaccccgtgagcaccgagctgatctacagacaggtgctgagaggcgtgtggagcggcgagtacagcttcgagaaggaggaggagctggtggagctgctggccagacactgctacgtgcagctgggcgccagcgccgagagcaaggccgtgcaggagctgctgcccagctgcatcccccacaagctgtacagaaccaagccccccgacagatgggccagcctggtgaccgccgcctgcgccaaggccccctacacccagaagcaggtgacccccctggccgtgagagagcaggtggtggacgccgccagactgcagtggcccctgctgttcagcagactgttcgaggtgatcaccctgagcggccccagactgcccaagacccagctgatcctggccgtgaactggaagggcctgtgcttcctggaccagcaggagaagatgctgctggagctgagcttccccgaggtgatgggcctggccaccaacagagaggcccagggcggccagagactgctgctgagcaccatgcacgaggagtacgagttcgtgagccccagcagcgtggccatcgccgagctggtggccctgttcctggagggcctgaaggagagaagcatcttcgccatggccctgcaggacagaaaggccaccgacgacaccaccctgctggccttcaagaagggcgacctgctggtgctgaccaagaagcagggcctgctggccagcgagaactggaccctgggccagaacgacagaaccggcaagaccggcctggtgcccatggcctgcctgtacaccatccccaccgtgaccaagcccagcgcccagctgctgagcctgctggccatgagccccgagaagagaaagctggccgcccaggagggccagttcaccgagcccagacccgaggagccccccaaggagaagctgcacaccctggaggagttcagctacgagttcttcagagcccccgagaaggacatggtgagcatggccgtgctgcccctggccagagccagaggccacctgtgggcctacagctgcgagcccctgagacagcccctgctgaagagagtgcacgccaacgtggacctgtgggacatcgcctgccagatcttcgccacccccatcctgagatacatgggcgactaccccagcagacaggcctggcccaccctggagctgaccgaccagatcttcaccctggccctgcagcaccccgccctgcaggacgaggtgtactgccagatcctgaagcagctgacccacaacagcaacagacacagcgaggagagaggctggcagctgctgtggctgtgcaccggcctgttcccccccagcaagggcctgctgccccacgcccagaagttcatcgacaccagaagaggcaagctgctggcccccgactgcagcagaagaatccagaaggtgctgagaaccggccccagaaagcagcccccccaccaggtggaggtggaggccgccgagcagaacgtgagcagaatctgccacaagatctacttccccaacgacaccagcgagatgctggaggtggtggccaacaccagagtgagagacgtgtgcgacagcatcgccaccagactgcagctggccagctgggagggctgcagcctgttcatcaagatcagcgacaaggtgatcagccagaaggagggcgacttcttcttcgacagcctgagagaggtgagcgactgggtgaagaagaacaagccccagaaggagggcgcccccgtgaccctgccctaccaggtgtacttcatgagaaagctgtggctgaacatcagccccggcaaggacgtgaacgccgacaccatcctgcactaccaccaggagctgcccaagtacctgagaggcttccacaagtgcagcagagaggacgccatccacctggccggcctgatctacaaggcccagttcaacaacgacagaagccagctggccagcgtgcccaagatcctgagagagctggtgcccgagaacctgaccagactgatgagcagcgaggagtggaagaagagcatcctgctggcctacgacaagcacaaggacaagaccgtggaggaggccaaggtggccttcctgaagtggatctgcagatggcccaccttcggcagcgccttcttcgaggtgaagcagaccagcgagcccagctaccccgacgtgatcctgatcgccatcaacagacacggcgtgctgctgatccaccccaagaccaaggacctgctgaccacctaccccttcaccaagatcagcagctggagcagcggcagcacctacttccacatggccctgggcagcctgggcagaggcagcagactgctgtgcgagaccagcctgggctacaagatggacgacctgctgaccagctacgtgcagcagctgctgagcgccatgaacaagcagagaggcagcaaggcccccgccctggccagcacctag

SEQ ID NO: 36878 - DNA, 6351 bp, Artificial Sequence
  derived and/or modified sequence
atgagcggcttcagactgggcgaccacgtgtggctggagccccccagcacccacaagaccggcgtggccatcggcggcatcatcaaggaggccaagcccggcaaggtgctggtggaggacgacgagggcaaggagcactggatcagagccgaggacttcggcgtgctgagccccatgcaccccaacagcgtgcagggcgtggacgacatgatcagactgggcgacctgaacgaggccggcatggtgcacaacctgctgatcagataccagcagcacaagatctacacctacaccggcagcatcctggtggccgtgaaccccttccaggtgctgcccctgtacaccctggagcaggtgcagctgtactacagcagacacatgggcgagctgcccccccacgtgttcgccatcgccaacaactgctacttcagcatgaagagaaacaagagagaccagtgctgcatcatcagcggcgagagcggcgccggcaagaccgagaccaccaagctgatcctgcagttcctggccaccatcagcggccagcacagctggatcgagcagcaggtgctggaggccaaccccatcctggaggccttcggcaacgccaagaccatcagaaacgacaacagcagcagattcggcaagtacatcgacatctacttcaaccccagcggcgtgatcgagggcgccagaatcgagcagttcctgctggagaagagcagagtgtgcagacaggcccccgaggagagaaactaccacatcttctactgcatgctgatgggcgtgagcgccgaggacaagcagctgctgagcctgggcacccccagcgagtaccactacctgaccatgggcaactgcaccagctgcgagggcctgaacgacgccaaggactacgcccacatcagaagcgccatgaagatcctgcagttcagcgacagcgagagctgggacgtgatcaagctgctggccgccatcctgcacctgggcaacgtgggcttcatggccagcgtgttcgagaacctggacgccagcgacgtgatggagacccccgccttccccaccgtgatgaagctgctggaggtgcagcaccaggagctgagagactgcctgatcaagcacaccatcctgatcagaggcgagttcgtgaccagaagcctgaacatcgcccaggccgccgacagaagagacgccttcgtgaagggcatctacggccacctgttcctgtggatcgtgaagaagatcaacgccgccatcttcaccccccccgcccaggaccccaagaacgtgagaagagccatcggcctgctggacatcttcggcttcgagaacttcgagaacaacagcttcgagcagctgtgcatcaacttcgccaacgagcacctgcagcagttcttcgtgcagcacgtgttcaccatggagcaggaggagtacagaagcgagaacatcagctgggactacatccactacaccgacaacagacccaccctggacctgctggccctgaagcccatgagcatcatcagcctgctggacgaggagagcagattcccccagggcaccgacctgaccatgctgcagaagctgaacagcgtgcacgccaacaacaaggccttcctgcagcccaagaacatccacgacgccagattcggcatcgcccacttcgccggcgaggtgtactaccaggccgagggcttcctggagaagaacagagacgtgctgagcaccgacatcctgaccctggtgtacagcagcaagaacaagttcctgagagagatcttcaacctggagctggccgagaccaagctgggccacggcaccatcagacaggccaaggccggcaaccacctgttcaagagcgccgacagcaacaagagacccagcaccctgggcagccagttcaagcagagcctggaccagctgatgaagatcctgaccaactgccagccctacttcatcagatgcatcaagcccaacgagtacaagaagcccctgctgttcgacagagagctgtgcctgagacagctgagatacagcggcatgatggagaccgtgcacatcagaaagagcggcttccccatcagatacaccttcgaggagttcagccagagattcggcgtgctgctgcccaacgccatgagaatgcagctgcagggcaagctgagacagatgaccctgggcatcaccgacgtgtggctgagaaccgacaaggactggaaggccggcaagaccaagatcttcctgagagaccaccaggacaccctgctggaggtgcagagaagccaggtgctggacagagccgccctgagcatccagaaggtgctgagaggctacagatacagaaaggagttcctgagacagagaagagccgccgtgaccctgcaggcctggtggagaggctactgcaacagaagaaacttcaagctgatcctggtgggcttcgagagactgcaggccatcgccagaagccagcccctggccagacagtaccaggccatgagacagagaaccgtgcagctgcaggccctgtgcagaggctacctggtgagacagcaggtgcaggccaagagaagagccgtggtggtgatccaggcccacgccagaggcatggccgccagaagaaacttccagcagagaaaggccaacgcccccctggtgatccccgccgagggccagaagagccagggcgccctgcccgccaagaagagaagaagcatctacgacaccgtgaccgacaccgagatggtggagaaggtgttcggcttcctgcccgccatgatcggcggccaggagggccaggccagcccccacttcgaggacctggagagcaagacccagaagctgctggaggtggacctggacaccgtgcccatggccgaggagcccgaggaggacgtggacggcctggccgagtacaccttccccaagttcgccgtgacctacttccagaagagcgccagccacacccacatcagaagacccctgagataccccctgctgtaccacgaggacgacaccgactgcctggccgccctggtgatctggaacgtgatcctgagattcatgggcgacctgcccgagcccgtgctgtacgccagaagcagccagcagggcagcagcgtgatgagacagatccacgacaccctgggcagagagcacggcgcccaggtgccccagcacagcagaagcgcccaggtggccagccagctgaacatcggcgaggaggccctggagcccgacggcctgggcgccgacagacccatgagcaacctggagaaggtgcacttcatcgtgggctacgccatcctgagacccagcctgagagacgagatctactgccagatctgcaagcagctgagcgagaacttcaagaccagcagcctggccagaggctggatcctgctgagcctgtgcctgggctgcttcccccccagcgagagattcatgaagtacctgctgaacttcatcggccagggccccgccacctacggccccttctgcgccgagagactgagaagaacctacgccaacggcgtgagagccgagccccccacctggctggagctgcaggccgtgaagagcaagaagcacatccccatccaggtgatcctggccaccggcgagagcctgaccgtgcccgtggacagcgccagcaccagcagagagatgtgcatgcacatcgcccacaagcagggcctgagcgaccacctgggcttcagcctgcaggtggccgtgtacgacaagttctggagcctgggcagcggcagagaccacatgatggacgccatcgccagatgcgagcagatggcccaggagagaggcgagagccagagacagagcccctggagaatctacttcagaaaggagttcttcaccccctggcacgacagcagagaggaccccgtgagcaccgagctgatctacagacaggtgctgagaggcgtgtggagcggcgagtacagcttcgagaaggaggaggagctggtggagctgctggccagacactgctacgtgcagctgggcgccagcgccgagagcaaggccgtgcaggagctgctgcccagctgcatcccccacaagctgtacagaaccaagccccccgacagatgggccagcctggtgaccgccgcctgcgccaaggccccctacacccagaagcaggtgacccccctggccgtgagagagcaggtggtggacgccgccagactgcagtggcccctgctgttcagcagactgttcgaggtgatcaccctgagcggccccagactgcccaagacccagctgatcctggccgtgaactggaagggcctgtgcttcctggaccagcaggagaagatgctgctggagctgagcttccccgaggtgatgggcctggccaccaacagagaggcccagggcggccagagactgctgctgagcaccatgcacgaggagtacgagttcgtgagccccagcagcgtggccatcgccgagctggtggccctgttcctggagggcctgaaggagagaagcatcttcgccatggccctgcaggacagaaaggccaccgacgacaccaccctgctggccttcaagaagggcgacctgctggtgctgaccaagaagcagggcctgctggccagcgagaactggaccctgggccagaacgacagaaccggcaagaccggcctggtgcccatggcctgcctgtacaccatccccaccgtgaccaagcccagcgcccagctgctgagcctgctggccatgagccccgagaagagaaagctggccgcccaggagggccagttcaccgagcccagacccgaggagccccccaaggagaagctgcacaccctggaggagttcagctacgagttcttcagagcccccgagaaggacatggtgagcatggccgtgctgcccctggccagagccagaggccacctgtgggcctacagctgcgagcccctgagacagcccctgctgaagagagtgcacgccaacgtggacctgtgggacatcgcctgccagatcttcgtggccatcctgagatacatgggcgactaccccagcagacaggcctggcccaccctggagctgaccgaccagatcttcaccctggccctgcagcaccccgccctgcaggacgaggtgtactgccagatcctgaagcagctgacccacaacagcaacagacacagcgaggagagaggctggcagctgctgtggctgtgcaccggcctgttcccccccagcaagggcctgctgccccacgcccagaagttcatcgacaccagaagaggcaagctgctggcccccgactgcagcagaagaatccagaaggtgctgagaaccggccccagaaagcagcccccccaccaggtggaggtggaggccgccgagcagaacgtgagcagaatctgccacaagatctacttccccaacgacaccagcgagatgctggaggtggtggccaacaccagagtgagagacgtgtgcgacagcatcgccaccagactgcagctggccagctgggagggctgcagcctgttcatcaagatcagcgacaaggtgatcagccagaaggagggcgacttcttcttcgacagcctgagagaggtgagcgactgggtgaagaagaacaagccccagaaggagggcgcccccgtgaccctgccctaccaggtgtacttcatgagaaagctgtggctgaacatcagccccggcaaggacgtgaacgccgacaccatcctgcactaccaccaggagctgcccaagtacctgagaggcttccacaagtgcagcagagaggacgccatccacctggccggcctgatctacaaggcccagttcaacaacgacagaagccagctggccagcgtgcccaagatcctgagagagctggtgcccgagaacctgaccagactgatgagcagcgaggagtggaagaagagcatcctgctggcctacgacaagcacaaggacaagaccgtggaggaggccaaggtggccttcctgaagtggatctgcagatggcccaccttcggcagcgccttcttcgaggtgaagcagaccagcgagcccagctaccccgacgtgatcctgatcgccatcaacagacacggcgtgctgctgatccaccccaagaccaaggacctgctgaccacctaccccttcaccaagatcagcagctggagcagcggcagcacctacttccacatggccctgggcagcctgggcagaggcagcagactgctgtgcgagaccagcctgggctacaagatggacgacctgctgaccagctacgtgcagcagctgctgagcgccatgaacaagcagagaggcagcaaggcccccgccctggccagcacctag

SEQ ID NO: 36879 - protein, 483 aa, Artificial Sequence
  derived and/or modified sequence
MPVPPPPPPPLPPPPPPLGAPPPPPPSAPPVSTDTSSLRRADPKGRSALLADIQQGTRLRKVTQINDRSAPQIESSKGTNKEGGGSANTRGASTPPTLGDLFAGGFPVLRPAGQRDVAGGKTGQGPGSRAPSPRLPNKTISGPLIPPASPRLGNTSEAHGAARTAPPRPNVPAPPPPTPPPPPPPLPPPLPSSSPIKTPLVSPPGPLTKGNLPVVAPPVPCAPPPPPPPPPPTPPPLPPASVLSDKAVKPQLAPLHLPPIPPPLPLLPPCGYPGLKAEPASPAQDAQEPPAPPPPLPPYASCSPRASLPAPPLPGVNSSSETPPPLPPKSPSFQAPPQKAGAQALPAPPAPPGSQPFLQKKRHGRPGAGGGKLNPPPAPPARSPTTELSSKSQQATAWTPTQQPGGQLRNGSLHIIDDFESKFTFHSVEDFPPPDEYKPCQKIYPSKIPRSRTPGPWLQAEAVGQSSDDIKGRNSQLSLKTLR

SEQ ID NO: 36880 - protein, 483 aa, Artificial Sequence
  derived and/or modified sequence
MPVPPPPPPPLPPPPPPLGAPPPPPPSAPPVSTDTSSLRRADPKGRSALLADIQQGTRLRKVTQINDRSAPQIESSKGTNKEGGGSANTRGASTPPTLGDLFAGGFPVLRPAGQRDVAGGKTGQGPGSRAPSPRLPNKTISGPLIPPASPRLGNTSEAHGAARTAPPRPNVPAPPPPTPPPPPPPLPPPLPSSSPIKTPLVSPPGPLTKGNLPVVAPPVPCAPPPPPPPPPPTPPPLPPASVLSDKAVKPQLAPLHLPPIPPPLPLLPPCGYPGLKAEPASPAQDAQEPPAPPPPLPPYASCSPRASLPAPPLPGVNSSSETPPPLPPKSPSFQAPPQKAGAQALPAPPAPPGSQPFLQKKRHGRPGAGGGKLNPPPAPPARSPTTELSSKSQQATAWTPTQQPGGQLRNGSLHIIDDFESKFTFHSVEDFPPPDEYKPCQKIYPSKIPRSRTPGPWLQAEAVGQSSDDIKGRNSQVTQASCL

SEQ ID NO: 36881 - DNA, 267 bp, Artificial Sequence
  derived and/or modified sequence
atgagaagccaagggcagggtggaccaggggcttggagacgaatggagtcttggtcagcagagccagctgggcctggccagggcaggctgggttcgccttgtgaggctgcagaacaggctagctttgaaaagaccgtcatcggggtcgggcaggcgagagccgctctttccgaggaggagcatagggtgtgggaggctgccgcaggggtaggtggcctcgagcagtggggatgctgggaagcgggtgtaacctctggttggggatag

SEQ ID NO: 36882 - DNA, 1452 bp, Artificial Sequence
  derived and/or modified sequence
atgcccgtgcccccccccccccccccccccctgccccccccccccccccccctgggcgccccccccccccccccccccagcgccccccccgtgagcaccgacaccagcagcctgagaagagccgaccccaagggcagaagcgccctgctggccgacatccagcagggcaccagactgagaaaggtgacccagatcaacgacagaagcgccccccagatcgagagcagcaagggcaccaacaaggagggcggcggcagcgccaacaccagaggcgccagcaccccccccaccctgggcgacctgttcgccggcggcttccccgtgctgagacccgccggccagagagacgtggccggcggcaagaccggccagggccccggcagcagagcccccagccccagactgcccaacaagaccatcagcggccccctgatcccccccgccagccccagactgggcaacaccagcgaggcccacggcgccgccagaaccgccccccccagacccaacgtgcccgccccccccccccccacccccccccccccccccccccccctgcccccccccctgcccagcagcagccccatcaagacccccctggtgagcccccccggccccctgaccaagggcaacctgcccgtggtggccccccccgtgccctgcgccccccccccccccccccccccccccccccccacccccccccccctgccccccgccagcgtgctgagcgacaaggccgtgaagccccagctggcccccctgcacctgccccccatccccccccccctgcccctgctgcccccctgcggctaccccggcctgaaggccgagcccgccagccccgcccaggacgcccaggagccccccgccccccccccccccctgcccccctacgccagctgcagccccagagccagcctgcccgccccccccctgcccggcgtgaacagcagcagcgagacccccccccccctgccccccaagagccccagcttccaggcccccccccagaaggccggcgcccaggccctgcccgccccccccgccccccccggcagccagcccttcctgcagaagaagagacacggcagacccggcgccggcggcggcaagctgaaccccccccccgccccccccgccagaagccccaccaccgagctgagcagcaagagccagcaggccaccgcctggacccccacccagcagcccggcggccagctgagaaacggcagcctgcacatcatcgacgacttcgagagcaagttcaccttccacagcgtggaggacttccccccccccgacgagtacaagccctgccagaagatctaccccagcaagatccccagaagcagaacccccggcccctggctgcaggccgaggccgtgggccagagcagcgacgacatcaagggcagaaacagccagctgagcctgaagaccctgagatag

SEQ ID NO: 36883 - DNA, 1452 bp, Artificial Sequence
  derived and/or modified sequence
atgcccgtgcccccccccccccccccccccctgccccccccccccccccccctgggcgccccccccccccccccccccagcgccccccccgtgagcaccgacaccagcagcctgagaagagccgaccccaagggcagaagcgccctgctggccgacatccagcagggcaccagactgagaaaggtgacccagatcaacgacagaagcgccccccagatcgagagcagcaagggcaccaacaaggagggcggcggcagcgccaacaccagaggcgccagcaccccccccaccctgggcgacctgttcgccggcggcttccccgtgctgagacccgccggccagagagacgtggccggcggcaagaccggccagggccccggcagcagagcccccagccccagactgcccaacaagaccatcagcggccccctgatcccccccgccagccccagactgggcaacaccagcgaggcccacggcgccgccagaaccgccccccccagacccaacgtgcccgccccccccccccccacccccccccccccccccccccccctgcccccccccctgcccagcagcagccccatcaagacccccctggtgagcccccccggccccctgaccaagggcaacctgcccgtggtggccccccccgtgccctgcgccccccccccccccccccccccccccccccccacccccccccccctgccccccgccagcgtgctgagcgacaaggccgtgaagccccagctggcccccctgcacctgccccccatccccccccccctgcccctgctgcccccctgcggctaccccggcctgaaggccgagcccgccagccccgcccaggacgcccaggagccccccgccccccccccccccctgcccccctacgccagctgcagccccagagccagcctgcccgccccccccctgcccggcgtgaacagcagcagcgagacccccccccccctgccccccaagagccccagcttccaggcccccccccagaaggccggcgcccaggccctgcccgccccccccgccccccccggcagccagcccttcctgcagaagaagagacacggcagacccggcgccggcggcggcaagctgaaccccccccccgccccccccgccagaagccccaccaccgagctgagcagcaagagccagcaggccaccgcctggacccccacccagcagcccggcggccagctgagaaacggcagcctgcacatcatcgacgacttcgagagcaagttcaccttccacagcgtggaggacttccccccccccgacgagtacaagccctgccagaagatctaccccagcaagatccccagaagcagaacccccggcccctggctgcaggccgaggccgtgggccagagcagcgacgacatcaagggcagaaacagccaggtgacccaggccagctgcctgtag

SEQ ID NO: 36884 - DNA, 1452 bp, Artificial Sequence
  derived and/or modified sequence
atgcctgtgcctccaccgcccccccctccactgccacccccaccaccccccctcggcgccccacctcccccccccccttccgcccccccagtgagcactgatacgagctctctgcgcagagctgatcccaaggggcggtccgctctactggctgatatccagcaaggaacccgcttacgcaaagtgacgcaaatcaacgatcggtctgcacctcagatcgaatcctccaagggcaccaataaggaggggggtggaagtgctaacacccgcggagcctccacgccccccactctcggagacctcttcgcaggaggctttcccgtgctccggcccgccgggcaaagggacgtggctggcggtaaaaccggccaagggccaggatccagggcgccctcaccaagactgcccaataaaactatttccggtcccctgatcccgcccgcatctcctaggctggggaatactagcgaggcacacggagctgctaggaccgcaccaccacgacctaacgtccctgcccctccccccccaacccccccccccccgcccccacctctgcctcccccactacccagctcttcaccaatcaaaactccccttgtcagccctcctgggcctctgacaaaaggaaatcttcctgttgtggccccacccgttccctgcgctccccccccacccccccccccgccaccgcctactcctccaccgctgccaccagcctcagtcctcagcgacaaagccgtgaagcctcaactcgcccccctgcatctgccaccaatccctcctcccctgccgctgctgccgccgtgtggatatcccgggttgaaagcagagcctgcttctccagcccaggacgcccaggaacctccagctcctccacccccccttccgccgtacgcatcatgctccccacgggcaagtctgccagctccgccactgcctggtgtgaacagtagctctgagacaccccccccactgcccccaaagagcccctcgttccaagctccaccccagaaggcaggagcgcaagccctacccgcaccacccgcgccaccaggttcacagccttttctgcaaaaaaaaagacacggccggccaggagcaggcggtggaaagctgaatccccccccagccccccccgctcgatctcccaccaccgagttgtctagcaaaagccagcaggcaactgcctggactccaacccagcagcccggaggacagctgagaaatgggtcgttacacataatcgatgatttcgaaagcaagttcacttttcattctgtcgaggattttcctccccccgatgaatataagccctgccagaagatctacccttcaaagatccctagatctaggacacctgggccttggttgcaagccgaggccgtgggtcagtcttccgatgacatcaagggccgaaattctcaactgagcctgaagactctgaggtag

SEQ ID NO: 36885 - DNA, 1452 bp, Artificial Sequence
  derived and/or modified sequence
atgcctgtgcccccacctccacccccgccactccccccacctcctccacctctcggggccccaccaccccctccccccagtgcccctccggtcagcacagacacaagctctttgcgcagagccgacccaaaaggtagatctgccctcttggcagacattcagcagggtactcgattgagaaaggttactcagatcaatgatcgcagcgccccccaaatagaatcgtcaaaagggaccaataaagagggggggggctcagctaacacgaggggggcctcaacgcctccaaccctgggcgacctgttcgctggtggcttcccagtgttacgaccggctggccagcgtgacgtcgctgggggaaagacagggcaaggccccggctctcgcgctccgagcccgagactccctaacaaaaccatcagcggtcctctaatcccacccgcaagcccccgactgggaaacactagtgaggcccacggtgcagcacggactgcgccaccacggcccaacgtgccggctcccccgcctcctaccccgcccccccccccacctcccttgcctcctccacttccctcatcttctcccatcaagacacccctggtgtcaccccccggaccattgacaaaggggaacctccccgtggtggcaccacccgtgccttgcgcaccacccccaccccccccaccaccgccgcccactcctccgccgcttccacccgcctctgtgctgagcgacaaagctgttaagccacagctggcacccctacacctgccacctataccgcctccattgccacttttacctccatgcggataccctggcttaaaagccgagccagcttcccctgcgcaggacgcccaggagcccccggctccccccccccctctgccaccttacgcgtcatgtagtcccagggcttctctgcctgcacccccactccctggggtgaacagtagctcggagacaccccctccattacctcccaagagtcctagttttcaggcaccacctcaaaaggccggagcccaggcactgcccgcccctccagcaccccctgggagccaacctttccttcagaaaaagagacacggaaggcctggtgccggaggaggaaagctgaacccaccaccggctcctccggctcgatcccctaccacagagttgagcagtaagagtcagcaagcaactgcctggacaccaacacagcagccaggcgggcagctcagaaatggatcccttcacatcatcgacgatttcgagagcaaattcacgttccactctgtcgaggatttccctcccccagatgagtacaagccatgtcagaagatctatcctagcaagataccaagaagtagaacccccggcccctggctgcaggctgaagctgtcgggcagtcatctgatgatattaaagggcgtaactcccaggtcacacaggcatcctgtctctag

SEQ ID NO: 36886 - DNA, 1452 bp, Artificial Sequence
  derived and/or modified sequence
atgccagtgccgccgccgcccccgcctccccttcctccccccccgcccccactaggcgcaccaccaccgccaccaccaagtgcccccccagtctccaccgacacttcatcactccggagagctgacccgaagggaaggagcgctcttctagccgatattcagcagggaactaggcttagaaaggttactcagataaacgatcgcagcgctcctcagatcgagtctagtaaaggaacaaataaagagggagggggcagtgctaatacacgtggtgcatccacccctcccacccttggagaccttttcgctggcggatttcctgttctgaggcccgctgggcagcgtgatgtggccggagggaagactgggcagggacctgggtcccgggcaccgagtccacgactgccaaataagactataagtggtcctttaatccccccagccagtccccgccttggtaacactagtgaggcccatggggctgcaaggaccgctccacctcgacccaacgtgccagccccacccccacccacccctccgccaccaccaccacctctcccaccccctttgccttccagtagtcctattaaaactcccttagtatctccacccggccctttgaccaagggcaatctgcctgtagtggcacccccggtcccatgtgcacctccacccccacccccccccccccctccaactcctcctccccttccacccgctagcgtgttatctgacaaggccgtgaagccccagctggctcctctgcacctgccccccattccccctccactaccactccttcccccctgcggttatccagggttaaaggctgagccggcctcccccgctcaggatgcccaagaaccgcccgcacctcccccccccctccctccatatgcctcctgctccccccgagcatccctgcctgcccctcctctgcctggagtgaattcctcatcggaaacccctcctcctttgcctcccaaaagcccatctttccaggcacccccccagaaggcaggggcccaggccctgccagccccccctgccccgccgggaagccagcccttcctgcagaagaaacgtcacgggaggcccggtgctgggggtgggaagctgaaccctccgcctgcaccgccagcaaggtccccaaccacagaacttagctccaagtctcaacaggctaccgcctggacccccacgcagcaacccggtggccagctaaggaacgggtcactacacatcatcgacgatttcgagtccaaattcaccttccatagcgtggaagatttcccaccaccagatgagtacaagccctgccagaaaatctatccatccaagatccctagatcgcgcacaccaggcccctggttacaagctgaggccgttggccagagttccgacgatatcaagggaagaaactcccaggtcacccaggcctcttgtctctag

SEQ ID NO: 36887 - DNA, 1452 bp, Artificial Sequence
  derived and/or modified sequence
atgcctgtgcccccacctcctcctccacccctgcccccacctcctccacccctgggcgcccctcctcctcctcctccttctgcccctcctgtgtccacagacaccagcagcctgcggcgggctgaccccaagggccgcagcgccctgctggccgacatccagcagggcacccggctgaggaaggtgacccagatcaatgacagaagtgccccccagatcgagagcagcaagggcaccaacaaggagggcggcggcagcgccaacaccaggggggccagcaccccacccaccctgggggacctgtttgctgggggcttccctgtgctgcggcctgctggccagagagatgtggccggcggcaagacaggccagggccctggcagccgggcccccagcccccggctgcccaacaagaccatcagcggccccctcatccccccagccagcccccggctgggcaacaccagcgaggcccatggagctgccaggacagccccaccccggcccaacgtgcctgcccctcctccacccaccccacctcctcctcctccacccctgcccccacccctgcccagcagcagccccatcaagacccccctggtgtccccacctggccccctgaccaagggcaacctgcctgtggtggcccctcctgtgccctgtgcccctcctcctcctcctcctcctcctccacccaccccaccacccctgcccccagcctctgtgctgagtgacaaggctgtgaagccccagctggcccccctgcacctgccccccatccccccacccctgcccctgctgcccccctgtggctacccaggcctgaaggccgagcccgccagccctgcccaggatgcccaggagcccccagcccctcctccacccctgcccccctatgccagctgcagcccccgggccagcctgcctgccccacccctgcccggggtgaacagcagcagcgagaccccaccacccctgccccccaagagccccagcttccaggccccaccccagaaggccggggcccaggccctgcctgcccccccagcccctcctggcagccagcccttcctgcagaagaagagacatggccggcctggggccggcggcggcaagctgaaccccccaccagcccccccagcccggagccccaccacagagctgagcagcaagagccagcaggccacagcctggacccccacccagcagcccggcggccagctgagaaatggcagcctgcacatcattgatgactttgagagcaagttcaccttccacagcgtggaggacttccccccaccagatgagtacaagccctgccagaagatctaccccagcaagatccccaggagcaggaccccaggcccctggctgcaggccgaggccgtgggccagagcagtgatgacatcaagggcaggaacagccagctgagcctgaagaccctgaggtag

SEQ ID NO: 36888 - DNA, 1452 bp, Artificial Sequence
  derived and/or modified sequence
atgcctgtgcccccacctcctcctccacccctgcccccacctcctccacccctgggcgcccctcctcctcctcctccttctgcccctcctgtgtccacagacaccagcagcctgcggcgggctgaccccaagggccgcagcgccctgctggccgacatccagcagggcacccggctgaggaaggtgacccagatcaatgacagaagtgccccccagatcgagagcagcaagggcaccaacaaggagggcggcggcagcgccaacaccaggggggccagcaccccacccaccctgggggacctgtttgctgggggcttccctgtgctgcggcctgctggccagagagatgtggccggcggcaagacaggccagggccctggcagccgggcccccagcccccggctgcccaacaagaccatcagcggccccctcatccccccagccagcccccggctgggcaacaccagcgaggcccatggagctgccaggacagccccaccccggcccaacgtgcctgcccctcctccacccaccccacctcctcctcctccacccctgcccccacccctgcccagcagcagccccatcaagacccccctggtgtccccacctggccccctgaccaagggcaacctgcctgtggtggcccctcctgtgccctgtgcccctcctcctcctcctcctcctcctccacccaccccaccacccctgcccccagcctctgtgctgagtgacaaggctgtgaagccccagctggcccccctgcacctgccccccatccccccacccctgcccctgctgcccccctgtggctacccaggcctgaaggccgagcccgccagccctgcccaggatgcccaggagcccccagcccctcctccacccctgcccccctatgccagctgcagcccccgggccagcctgcctgccccacccctgcccggggtgaacagcagcagcgagaccccaccacccctgccccccaagagccccagcttccaggccccaccccagaaggccggggcccaggccctgcctgcccccccagcccctcctggcagccagcccttcctgcagaagaagagacatggccggcctggggccggcggcggcaagctgaaccccccaccagcccccccagcccggagccccaccacagagctgagcagcaagagccagcaggccacagcctggacccccacccagcagcccggcggccagctgagaaatggcagcctgcacatcattgatgactttgagagcaagttcaccttccacagcgtggaggacttccccccaccagatgagtacaagccctgccagaagatctaccccagcaagatccccaggagcaggaccccaggcccctggctgcaggccgaggccgtgggccagagcagtgatgacatcaagggcaggaacagccaggtgacccaggccagctgcctgtag

SEQ ID NO: 36889 - DNA, 270 bp, Artificial Sequence
  derived and/or modified sequence
atgagctgccagcagaaccagcagcagtgccagcccccccccaagtgcccagccaagagccccgcccagtgtctacctcccgcttcctcctcttgcgcacccagttcaggaggatgcggtccctcctccgaaagatcctgctgtctctcacaccaccgttgtcgtagatcgcatagatgcagatgtcagtcgtctaatagctgcgaccgcgggtcaggtcagcagggtggctccagcagttgtgggcactcttccgctggctgctgttag

SEQ ID NO: 36890 - DNA, 1452 bp, Artificial Sequence
  derived and/or modified sequence
atgcccgtgcccccccccccccccccccccctgccccccccccccccaccacttggtgcgcctccaccgccaccgccttcagcccccccggtgtccacagatacgtcaagcctcaggcgcgccgaccccaagggccgctctgccctcctcgctgacattcaacagggtacccgcctgcgaaaggttacacagatcaacgatagatccgccccacagatagaaagcagtaaagggactaacaaggaaggcggaggatccgctaacactagaggggcttcaacccctcctacgctgggagacctttttgccgggggctttccagtgctgcgacctgcgggccaaagagacgtcgccggtgggaagaccggacagggaccgggctctcgtgctccatcccctcgactcccgaacaagactatttcaggccctctgatcccacccgcgagtcccaggttgggaaatactagcgaggcccatggcgccgctcgcacagccccacccaggcctaatgtgcccgcgcccccacccccgacccccccaccgcctccccctcccctgccacctcccctcccctcctcttcccctatcaagacccctctggtgtcacccccaggccctctgacaaaggggaacttgcctgtggttgcccctccagtaccttgtgcacccccaccccctcctcctccccccccaccgactccaccacccctccctcccgcttctgttttatcagacaaagccgtgaagccccaactggcgccactccatctaccaccaattccaccaccactgcctctgctcccaccctgcggctacccgggccttaaagcggagcctgcaagccccgcacaggatgctcaggaaccacccgcgcctccgccccctttgcccccttatgcttcctgttctcccagagcctcgttacctgcaccacccctgccaggcgtgaactcttcctcagagactccccctccccttccacctaaaagcccgtcgttccaggctccccctcagaaggccggtgcgcaagccctgcccgctcccccagcccctcctggaagccagccatttctgcagaaaaagcggcatggtagacctggggccgggggcgggaaactgaacccgccacccgcacctcccgccaggtcaccaactaccgaattgagctcgaagtcacagcaagctaccgcttggacccctacccaacagcccggcggccagctgcggaacggcagcttgcatattatcgacgacttcgaatcgaaattcacatttcatagcgtggaagatttcccacctcctgacgagtacaagccctgtcagaagatttacccatccaagatccccagatctcggacacctggtccatggttacaagccgaggctgttggacagtcctctgatgacatcaaaggccggaacagccaactgagtctgaagaccctgagatag

SEQ ID NO: 36891 - DNA, 1452 bp, Artificial Sequence
  derived and/or modified sequence
atgcccgtgcccccccccccccccccccccctgcccccccccccccctcctctgggcgccccccctccccccccccccagtgcacccccggtcagcacagacacatcctctctgcgtagggctgatccaaagggccgaagtgcacttttggccgacatccagcaaggcacgcgacttcgaaaggtgacacagattaacgaccggagcgctccacagatcgagtctagtaagggaaccaacaaggaagggggcggttccgcaaacactcggggagccagcacccctccgaccttaggggatctgtttgccggcggtttcccagtgctgcgccctgccggacagcgggacgtagcagggggtaagacagggcagggtcctggtagccgcgctcccagcccccgtctgcccaataagactatctccgggccgctgattccccctgccagccctcgtctcggcaatacttcagaggcccatggcgcagcccgcactgcccccccccgcccaaacgtgccggccccaccacccccgacccctccaccccccccaccaccattaccccccccccttccctcctcatctcccatcaagactcctttagtgtctccaccggggcccctgacgaagggaaaccttcctgtggtcgcacctccagtgccatgcgcaccaccgccacctcctcccccccccccccccacccccccacctctgccccccgcaagcgtgctcagcgacaaggccgtgaagcctcagttggctccattgcacttgccaccaatcccgccgccactgccacttctcccaccttgcggatatcccggcctgaaggccgagcccgcttctcctgcacaggacgcccaggaacctcctgcgccccctcctccactcccgccttacgcctcatgctcacccagggctagtctcccggcaccccccttacccggagtcaactcttccagtgagacaccaccgcctctgccgccgaagtctcccagtttccaggcacccccccaaaaggccggggctcaggccctgcctgccccaccagcaccacctggcagccagccattcttacagaagaaaagacatggtagaccaggcgccggtgggggaaaactcaatccgccccccgcccccccagcccgctctcccactactgagcttagctctaaaagtcagcaggccactgcctggacgcccacccaacagccaggtgggcagctgagaaacggcagcctccatatcatcgatgacttcgaatcaaagttcacatttcattccgtcgaagactttccacccccagatgaatacaaaccttgtcaaaagatctacccctcaaagattccacgaagtcgcacacccgggccatggctccaggcggaagccgtgggccagagctctgatgatattaaaggtcgtaacagccaggtcacacaggcctcctgcttgtag

SEQ ID NO: 36892 - DNA, 1452 bp, Artificial Sequence
  derived and/or modified sequence
atgcccgtgcccccccccccccccccccccctgcccccccccccccctcccctgggtgcccctccccctccccccccatctgcccccccagtgtccacagacacttccagtctgcgccgagccgaccccaaaggcaggagtgcactcctggccgacatccagcaggggaccaggcttagaaaagtgacccagatcaacgataggagcgcccctcagatcgaaagctccaagggcactaacaaggaaggagggggaagcgccaacacacggggagccagcacacctcctaccctgggggacctgttcgccggcggtttcccggtgcttcggccagctggccagagggacgtagccggcggcaaaaccgggcagggcccaggtagcagagctcccagcccaagactccctaacaagaccatctcaggccccttaatccccccagcatccccccgtctcggaaacacctcggaggcccacggggcagctaggaccgccccgccccgacccaacgttcccgccccccctccacccactcccccaccaccacctccccctctccctccccctctcccttcgtcttcccctatcaagaccccattagtttcaccacccggcccgttgaccaagggaaacctacccgtggtggcccccccggttccttgcgctccgccgccaccccccccccctccaccccccacgcctccgccgctgcctcccgcttctgttctctccgataaagccgtcaaacctcagttggcacctttgcacctcccccccattccccctcccctccctttactgcctccatgtggttaccccggactcaaggctgagccggcttctccagcccaagacgcccaggagccccctgcgccccccccgccccttcctccctacgcatcatgttccccacgagccagccttccagctccacccttgcccggtgtgaattccagctctgagaccccgccgcccctgcccccaaagtctccaagctttcaggcaccgccgcaaaaagcgggagcccaggccctgcctgctcccccggcccctcctggctctcagccatttctccagaagaagcggcacggacgtcctggggccggaggggggaaacttaacccaccccctgcccccccagctaggtccccaacaacagaactctctagcaagagccagcaagctaccgcttggacgcctacccagcagcctggaggccagctgaggaacggatccttgcacataattgatgattttgaatcgaaattcactttccatagcgtcgaagactttcccccgccagatgaatacaagccatgccagaagatataccccagtaaaattccgcgatcccgcactccgggtccctggctgcaggcggaggctgtaggacagtcttcagacgacattaaaggacgtaatagtcaagtaacccaggcttcctgtctctag

SEQ ID NO: 36893 - DNA, 1452 bp, Artificial Sequence
  derived and/or modified sequence
atgcccgtgcccccacccccaccccctcccctgccacctccccctccccctttgggtgccccaccacctccccctccctctgccccacccgtgtcaaccgatacttcttccttaaggagggccgatccaaagggcaggtccgcactgctggctgacatacagcaggggaccaggctgagaaaggtaacccaaatcaacgacaggagcgccccacagatagagagttccaaagggaccaataaagagggaggaggctctgccaacacccggggtgcgtcaacgccaccaacattgggcgatctcttcgcaggagggttcccagtcctaaggccagctggccaacgtgatgttgccggaggaaaaaccggccaaggacccggatcgcgggcaccttctcctaggctgcccaacaagacaatctccggaccccttataccgccagcctcccccaggctgggaaatactagtgaagcccacggggctgcccgaaccgcaccccctaggcccaatgtgcccgcacctcctcccccaactccaccacccccacctcccccattgcccccaccccttccttctagttcccccatcaagacgccactagtgtcccctcccggacccctcacaaagggaaacctccctgtggttgccccacctgttccctgtgcacctcccccacccccaccccctcccccacccacaccgccacctctgcctccagcgtcagtcttgagtgataaagctgtgaagcctcagctggcgcctctccacctgccacctatccccccaccattaccactactgcccccatgcggctaccccggtctcaaagccgaaccagcgagtcctgctcaggacgctcaggaacctcccgctcctcccccaccactccccccatacgcctcttgctcccctcgtgcctctctccccgctcctcccctcccaggtgtgaatagctcaagcgaaacacccccacctcttcctcctaagtcaccatcattccaggcccctccacagaaggccggagcccaggccttaccagcgcctcctgcaccccctggaagccagccattcctccaaaagaaaaggcatgggcgacctggagcgggtggaggtaagttaaaccccccacccgctcctcccgctcggtccccaacgacagaactcagctcaaaaagtcagcaggcaacagcctggacccctacccagcagccaggcggtcagctccgcaacggctcactgcacattatcgacgatttcgagtcgaaattcactttccacagcgttgaagactttccccctcccgacgaatacaagccatgtcaaaagatttatccaagtaaaatccccagatctcggacacctggcccttggctccaagctgaggctgtcggacagtcatccgacgacatcaaagggaggaattcgcagctgtccctgaaaactctccgctag

SEQ ID NO: 36894 - DNA, 1452 bp, Artificial Sequence
  derived and/or modified sequence
atgcctgttccacctccccctcccccaccacttcccccacctcccccacccctaggggcaccccctccccctccgccaagcgctccgccagtgagcaccgataccagctcactcaggcgcgcagatcctaagggaaggagcgctctcctggctgatatccagcagggaacccgcctgcgaaaggtcacccagatcaatgacaggtccgcgccacagattgagagtagcaaaggcaccaataaggaggggggagggtctgctaacacaaggggtgccagtacaccaccaacactgggagacctttttgcgggtggtttccccgtgttgcgccctgctgggcagcgggacgtggctggtggcaagaccggacagggcccaggatcccgtgctccttccccacgactccctaacaaaacgattagtggtccactcatccctccggcttcacccagactcggcaacacctctgaggcacatggcgctgccaggacagcgcctcccagaccgaatgtccccgctcctccacccccaacacctcctccccctccgcctccactgcctccgcctttgccatcctctagcccaatcaagactccactcgtctctccccctggccctctcacaaaagggaatttaccagtggtggccccaccggtgccgtgcgcgcctcccccacctccccctcctccccctccaacaccccctcctctcccccctgcctccgttctaagcgataaagctgtcaaaccccagcttgcaccactgcacctcccgccaattccccctcccttgcctctgcttcccccatgtggttaccctgggcttaaagcggagccagcttcacccgctcaagacgcccaggagccccctgctccccctccgcctttgcctccatacgcctcctgttcacctcgcgctagtctccccgctcctccgctgcccggagttaacagcagcagtgagaccccccctcctctgcccccaaagagcccctcctttcaggcaccccctcagaaagctggagcacaagctctccctgccccaccagcgccacccggttctcagccctttctgcagaagaagaggcacggaaggccaggggctggcggtgggaaactgaatcccccacccgcacctccagcccgttcccctactacggagttaagttctaaatcccagcaggccaccgcctggaccccaacacagcagccgggtgggcagcttcggaatgggtctcttcacattattgacgatttcgagagcaagttcaccttccattctgtcgaagacttcccccctccagatgagtataagccatgccagaaaatttacccaagcaaaatacccaggagtagaacaccaggaccatggctgcaagctgaagccgtgggacagagtagtgacgacataaaggggagaaacagtcaggtcacgcaggctagctgtctttag

SEQ ID NO: 36895 - DNA, 1452 bp, Artificial Sequence
  derived and/or modified sequence
atgccggttcctcccccacctcctccgcctctacctccccctcccccaccacttggcgctcctcccccacccccaccaagtgccccacccgtttccactgatacttctagcctcaggcgagcagatcctaaaggtcggagcgctctcctggccgacatccagcagggcacacgcctccgcaaggtgacccagatcaacgaccgcagcgccccacagattgagagcagcaagggaaccaacaaggaggggggaggcagcgccaacaccagaggagcatccacacctccaaccctcggggacctcttcgcgggaggattcccggtcttgagacctgctggccagagagatgtggcgggtggtaagacagggcaggggccagggagcagggcacctagcccccgattacccaacaaaaccatcagtgggcctctgatcccaccggcttcgccacgtttgggaaatacgtctgaggcacacggggctgccagaacagccccacctaggccaaatgtgcccgctccccctccccctacaccccctccaccaccaccacctctgcctccccctcttccctcctcctcacctatcaaaacaccactggtgtcgcctccgggaccccttactaaaggtaacctgcctgtggtggccccacctgtgccatgcgctccaccaccaccgccaccacctccccctccaacacccccacccctgcccccagcaagcgttctgtctgacaaggccgtgaagccccaattggcccctctgcacttgccaccaattccaccaccgctgcccctcctgcccccatgtggttatccaggtttaaaggctgagccggcatcaccggcacaggatgcccaggagcctcctgccccacccccacctcttcccccatacgcctcatgtagccctcgggcttcattgccagccccacccctccctggagtgaacagtagctctgaaaccccacctcccttacctccaaaaagcccctccttccaggcccctcctcagaaggctggcgctcaggcactgcctgcccctcccgctccgcctgggtcccaacctttcctgcaaaagaagaggcatgggagacctggcgctgggggtggtaagttaaaccctccgcctgcacctcccgcacgatctccaaccaccgaactaagctctaagtcccagcaggctaccgcctggacgccgacacagcagcccggaggacaactgagaaatggctcactccatatcatcgatgatttcgagtccaaatttaccttccacagtgtagaagacttccccccaccagacgaatataaaccttgccaaaagatctacccctccaagattccaagatctcgaactcccggaccttggctgcaggccgaggcagtcggccagtccagtgatgacattaaggggaggaattcccaagttacacaggcaagctgtctgtag

SEQ ID NO: 36896 - DNA, 4002 bp, Artificial Sequence
  derived and/or modified sequence
atgccagtgccaccgccacccccacctcctctgcctccacctcccccgcctctgggggctcctccccctcccccaccatcagcacccccggtaagcacagacacctccagcttgcgaagggcagatccgaaaggccggagtgcgctgttggctgatatccagcaaggaactcgcctgcgcaaagtcacgcagatcaacgaccgcagtgccccgcagatcgagagttctaaaggaaccaacaaagaaggaggaggttctgcaaacacacgaggcgcgagcacacctcccaccctgggagatctgtttgctggtggctttcctgtattgcgaccagcaggccagcgggatgtagcaggtggcaagacagggcagggccctggctcccgcgcgccctctcccaggcttcccaacaaaaccatcagcggcccgcttatcccgcctgcctctcccaggctaggcaatacctccgaggcgcatggcgctgccaggacagccccgcctcgccccaacgtgcctgccccgccccctcccaccccaccccctccgcctccacccttacccccgccccttccctcttcctcccccatcaaaactccgcttgtgtccccacccggcccactgaccaaagggaacctcccggtggttgcaccccccgtcccctgtgcgccaccacctccacctccgccacctcccccaacgccacccccgctgcccccggcctcggttcttagtgacaaggcagtgaagcctcagctggctcccttgcacctcccgcccatcccgcccccgctccctctgctcccaccttgtgggtatccggggctcaaagcggagcccgccagccctgcgcaagatgcgcaggagcctcccgccccgccgcccccgctccccccttatgcttcttgctccccgagggcttctttgcccgcgccccctttgccaggagttaatagcagcagtgaaactccacccccgctaccccctaaatcccccagcttccaggccccaccgcagaaggccggtgcgcaggccttgcccgccccgcctgcccctccgggctcccagccgttcctgcagaagaagaggcatggccgaccaggggccggtgggggaaagctaaatccacctccagcaccccctgcgagatcacctaccacagagctttcaagcaagagccagcaggccacagcctggaccccgacgcagcagcctggaggtcaactgcgaaatggaagcctgcacatcattgatgacttcgagtctaaattcacgttccattctgtggaagactttccccctccggatgaatataaaccatgccagaagatttaccccagcaagatccccagaagccgtacacctggtccctggctccaagcggaagcagtcgggcagagctctgatgacatcaaaggcagaaattctcagttatctctaaagactcttcggtgagaagacagatgaagcgaaggtcctggggttccaggttgcagaacaacatgtcagaccccacccaccccatgctcaagctgtaattcagttggcatacaggcttggaattgagaatttatttattgtaaatatgtgatttgcacgggctttaaagcagtattttaattgacttttatttcggtaatattttttaaaacacccctcatttttccattttttgcattgcatcttggcatttgtcagcacagatagagccctgtccctccacctagtgcccactccatgactgtgaatctgcttgcaggctggcccttcctagattctgaaccgtttgtagagagtccttagtttgcaggtagccccaaagttataaatatccacaacggcttcttattggcataatttcatattctcatcacactaactgcaaaatcaaaccaaataatgccttatcaatgatgcagctcagaggaagtagcgtgtcccccacacccagacagtgccgcgcagcctccagggaacgaggtgccatgtctcgcttccattttgcagtacagggaatttttttttttttttttttttttttttttgctgcctaatgtaatacatcacaaagtaaaggcaagagtgggcttggccctccgatgccaaccacagggccccttttgtaactgaataatcctccaagtagccagtgctcctactgtttacagtgtccctcgtgcccaagtctctgtcactttcatcctgttccctccaagttcccagtcccatcccagtagccagctttatgagattttggtatttcttccctacagattaaaaacatacacaactcatcattatgctaaactaccagttgtatctcagaggtctccccttctgcccttgcttcgagtgtggacttccatggaaaatatgacatgaaaaagtgtagaacgaaacatcgtgtgaaatacctgccacaaatacctagtgcctcactgcccccatcttaggatccttggagccacccgtcaggcaaaacctagctcccttctgagctaaaggagaaccttgcctgacaactccacattcattcccttgtggtgggcacctgtctgtggggagatgtgtgcaagctcagccactctgaatatggaaaaggtcaggccgggctggtcctgctcttcactccctcttcttgatcctgtagggagtggaaatgtgtttttgcttgctgcctgacccctgatgttccccatctttggtcggggaagactgtgacagaggaaggagaaaaaatagaaggaaacagactgatccctgggctgtgctcaaaatagctgccctttaaaggaaatcaggcagggaggggagggaaaccagcgaaaaagaaatttgctttgcaacaacccacgcacacattcacccctgaagtatatcatgaacagaccaagccatccagaaaggcagccggtcaggagggtgtgggcaaacatgactgcatctgcctcactgttgtctggagtaacgactcaggtggtgtcctgcagcagtgctgtgctttctcattccagatggaagcaagtgagccagggtcaaattcccttctccaggggaatgaatcaagcccaaactgtaacagctaaataagtagaagtttttgcaggtcatcagctctgggcataactaatttgttttattggttctggaagatttccaaaaagccagaatttattattataacagtgtccactccactgccctcacagttgtgtaaaataattatagaagttttaatgatcctgattaagaagaccctagacaaaggcaattccaccttcagagtagactgcctgccctaatgaggtgtttagacattcgtgtctcctatggctgggatggaaattaaaataacactatttaaggacagagcgggccaggagcagtggctcatgcaggtaatcccagcatgggaggctgaggtgggtggattacttgaggttaggagttcaagaccagcctggccaacatggtgaaaccctgtctactcaaatacaaaaaattagccaggcatggtggctcacacctgtaatcccagcaacttgggaggttcaggcacaagaattgcttgaaccctggaggtggaggttgcagtgagctgagatggcaccactgcactctagcctgggcaacagagcgagaccctaactcaaaaaaaaaaaaggacagaggggaggaaggagcagaaaccaaaaatggcaattagggagaaatctcaggaatgtggcatcccatctccccttgagacctatcactgaattcacaacccttcgagctcatgctggtgcactgagtcccttgggcgctgtaaaggtttaaccccttgactgtaaactcagacttagagacatctgagtcacacagtccccgccattgtcacatattctcactgacactgcagtctgtgactcctccaatgtttcacgtgtattttatatttattgatgtctccttccgcagattcatttctttgtacttaataaactttagtaagtggaaatgctt

SEQ ID NO: 36897 - DNA, 3241 bp, Artificial Sequence
  derived and/or modified sequence
atgccagtgccaccgccacccccacctcctctgcctccacctcccccgcctctgggggctcctccccctcccccaccatcagcacccccggtaagcacagacacctccagcttgcgaagggcagatccgaaaggccggagtgcgctgttggctgatatccagcaaggaactcgcctgcgcaaagtcacgcagatcaacgaccgcagtgccccgcagatcgagagttctaaaggaaccaacaaagaaggaggaggttctgcaaacacacgaggcgcgagcacacctcccaccctgggagatctgtttgctggtggctttcctgtattgcgaccagcaggccagcgggatgtagcaggtggcaagacagggcagggccctggctcccgcgcgccctctcccaggcttcccaacaaaaccatcagcggcccgcttatcccgcctgcctctcccaggctaggcaatacctccgaggcgcatggcgctgccaggacagccccgcctcgccccaacgtgcctgccccgccccctcccaccccaccccctccgcctccacccttacccccgccccttccctcttcctcccccatcaaaactccgcttgtgtccccacccggcccactgaccaaagggaacctcccggtggttgcaccccccgtcccctgtgcgccaccacctccacctccgccacctcccccaacgccacccccgctgcccccggcctcggttcttagtgacaaggcagtgaagcctcagctggctcccttgcacctcccgcccatcccgcccccgctccctctgctcccaccttgtgggtatccggggctcaaagcggagcccgccagccctgcgcaagatgcgcaggagcctcccgccccgccgcccccgctccccccttatgcttcttgctccccgagggcttctttgcccgcgccccctttgccaggagttaatagcagcagtgaaactccacccccgctaccccctaaatcccccagcttccaggccccaccgcagaaggccggtgcgcaggccttgcccgccccgcctgcccctccgggctcccagccgttcctgcagaagaagaggcatggccgaccaggggccggtgggggaaagctaaatccacctccagcaccccctgcgagatcacctaccacagagctttcaagcaagagccagcaggccacagcctggaccccgacgcagcagcctggaggtcaactgcgaaatggaagcctgcacatcattgatgacttcgagtctaaattcacgttccattctgtggaagactttccccctccggatgaatataaaccatgccagaagatttaccccagcaagatccccagaagccgtacacctggtccctggctccaagcggaagcagtcgggcagagctctgatgacatcaaaggcagaaattctcaggtaacacaagcctcatgtctctgaatgtaaaaccaggaattctcctcaggaggcacagaaatggtaagggtatgctttctcctaaacagctttatatttttcctcacactccttttcctcagggaaagccatttggtggaccttttttcaagccagaatgaaacactcaccatttcaaaatctgaagtgtgacaaaagggggcttccctggaatcaccactacatatagaagcaagtttagcaactctgacattctgcaacaatcatgccaatcacttcccattcttccttggttatgatggcctgtgagaaaaactgaataacatgtataaaacataattcagtattctctctcatctgtagaatacatggtttcttttagcacacttggagtttttttttcccccaccaatgttataattgattttggccaaatttagtcacaattcaagtactagtacccacaagaaatgaacagaactagaaggcaagccagacagctgcttttgtgataagacagtccttgaagaaacacctttaatctcacccagggcatcttgaaccgaattatttcctaacctggacacatttccctgcacatgacagggtctcatctttaaaagccctttgtttctttgaaaacatgtattcagtcgaacaataatctccccatttctgaatactatgtgacagactacagagtcacttgcagttaaaccaggcaattctgcaactgtgtggaacatcaaggaaagtgacctgagaaggaagaggctaggttcctggaagctaggatgagttcctcagaggaaaaagtacatcctctagcagataagtatcccccttttctaaccacagctgatgcaagaattgcagtaacgattcttagacgatcacaggttcaaaactgtgtgtatgattgtagttaaggaagaagtatatatacacaggaaaaaagacaggaagaatatacacaatattgttaacaggtagagagaattctgagaagatggcagaggagaaagcaccaggaatctgtggacaacaattgcattggcagaatctgtctgatgtaatttgtctcatgtattttggaactctgggattcattaaaggcttgaaacttccatgggaaagcttggacagtaaattgtgctcttagtacaatagtaactactcatcctccaccccccaccccatggcaggcaactgggcacgtgttcctggagcagcttgcatacagcttgcaggagccaaggtgggcacaaaaaaaaaaccctgtcctccagatactggggaatctgttctctgattggttattgctgcttctgatcacagaggtacaaataaagagatgggcagccattgttgcacctcctcttattgttgtaaatccctttccctctggctgaagtggcctcctggggatttcaagggctggtggccattttgttcctcctgtccttgctctttttttttccccatttgggagccaaacattaaagatgaacattcaaaggctactacatatatgatgaaaattagaaagtgaccacatatgcccagggaaaggcacaggctcagaaaagaccaagaagaccttaagattacacctcagactgattcttagcacagagacagcctacaacaatcaaaaaaataaaatgaacaaaaacaataagaaaaaccagcaaaccctgggggacagagagaattgatatctagagttaccacattattagattaaaatgtagagttttcaacaacaacaaaaatcacatcatacaaagaaacaggagagtatggcccattc

SEQ ID NO: 36898 - DNA, 3491 bp, Artificial Sequence
  derived and/or modified sequence
cccgcctccgcgtcccggcagcaccagagccggtggccggggagcgagccgggcgcaccgagcgcagctcggcggtagcggcgccgcttggagcacgggcgctgcgggacggagcccggagccggaggcggcggcggcggagacgtcggccggagctcgagtccagtccagcccccggctccgccacctgcagagcagaagccactctcttgggaccattcataagcaggagacatcaacaccgtgacacatgccagtgccaccgccacccccacctcctctgcctccacctcccccgcctctgggggctcctccccctcccccaccatcagcacccccggtaagcacagacacctccagcttgcgaagggcagatccgaaaggccggagtgcgctgttggctgatatccagcaaggaactcgcctgcgcaaagtcacgcagatcaacgaccgcagtgccccgcagatcgagagttctaaaggaaccaacaaagaaggaggaggttctgcaaacacacgaggcgcgagcacacctcccaccctgggagatctgtttgctggtggctttcctgtattgcgaccagcaggccagcgggatgtagcaggtggcaagacagggcagggccctggctcccgcgcgccctctcccaggcttcccaacaaaaccatcagcggcccgcttatcccgcctgcctctcccaggctaggcaatacctccgaggcgcatggcgctgccaggacagccccgcctcgccccaacgtgcctgccccgccccctcccaccccaccccctccgcctccacccttacccccgccccttccctcttcctcccccatcaaaactccgcttgtgtccccacccggcccactgaccaaagggaacctcccggtggttgcaccccccgtcccctgtgcgccaccacctccacctccgccacctcccccaacgccacccccgctgcccccggcctcggttcttagtgacaaggcagtgaagcctcagctggctcccttgcacctcccgcccatcccgcccccgctccctctgctcccaccttgtgggtatccggggctcaaagcggagcccgccagccctgcgcaagatgcgcaggagcctcccgccccgccgcccccgctccccccttatgcttcttgctccccgagggcttctttgcccgcgccccctttgccaggagttaatagcagcagtgaaactccacccccgctaccccctaaatcccccagcttccaggccccaccgcagaaggccggtgcgcaggccttgcccgccccgcctgcccctccgggctcccagccgttcctgcagaagaagaggcatggccgaccaggggccggtgggggaaagctaaatccacctccagcaccccctgcgagatcacctaccacagagctttcaagcaagagccagcaggccacagcctggaccccgacgcagcagcctggaggtcaactgcgaaatggaagcctgcacatcattgatgacttcgagtctaaattcacgttccattctgtggaagactttccccctccggatgaatataaaccatgccagaagatttaccccagcaagatccccagaagccgtacacctggtccctggctccaagcggaagcagtcgggcagagctctgatgacatcaaaggcagaaattctcaggtaacacaagcctcatgtctctgaatgtaaaaccaggaattctcctcaggaggcacagaaatggtaagggtatgctttctcctaaacagctttatatttttcctcacactccttttcctcagggaaagccatttggtggaccttttttcaagccagaatgaaacactcaccatttcaaaatctgaagtgtgacaaaagggggcttccctggaatcaccactacatatagaagcaagtttagcaactctgacattctgcaacaatcatgccaatcacttcccattcttccttggttatgatggcctgtgagaaaaactgaataacatgtataaaacataattcagtattctctctcatctgtagaatacatggtttcttttagcacacttggagtttttttttcccccaccaatgttataattgattttggccaaatttagtcacaattcaagtactagtacccacaagaaatgaacagaactagaaggcaagccagacagctgcttttgtgataagacagtccttgaagaaacacctttaatctcacccagggcatcttgaaccgaattatttcctaacctggacacatttccctgcacatgacagggtctcatctttaaaagccctttgtttctttgaaaacatgtattcagtcgaacaataatctccccatttctgaatactatgtgacagactacagagtcacttgcagttaaaccaggcaattctgcaactgtgtggaacatcaaggaaagtgacctgagaaggaagaggctaggttcctggaagctaggatgagttcctcagaggaaaaagtacatcctctagcagataagtatcccccttttctaaccacagctgatgcaagaattgcagtaacgattcttagacgatcacaggttcaaaactgtgtgtatgattgtagttaaggaagaagtatatatacacaggaaaaaagacaggaagaatatacacaatattgttaacaggtagagagaattctgagaagatggcagaggagaaagcaccaggaatctgtggacaacaattgcattggcagaatctgtctgatgtaatttgtctcatgtattttggaactctgggattcattaaaggcttgaaacttccatgggaaagcttggacagtaaattgtgctcttagtacaatagtaactactcatcctccaccccccaccccatggcaggcaactgggcacgtgttcctggagcagcttgcatacagcttgcaggagccaaggtgggcacaaaaaaaaaaccctgtcctccagatactggggaatctgttctctgattggttattgctgcttctgatcacagaggtacaaataaagagatgggcagccattgttgcacctcctcttattgttgtaaatccctttccctctggctgaagtggcctcctggggatttcaagggctggtggccattttgttcctcctgtccttgctctttttttttccccatttgggagccaaacattaaagatgaacattcaaaggctactacatatatgatgaaaattagaaagtgaccacatatgcccagggaaaggcacaggctcagaaaagaccaagaagaccttaagattacacctcagactgattcttagcacagagacagcctacaacaatcaaaaaaataaaatgaacaaaaacaataagaaaaaccagcaaaccctgggggacagagagaattgatatctagagttaccacattattagattaaaatgtagagttttcaacaacaacaaaaatcacatcatacaaagaaacaggagagtatggcccattc

SEQ ID NO: 36899 - protein, 190 aa, Artificial Sequence
  derived and/or modified sequence
MLTPAFHFNILKPYMKIFNESVNIMHAKWQLLASEGSACLDMFEHISLMTLDSLQKCVFSFDSHCQEKPSEYIAAILELSALVSKRHHEILLHIDFLYYLTPDGQRFRRACRLVHDFTDAVIQERRRTLPSQGVDDFLQAKAKSKTLDFIDVLLLSKAMTPRPVVSPGSCTTLQSTQNTRSAAGRRCKNF

SEQ ID NO: 36900 - protein, 520 aa, Artificial Sequence
  derived and/or modified sequence
MSQLSLSWLGLWPVAASPWLLLLLVGASWLLAHVLAWTYAFYDNCRRLRCFPQPPRRNWFWGHQGMVNPTEEGMRVLTQLVATYPQGFKVWMGPISPLLSLCHPDIIRSVINASAAIAPKDKFFYSFLEPWLGDGLLLSAGDKWSRHRRMLTPAFHFNILKPYMKIFNESVNIMHAKWQLLASEGSACLDMFEHISLMTLDSLQKCVFSFDSHCQEKPSEYIAAILELSALVSKRHHEILLHIDFLYYLTPDGQRFRRACRLVHDFTDAVIQERRRTLPSQGVDDFLQAKAKSKTLDFIDVLLLSKDEDGKKLSDEDIRAEADTFMFEGHDTTASGLSWVLYHLAKHPEYQERCRQEVQELLKDREPKEIEWDDLAHLPFLTMCMKESLRLHPPVPVISRHVTQDIVLPDGRVIPKGIICLISVFGTHHNPAVWPDPEVYDPFRFDPENIKERSPLAFIPFSAGPRNCIGQTFAMAEMKVVLALTLLRFRVLPDHTEPRRKPELVLRAEGGLWLRVEPLS

SEQ ID NO: 36901 - protein, 371 aa, Artificial Sequence
  derived and/or modified sequence
MLTPAFHFNILKPYMKIFNESVNIMHAKWQLLASEGSACLDMFEHISLMTLDSLQKCVFSFDSHCQEKPSEYIAAILELSALVSKRHHEILLHIDFLYYLTPDGQRFRRACRLVHDFTDAVIQERRRTLPSQGVDDFLQAKAKSKTLDFIDVLLLSKDEDGKKLSDEDIRAEADTFMFEGHDTTASGLSWVLYHLAKHPEYQERCRQEVQELLKDREPKEIEWDDLAHLPFLTMCMKESLRLHPPVPVISRHVTQDIVLPDGRVIPKGIICLISVFGTHHNPAVWPDPEVYDPFRFDPENIKERSPLAFIPFSAGPRNCIGQTFAMAEMKVVLALTLLRFRVLPDHTEPRRKPELVLRAEGGLWLRVEPLS

SEQ ID NO: 36902 - protein, 1100 aa, Artificial Sequence
  derived and/or modified sequence
MKTSKASQRYRGIRRNASQCYLYQESLLLSNLDDSFSADETGDSNDPEQIFQNIQFQKDLMANIRCRPWTMGQKLRALRQAKNIVLKFEGRLTRTRGYQAAGAELWRKFARLACNFVVIFIPWEMRIKKIESHFGSGVASYFIFLRWLFGINIVLTIMTGAFIVIPELIAGQPFGSTARKTIPKEQVSSAQDLDTVWSLGGYLQYSVLFYGYYGRERKIGRAGYRLPLAYFLVGMAVFAYSFIILLKKMAKNSRTSLASASNENYTFCWRVFCAWDYLIGNPEAAESKTAAIVNSIREAILEEQEKKKSKNLAVTICLRIIANILVLLSLAGSIYLIYFVVDRSQKLEQSKKELTLWEKNEVSVVVSLVTMIAPSAFDLIAALEMYHPRTTLRFQLARVLVLYLGNLYSLIIALLDKVNSMSIEEMATKNNTSHWIDSTTFFATRTAPEEEKWSTSRPGMGLRRNNTWALEETSISAYTMPLIKANKTSLHTQSPQDQCWETYVGQEMLKLSIIDMLFTVASILLIDFFRGLFVRYLSDYWCWDLESKFPEYGEFKIAENVLHLVYNQGMIWMGAFFSPCLPAFNVLKLIGLMYLRSWAVLTCNVPHQQVFRASRSNNFYLAMLLFMLFLCMLPTIFAIVRYKPSLNCGPFSGQEKIYDIVSETIEKDFPVWFGSVVGHISSPVVILPAVLLLFMLIYYLQSIARSLKLSNHQLKMQIQNARSEDKKKVAQMVEARIQTQEESTKKLPNDSDLTSQLSSAHSGTPQNNGNVAHFDSGSSKSGRIETVAQSMPQSPRPGDRAPSSPLPGVPKSRLEHETNRYLHGLCASTSDLHRNRSRTPMTFTTHIEDVHSEPLFRKDFQQINPPHRGPQASTLLAQGPRPHAPRYYVINECDSYKKKHLNVWPERHFKIDASGDIVELYPRNVRQYASRVPRQPPSPQLSEEEEETPSRDWIKRSLPPRSLIDLRRAPHFYIGERSESQTRDPEHQGRVHYKSWNEDFEGHLERPAYVPRKPRSRNFQYPQPPLKPRGKPRFEPSLTESDSVSAASSSDQQNSSADQYLQVTHSQGRFPRSVGQPSRRKAKSGQELTVDLDDLICSDV

SEQ ID NO: 36903 - protein, 1101 aa, Artificial Sequence
  derived and/or modified sequence
MKTSKASQRYRGIRRNASQCYLYQESLLLSNLDDSFSADETGDSNDPEQIFQNIQFQKDLMANIRCRPWTMGQKLRALRQAKNIVLKFEGRLTRTRGYQAAGAELWRKFARLACNFVVIFIPWEMRIKKIESHFGSGVASYFIFLRWLFGINIVLTIMTGAFIVIPELIAGQPFGSTARKTIPKEQVSSAQDLDTVWSLGGYLQYSVLFYGYYGRERKIGRAGYRLPLAYFLVGMAVFAYSFIILLKKMAKNSRTSLASASNENYTFCWRVFCAWDYLIGNPEAAESKTAAIVNSIREAILEEQEKKKSKNLAVTICLRIIANILVLLSLAGSIYLIYFVVDRSQKLEQSKKELTLWEKNEQVSVVVSLVTMIAPSAFDLIAALEMYHPRTTLRFQLARVLVLYLGNLYSLIIALLDKVNSMSIEEMATKNNTSHWIDSTTFFATRTAPEEEKWSTSRPGMGLRRNNTWALEETSISAYTMPLIKANKTSLHTQSPQDQCWETYVGQEMLKLSIIDMLFTVASILLIDFFRGLFVRYLSDYWCWDLESKFPEYGEFKIAENVLHLVYNQGMIWMGAFFSPCLPAFNVLKLIGLMYLRSWAVLTCNVPHQQVFRASRSNNFYLAMLLFMLFLCMLPTIFAIVRYKPSLNCGPFSGQEKIYDIVSETIEKDFPVWFGSVVGHISSPVVILPAVLLLFMLIYYLQSIARSLKLSNHQLKMQIQNARSEDKKKVAQMVEARIQTQEESTKKLPNDSDLTSQLSSAHSGTPQNNGNVAHFDSGSSKSGRIETVAQSMPQSPRPGDRAPSSPLPGVPKSRLEHETNRYLHGLCASTSDLHRNRSRTPMTFTTHIEDVHSEPLFRKDFQQINPPHRGPQASTLLAQGPRPHAPRYYVINECDSYKKKHLNVWPERHFKIDASGDIVELYPRNVRQYASRVPRQPPSPQLSEEEEETPSRDWIKRSLPPRSLIDLRRAPHFYIGERSESQTRDPEHQGRVHYKSWNEDFEGHLERPAYVPRKPRSRNFQYPQPPLKPRGKPRFEPSLTESDSVSAASSSDQQNSSADQYLQVTHSQGRFPRSVGQPSRRKAKSGQELTVDLDDLICSDV

SEQ ID NO: 36904 - DNA, 3303 bp, Artificial Sequence
  derived and/or modified sequence
atgaagaccagcaaggccagccagagatacagaggcatcagaagaaacgccagccagtgctacctgtaccaggagagcctgctgctgagcaacctggacgacagcttcagcgccgacgagaccggcgacagcaacgaccccgagcagatcttccagaacatccagttccagaaggacctgatggccaacatcagatgcagaccctggaccatgggccagaagctgagagccctgagacaggccaagaacatcgtgctgaagttcgagggcagactgaccagaaccagaggctaccaggccgccggcgccgagctgtggagaaagttcgccagactggcctgcaacttcgtggtgatcttcatcccctgggagatgagaatcaagaagatcgagagccacttcggcagcggcgtggccagctacttcatcttcctgagatggctgttcggcatcaacatcgtgctgaccatcatgaccggcgccttcatcgtgatccccgagctgatcgccggccagcccttcggcagcaccgccagaaagaccatccccaaggagcaggtgagcagcgcccaggacctggacaccgtgtggagcctgggcggctacctgcagtacagcgtgctgttctacggctactacggcagagagagaaagatcggcagagccggctacagactgcccctggcctacttcctggtgggcatggccgtgttcgcctacagcttcatcatcctgctgaagaagatggccaagaacagcagaaccagcctggccagcgccagcaacgagaactacaccttctgctggagagtgttctgcgcctgggactacctgatcggcaaccccgaggccgccgagagcaagaccgccgccatcgtgaacagcatcagagaggccatcctggaggagcaggagaagaagaagagcaagaacctggccgtgaccatctgcctgagaatcatcgccaacatcctggtgctgctgagcctggccggcagcatctacctgatctacttcgtggtggacagaagccagaagctggagcagagcaagaaggagctgaccctgtgggagaagaacgaggtgagcgtggtggtgagcctggtgaccatgatcgcccccagcgccttcgacctgatcgccgccctggagatgtaccaccccagaaccaccctgagattccagctggccagagtgctggtgctgtacctgggcaacctgtacagcctgatcatcgccctgctggacaaggtgaacagcatgagcatcgaggagatggccaccaagaacaacaccagccactggatcgacagcaccaccttcttcgccaccagaaccgcccccgaggaggagaagtggagcaccagcagacccggcatgggcctgagaagaaacaacacctgggccctggaggagaccagcatcagcgcctacaccatgcccctgatcaaggccaacaagaccagcctgcacacccagagcccccaggaccagtgctgggagacctacgtgggccaggagatgctgaagctgagcatcatcgacatgctgttcaccgtggccagcatcctgctgatcgacttcttcagaggcctgttcgtgagatacctgagcgactactggtgctgggacctggagagcaagttccccgagtacggcgagttcaagatcgccgagaacgtgctgcacctggtgtacaaccagggcatgatctggatgggcgccttcttcagcccctgcctgcccgccttcaacgtgctgaagctgatcggcctgatgtacctgagaagctgggccgtgctgacctgcaacgtgccccaccagcaggtgttcagagccagcagaagcaacaacttctacctggccatgctgctgttcatgctgttcctgtgcatgctgcccaccatcttcgccatcgtgagatacaagcccagcctgaactgcggccccttcagcggccaggagaagatctacgacatcgtgagcgagaccatcgagaaggacttccccgtgtggttcggcagcgtggtgggccacatcagcagccccgtggtgatcctgcccgccgtgctgctgctgttcatgctgatctactacctgcagagcatcgccagaagcctgaagctgagcaaccaccagctgaagatgcagatccagaacgccagaagcgaggacaagaagaaggtggcccagatggtggaggccagaatccagacccaggaggagagcaccaagaagctgcccaacgacagcgacctgaccagccagctgagcagcgcccacagcggcaccccccagaacaacggcaacgtggcccacttcgacagcggcagcagcaagagcggcagaatcgagaccgtggcccagagcatgccccagagccccagacccggcgacagagcccccagcagccccctgcccggcgtgcccaagagcagactggagcacgagaccaacagatacctgcacggcctgtgcgccagcaccagcgacctgcacagaaacagaagcagaacccccatgaccttcaccacccacatcgaggacgtgcacagcgagcccctgttcagaaaggacttccagcagatcaaccccccccacagaggcccccaggccagcaccctgctggcccagggccccagaccccacgcccccagatactacgtgatcaacgagtgcgacagctacaagaagaagcacctgaacgtgtggcccgagagacacttcaagatcgacgccagcggcgacatcgtggagctgtaccccagaaacgtgagacagtacgccagcagagtgcccagacagccccccagcccccagctgagcgaggaggaggaggagacccccagcagagactggatcaagagaagcctgccccccagaagcctgatcgacctgagaagagccccccacttctacatcggcgagagaagcgagagccagaccagagaccccgagcaccagggcagagtgcactacaagagctggaacgaggacttcgagggccacctggagagacccgcctacgtgcccagaaagcccagaagcagaaacttccagtacccccagccccccctgaagcccagaggcaagcccagattcgagcccagcctgaccgagagcgacagcgtgagcgccgccagcagcagcgaccagcagaacagcagcgccgaccagtacctgcaggtgacccacagccagggcagattccccagaagcgtgggccagcccagcagaagaaaggccaagagcggccaggagctgaccgtggacctggacgacctgatctgcagcgacgtgtag

SEQ ID NO: 36905 - DNA, 3306 bp, Artificial Sequence
  derived and/or modified sequence
atgaagaccagcaaggccagccagagatacagaggcatcagaagaaacgccagccagtgctacctgtaccaggagagcctgctgctgagcaacctggacgacagcttcagcgccgacgagaccggcgacagcaacgaccccgagcagatcttccagaacatccagttccagaaggacctgatggccaacatcagatgcagaccctggaccatgggccagaagctgagagccctgagacaggccaagaacatcgtgctgaagttcgagggcagactgaccagaaccagaggctaccaggccgccggcgccgagctgtggagaaagttcgccagactggcctgcaacttcgtggtgatcttcatcccctgggagatgagaatcaagaagatcgagagccacttcggcagcggcgtggccagctacttcatcttcctgagatggctgttcggcatcaacatcgtgctgaccatcatgaccggcgccttcatcgtgatccccgagctgatcgccggccagcccttcggcagcaccgccagaaagaccatccccaaggagcaggtgagcagcgcccaggacctggacaccgtgtggagcctgggcggctacctgcagtacagcgtgctgttctacggctactacggcagagagagaaagatcggcagagccggctacagactgcccctggcctacttcctggtgggcatggccgtgttcgcctacagcttcatcatcctgctgaagaagatggccaagaacagcagaaccagcctggccagcgccagcaacgagaactacaccttctgctggagagtgttctgcgcctgggactacctgatcggcaaccccgaggccgccgagagcaagaccgccgccatcgtgaacagcatcagagaggccatcctggaggagcaggagaagaagaagagcaagaacctggccgtgaccatctgcctgagaatcatcgccaacatcctggtgctgctgagcctggccggcagcatctacctgatctacttcgtggtggacagaagccagaagctggagcagagcaagaaggagctgaccctgtgggagaagaacgagcaggtgagcgtggtggtgagcctggtgaccatgatcgcccccagcgccttcgacctgatcgccgccctggagatgtaccaccccagaaccaccctgagattccagctggccagagtgctggtgctgtacctgggcaacctgtacagcctgatcatcgccctgctggacaaggtgaacagcatgagcatcgaggagatggccaccaagaacaacaccagccactggatcgacagcaccaccttcttcgccaccagaaccgcccccgaggaggagaagtggagcaccagcagacccggcatgggcctgagaagaaacaacacctgggccctggaggagaccagcatcagcgcctacaccatgcccctgatcaaggccaacaagaccagcctgcacacccagagcccccaggaccagtgctgggagacctacgtgggccaggagatgctgaagctgagcatcatcgacatgctgttcaccgtggccagcatcctgctgatcgacttcttcagaggcctgttcgtgagatacctgagcgactactggtgctgggacctggagagcaagttccccgagtacggcgagttcaagatcgccgagaacgtgctgcacctggtgtacaaccagggcatgatctggatgggcgccttcttcagcccctgcctgcccgccttcaacgtgctgaagctgatcggcctgatgtacctgagaagctgggccgtgctgacctgcaacgtgccccaccagcaggtgttcagagccagcagaagcaacaacttctacctggccatgctgctgttcatgctgttcctgtgcatgctgcccaccatcttcgccatcgtgagatacaagcccagcctgaactgcggccccttcagcggccaggagaagatctacgacatcgtgagcgagaccatcgagaaggacttccccgtgtggttcggcagcgtggtgggccacatcagcagccccgtggtgatcctgcccgccgtgctgctgctgttcatgctgatctactacctgcagagcatcgccagaagcctgaagctgagcaaccaccagctgaagatgcagatccagaacgccagaagcgaggacaagaagaaggtggcccagatggtggaggccagaatccagacccaggaggagagcaccaagaagctgcccaacgacagcgacctgaccagccagctgagcagcgcccacagcggcaccccccagaacaacggcaacgtggcccacttcgacagcggcagcagcaagagcggcagaatcgagaccgtggcccagagcatgccccagagccccagacccggcgacagagcccccagcagccccctgcccggcgtgcccaagagcagactggagcacgagaccaacagatacctgcacggcctgtgcgccagcaccagcgacctgcacagaaacagaagcagaacccccatgaccttcaccacccacatcgaggacgtgcacagcgagcccctgttcagaaaggacttccagcagatcaaccccccccacagaggcccccaggccagcaccctgctggcccagggccccagaccccacgcccccagatactacgtgatcaacgagtgcgacagctacaagaagaagcacctgaacgtgtggcccgagagacacttcaagatcgacgccagcggcgacatcgtggagctgtaccccagaaacgtgagacagtacgccagcagagtgcccagacagccccccagcccccagctgagcgaggaggaggaggagacccccagcagagactggatcaagagaagcctgccccccagaagcctgatcgacctgagaagagccccccacttctacatcggcgagagaagcgagagccagaccagagaccccgagcaccagggcagagtgcactacaagagctggaacgaggacttcgagggccacctggagagacccgcctacgtgcccagaaagcccagaagcagaaacttccagtacccccagccccccctgaagcccagaggcaagcccagattcgagcccagcctgaccgagagcgacagcgtgagcgccgccagcagcagcgaccagcagaacagcagcgccgaccagtacctgcaggtgacccacagccagggcagattccccagaagcgtgggccagcccagcagaagaaaggccaagagcggccaggagctgaccgtggacctggacgacctgatctgcagcgacgtgtag

SEQ ID NO: 36906 - DNA, 3303 bp, Artificial Sequence
  derived and/or modified sequence
atgaagacctcaaaggcttcccagcgttaccgtgggattagaagaaacgctagtcagtgctacctctatcaggagtcattacttctgtccaatctggacgactcctttagcgccgatgagaccggagattccaacgacccggaacagatcttccaaaatattcaatttcaaaaggacctgatggccaacataaggtgtagaccctggactatgggacaaaaacttcgagccctgcgacaagctaaaaatatcgtgctcaagtttgaaggacgactgactcgaacaaggggttatcaggccgcaggagctgagttgtggagaaaattcgcacggctggcctgcaatttcgtcgtgattttcattccatgggaaatgcgcatcaaaaaaattgaatctcacttcggatctggcgtggcaagttactttatctttttaaggtggttattcggcatcaacattgtactcactattatgaccggggcctttatcgtaatcccggagctgattgctgggcagcccttcggaagtaccgctcgtaaaacaattcctaaggagcaagtctcctcggcgcaggacctggacactgtgtggagcctaggcggctacctacagtactcggtgctgttctacggatactacgggagagagcgcaaaataggccgggccggataccgtttgcccctcgcctatttcttggtgggcatggctgtatttgcatattcattcatcatcctgctgaaaaagatggcaaagaactctcgcactagtttggcctccgcttccaatgaaaattacaccttttgctggcgggtgttttgcgcttgggattaccttataggcaatcctgaagccgccgaaagtaaaaccgccgctatcgtaaactctatcagggaggcaattctggaagagcaggagaaaaaaaaatcaaagaacctcgcggtaaccatctgtctgaggattatcgccaacatcctggtgctgttgtctctcgctggaagtatctatctgatctactttgtcgttgatagaagccagaaacttgagcagagcaaaaaggaactgaccctgtgggagaagaacgaggtgtccgtggtggtcagcctggttacaatgattgctccatcggcgttcgacctgatcgcggctctggagatgtatcacccacgaacaactttgaggtttcagctcgctagggttctcgtcctgtacttggggaatctttactccctcattatcgccctgcttgataaagtgaattccatgagtattgaagagatggctaccaagaacaacacgtcccattggatcgactcaaccactttctttgcaactcgtactgcacctgaggaagaaaaatggagtacctcaagacccggaatgggcttgcgcagaaacaacacttgggcgttggaagagacaagtattagcgcttacaccatgcccttgataaaagccaataaaacatccttacacacccagagtccccaggatcagtgttgggaaacatatgtcggccaagaaatgcttaaactgagcatcatagacatgctcttcacggtcgccagcatcttgttgatcgactttttccggggattgttcgtgaggtatctgtccgattactggtgctgggacctcgagtccaagttcccagaatacggtgagtttaagattgcggagaacgtgctgcatctggtttacaatcaaggtatgatctggatgggcgctttttttagcccctgcctccccgctttcaacgtactgaagctcattgggttgatgtatctcaggtcctgggccgtcctgacatgcaatgtgcctcaccagcaggtgtttcgcgcctctcgctcaaataacttttatttggccatgctgctctttatgctgttcttatgcatgcttcccacaatcttcgccatagtgaggtataagcctagtctgaactgcggccccttctctgggcaggagaagatctatgacatcgtgtctgaaaccatagaaaaggactttcccgtgtggtttggaagtgtggtcggccacatttcatcccctgtggttatcctgccagctgtgctcctactattcatgctgatttattacctacaatccatagccaggtcactcaagctgagcaatcaccaactaaagatgcagatacagaacgctcgcagcgaggataaaaaaaaggtagctcaaatggtggaggctcggattcaaacacaggaggaaagtaccaagaaactccccaatgatagcgacctgacctctcagctatcttccgcacactctggcacgccgcagaataatgggaacgttgctcatttcgatagtggctctagcaagtcaggacgtattgagactgtggcccagagcatgcctcagtccccgaggccaggtgacagagccccatcgtctccactgccaggggtccccaaaagccgcttggagcacgagactaaccggtatctacacggcctttgtgcatctactagtgatcttcaccggaaccggtctagaacgcctatgacgtttacaactcacatagaagatgtgcacagcgagccgctgttcagaaaagattttcagcaaatcaatcccccacataggggaccacaggcctctactctactcgcccaggggcctagacctcacgcccctaggtactatgtgatcaacgagtgtgattcttataaaaagaaacacttaaatgtttggcctgagcgccactttaaaattgatgcaagtggagacattgtggagctgtaccctcgcaacgtgcggcagtatgccagtcgtgtaccccggcagcctccgtccccccagctgtctgaagaggaggaagaaacgccaagccgggattggattaaaagaagtctgccccccaggagcctgatcgatttaagacgtgccccccatttttacattggggagcgcagtgagtcacagacaagagacccagagcatcagggtcgtgtgcactacaagtcatggaacgaggacttcgagggtcacttggagcggccagcgtacgtccctaggaagcctagaagcagaaattttcagtatcctcagcctcctcttaaaccgcgcggaaagcctagatttgagcccagtctgacagaaagcgactccgtctcagccgcttcttcctccgaccaacaaaacagtagtgctgatcaatacctccaggtaacccatagccagggtcggttcccaaggtctgtggggcaacccagccgaagaaaggccaaatcaggtcaggagttgacagtggatctggacgacctgatctgctctgatgtctag

SEQ ID NO: 36907 - DNA, 3306 bp, Artificial Sequence
  derived and/or modified sequence
atgaagaccagcaaagcaagccagcggtataggggtatcagacgcaacgcctctcagtgctacttgtaccaggagtcccttctgctctctaacctcgatgatagttttagtgctgatgagacgggcgactcaaacgatcccgaacaaatttttcagaacatacagtttcagaaagatctgatggccaatattcgctgtcgtccatggactatggggcagaaactgcgggcactgagacaggccaaaaatatcgtgcttaagtttgagggacgcctaactcggacaagaggataccaggccgctggagccgagctttggagaaagttcgctcgtttggcttgcaatttcgtcgtgatatttataccctgggagatgcgcatcaaaaagatagagagccactttgggtcaggtgtggcctcatattttatctttctcagatggctcttcggcatcaacattgtgctgactataatgacaggcgcctttatagttattcctgagctgatcgccggccagccgttcggcagcaccgcccgtaagactattcctaaggaacaagtgagctctgctcaggacctggacacggtgtggtcattagggggctacttgcaatatagtgtattgttctatgggtattacgggcgcgagcgtaagataggcagggccggatatcgcctgccactcgcttactttctggttggcatggcggtgttcgcctactcttttattattctgctcaaaaagatggccaaaaattctcgaaccagccttgcctccgcaagcaacgagaactataccttctgttggagggtgttctgcgcatgggactacctcatagggaatccagaggctgccgagagcaagaccgccgcaatcgtgaacagtatcagggaggccatcctggaggagcaagagaagaaaaaatctaaaaatctggctgtgactatctgtttgagaattatcgcaaatattctggtgttgctctccttggctgggagtatctatctaatttacttcgttgtcgatagatcacagaaactcgagcagagcaaaaaagaacttacactatgggagaaaaacgagcaggtgtcggtcgtggtgtcccttgtgactatgattgccccatctgcctttgacctgattgcagccctagagatgtaccatccaaggactacactccgcttccaactcgcacgggttctcgtcctctacctgggcaacctctattccctcattatagcgctgttagataaggtgaattccatgtctatcgaagagatggccactaagaacaatacctcccactggatcgatagcactaccttctttgcgacaagaactgcccctgaagaggagaaatggtccacctctcgacccggcatgggtcttcgtcgaaataatacttgggctctagaagaaacttccatttctgcgtacactatgccactgataaaagccaataaaacgagtctgcacacccagtccccccaggatcaatgttgggaaacttacgtgggtcaagaaatgctgaagctctcaataatcgatatgctgtttactgttgcatcaattctgttaattgatttcttcaggggactgtttgtccggtacctcagcgactattggtgttgggacctggaatcaaaattcccagaatacggagaattcaagatcgcagaaaacgtgctgcatctcgtatataaccagggcatgatctggatgggagctttctttagcccctgtctgcctgctttcaatgtgttaaagctgatcgggctcatgtacctgcggtcttgggccgtgttaacctgtaatgtgccacaccagcaagtgttccgcgcatccagaagcaataatttctacctggccatgctgctgttcatgctcttcctatgtatgctgcctacgatcttcgcaatcgtccggtacaagcccagcctgaactgcggaccattctccggtcaggaaaagatctatgacatagtgagcgagacaatcgagaaggattttcctgtgtggttcggatcagttgttggccacatatcttcacccgtggtgatactgccagctgtcctactgttgttcatgctcatctattacctccaaagcatcgcgaggagtctcaagcttagcaatcaccaattgaagatgcagattcagaacgctagaagcgaggacaaaaagaaagtcgcacaaatggtggaggcgagaatccagacacaagaagagtcgactaagaagctccccaacgattcggacctgacctcacagctatcaagcgctcatagcgggacgccccagaataacggcaacgtggctcacttcgactcaggctcctcaaagtcaggaagaattgagacagtggcccagtccatgccgcaaagtccacgccctggcgatcgggctcccagcagccctctccctggcgtgccgaaatctcggctggagcacgagaccaacaggtacctacacggtctctgtgctagcacttctgacctgcatcgcaataggtcaagaactccaatgacgttcactacccacatcgaggacgtccattctgagcccctattccgtaaagacttccagcaaattaacccacctcatcgaggacctcaggcgagtactctcttggctcagggcccccggcctcacgccccccggtactatgtaattaatgagtgcgactcatacaaaaagaagcacctgaacgtttggcctgagcggcattttaaaattgacgcttcaggggacatcgtagaattataccctagaaatgttagacaatacgcctcgagagtgccccgccagccacctagtccacagctgtctgaggaggaggaagaaaccccatctcgggattggataaagcggtccctcccgccacggtcactgattgatcttcgacgggcccctcatttttatattggagagcggtctgaaagtcaaacccgtgaccccgaacatcagggccgcgtgcactacaaatcttggaacgaagatttcgaggggcacctggagcgccccgcctatgttccgcggaaaccccggtcgcgaaatttccagtacccgcaacctccactgaaacccagaggcaagccccgatttgagccatcgttgaccgaaagtgactccgtctcagctgcatcatctagtgatcaacagaattccagcgctgaccagtacctccaggtaacccattcccaagggcggtttcccagatccgtaggacagccctcaagaagaaaggctaagagtgggcaggaacttaccgtcgacctggatgacctaatctgttcagatgtctag

SEQ ID NO: 36908 - DNA, 3303 bp, Artificial Sequence
  derived and/or modified sequence
atgaagaccagcaaggccagccagcgctaccggggcatcagaagaaatgccagccagtgctacctgtaccaggagagcctgctgctgagcaacctggatgacagcttcagcgcagatgaaacaggagacagcaatgaccctgagcagatcttccagaacatccagttccagaaggacctgatggccaacatccgctgccggccctggaccatgggccagaagctgcgggccctgcggcaggccaagaacatcgtgctgaagtttgagggccgcctgaccaggacccggggctaccaggccgccggggctgagctgtggaggaagtttgcccggctggcctgcaactttgtggtgatcttcatcccctgggagatgaggatcaagaagattgagagccacttcggcagcggcgtggccagctacttcatcttcctgcgctggctgtttggcatcaacatcgtgctgaccatcatgactggagccttcatcgtcatccctgagctgattgctggccagcccttcggcagcacagccaggaagaccatccccaaggagcaggtgtcctctgcccaggacctggacacagtgtggagcctgggcggctacctgcagtacagcgtgctcttctacggctactacggccgggagaggaagattggccgggccggctaccgcctgcccctggcctacttcctggtgggcatggctgtgtttgcctacagcttcatcatcctgctgaagaagatggccaagaacagcaggaccagcctggccagcgccagcaatgaaaactacaccttctgctggagggtcttctgtgcctgggactacctgattggcaaccctgaggccgctgagagcaagacagctgccatcgtgaacagcatccgggaggccatcctggaggagcaggagaagaagaagagcaagaacctggccgtgaccatctgcctgcgcatcatcgccaacatcctggtgctgctgagcctggccggcagcatctacctgatctactttgtggtggacaggagccagaagctggagcagagcaagaaggagctgaccctgtgggagaagaatgaggtgtctgtggtggtgtccctggtgaccatgattgcccccagcgcctttgacctgattgctgccctggagatgtaccaccccaggaccaccctgcgcttccagctggcccgggtgctggtgctgtacctgggcaacctgtacagcctcatcatcgccctgctggacaaggtgaacagcatgagcattgaggagatggccaccaagaacaacaccagccactggattgacagcaccaccttctttgccaccaggacagcccctgaggaggagaagtggagcaccagccggcccggcatgggcctgcggaggaacaacacctgggccctggaggagaccagcatcagcgcctacaccatgcccctcatcaaggccaacaagaccagcctgcacacccagagcccccaggaccagtgctgggagacctacgtgggccaggagatgctgaagctgagcatcatcgacatgctgttcaccgtggccagcatcctgctgattgacttcttccggggcctgtttgtgcgctacctgagtgactactggtgctgggacctggagagcaagtttcctgaatatggagagttcaagattgctgaaaatgtgctgcacctggtgtacaaccagggcatgatctggatgggcgccttcttcagcccctgcctgcctgccttcaacgtgctgaagctgattggcctgatgtacctgcgctcctgggccgtgctgacctgcaatgtgccccaccagcaggtgttccgggccagccgcagcaacaacttctacctggccatgctgctcttcatgctgttcctgtgcatgctgcccaccatctttgccatcgtgcgctacaagcccagcctgaactgtggccccttcagcggccaggagaagatctatgacatcgtgtctgagaccatcgagaaggacttccctgtgtggtttggatctgtggtgggccacatcagcagccctgtggtgatcctgcctgctgtgctgctgctcttcatgctgatctactacctgcagagcatcgcccggagcctgaagctgagcaaccaccagctgaagatgcagatccagaatgcccggtctgaggacaagaagaaggtggcccagatggtggaggcccgcatccagacccaggaggagagcaccaagaagctgcccaatgacagcgacctgaccagccagctgagcagcgcccacagcggcaccccccagaacaatggaaatgtggcccactttgacagcggcagcagcaagagcggccgcatcgagaccgtggcccagagcatgccccagagccccaggcctggggaccgggcccccagcagccccctgcccggggtgcccaagagccggctggagcacgagaccaaccgctacctgcacggcctgtgtgccagcaccagtgacctgcacaggaacagaagcaggacccccatgaccttcaccacccacattgaagatgtgcacagcgagcccctcttcaggaaggacttccagcagatcaaccccccccaccggggcccccaggccagcaccctgctggcccagggcccccggccccacgccccccgctactacgtgatcaatgaatgtgacagctacaagaagaagcacctgaatgtgtggccagagcggcacttcaagattgatgccagcggggacatcgtggagctgtaccccagaaatgtgcggcagtatgccagccgggtgccccggcagccccccagcccccagctgtctgaggaggaggaggagacccccagccgggactggatcaagaggagcctgcccccaagaagcctgattgacctgcggcgggccccccacttctacatcggggagaggtctgagagccagacccgggaccctgagcaccagggccgggtgcactacaagtcctggaatgaagattttgagggccacctggagaggcctgcctacgtgcccaggaagcccaggagcaggaacttccagtacccccagccccccctgaagccccggggcaagcccaggtttgagcccagcctgacagaaagtgacagcgtgtctgctgccagcagcagtgaccagcagaacagcagcgctgaccagtacctgcaggtgacccacagccagggccgcttccccaggtctgtgggccagcccagcaggaggaaggccaagagcggccaggagctgactgtggacctggatgacctgatctgcagtgatgtgtag

SEQ ID NO: 36909 - DNA, 3306 bp, Artificial Sequence
  derived and/or modified sequence
atgaagaccagcaaggccagccagcgctaccggggcatcagaagaaatgccagccagtgctacctgtaccaggagagcctgctgctgagcaacctggatgacagcttcagcgcagatgaaacaggagacagcaatgaccctgagcagatcttccagaacatccagttccagaaggacctgatggccaacatccgctgccggccctggaccatgggccagaagctgcgggccctgcggcaggccaagaacatcgtgctgaagtttgagggccgcctgaccaggacccggggctaccaggccgccggggctgagctgtggaggaagtttgcccggctggcctgcaactttgtggtgatcttcatcccctgggagatgaggatcaagaagattgagagccacttcggcagcggcgtggccagctacttcatcttcctgcgctggctgtttggcatcaacatcgtgctgaccatcatgactggagccttcatcgtcatccctgagctgattgctggccagcccttcggcagcacagccaggaagaccatccccaaggagcaggtgtcctctgcccaggacctggacacagtgtggagcctgggcggctacctgcagtacagcgtgctcttctacggctactacggccgggagaggaagattggccgggccggctaccgcctgcccctggcctacttcctggtgggcatggctgtgtttgcctacagcttcatcatcctgctgaagaagatggccaagaacagcaggaccagcctggccagcgccagcaatgaaaactacaccttctgctggagggtcttctgtgcctgggactacctgattggcaaccctgaggccgctgagagcaagacagctgccatcgtgaacagcatccgggaggccatcctggaggagcaggagaagaagaagagcaagaacctggccgtgaccatctgcctgcgcatcatcgccaacatcctggtgctgctgagcctggccggcagcatctacctgatctactttgtggtggacaggagccagaagctggagcagagcaagaaggagctgaccctgtgggagaagaatgagcaggtgtctgtggtggtgtccctggtgaccatgattgcccccagcgcctttgacctgattgctgccctggagatgtaccaccccaggaccaccctgcgcttccagctggcccgggtgctggtgctgtacctgggcaacctgtacagcctcatcatcgccctgctggacaaggtgaacagcatgagcattgaggagatggccaccaagaacaacaccagccactggattgacagcaccaccttctttgccaccaggacagcccctgaggaggagaagtggagcaccagcaggcctggcatgggcctgcggaggaacaacacctgggccctggaggagaccagcatcagcgcctacaccatgcccctcatcaaggccaacaagaccagcctgcacacccagagcccccaggaccagtgctgggagacctacgtgggccaggagatgctgaagctgagcatcatcgacatgctgttcaccgtggccagcatcctgctgattgacttcttccggggcctgtttgtgcgctacctgagtgactactggtgctgggacctggagagcaagtttcctgaatatggagagttcaagattgctgaaaatgtgctgcacctggtgtacaaccagggcatgatctggatgggcgccttcttcagcccctgcctgcctgccttcaacgtgctgaagctgattggcctgatgtacctgcgctcctgggccgtgctgacctgcaatgtgccccaccagcaggtgttccgggccagccgcagcaacaacttctacctggccatgctgctcttcatgctgttcctgtgcatgctgcccaccatctttgccatcgtgcgctacaagcccagcctgaactgtggccccttcagcggccaggagaagatctatgacatcgtgtctgagaccatcgagaaggacttccctgtgtggtttggatctgtggtgggccacatcagcagccctgtggtgatcctgcctgctgtgctgctgctcttcatgctgatctactacctgcagagcatcgcccggagcctgaagctgagcaaccaccagctgaagatgcagatccagaatgcccggtctgaggacaagaagaaggtggcccagatggtggaggcccgcatccagacccaggaggagagcaccaagaagctgcccaatgacagcgacctgaccagccagctgagcagcgcccacagcggcaccccccagaacaatggaaatgtggcccactttgattctggcagcagcaagagcggcagaattgaaacagtggcccagagcatgccccagagccccaggcctggggaccgggcccccagcagccccctgcccggggtgcccaagagccggctggagcacgagaccaaccgctacctgcacggcctgtgtgccagcaccagtgacctgcacaggaacagaagcaggacccccatgaccttcaccacccacattgaagatgtgcacagcgagcccctcttcaggaaggacttccagcagatcaaccccccccaccggggcccccaggccagcaccctgctggcccagggcccccggccccacgccccccgctactacgtgatcaatgaatgtgacagctacaagaagaagcacctgaatgtgtggccagagcggcacttcaagattgatgccagcggggacatcgtggagctgtaccccagaaatgtgcggcagtatgccagccgggtgccccggcagccccccagcccccagctgtctgaggaggaggaggagacccccagccgggactggatcaagaggagcctgccccccaggagcctgattgacctgcggcgggccccccacttctacatcggggagaggtctgagagccagacccgggaccctgagcaccagggccgggtgcactacaagtcctggaatgaagattttgagggccacctggagaggcctgcctacgtgcccaggaagcccaggagcaggaacttccagtacccccagccccccctgaagccccggggcaagcccaggtttgagcccagcctgacagaaagtgacagcgtgtctgctgccagcagcagtgaccagcagaacagcagcgctgaccagtacctgcaggtgacccacagccagggccgcttccccaggtctgtgggccagcccagcaggaggaaggccaagagcggccaggagctgactgtggacctggatgacctgatctgcagtgatgtgtag

SEQ ID NO: 36910 - DNA, 3303 bp, Artificial Sequence
  derived and/or modified sequence
atgaagaccagcaaggccagccagcggtaccggggcatccggcggaacgcctcccagtgctacctatatcaggagtcgctgcttctgtctaatttggacgactcatttagcgcagacgaaacaggcgatagtaatgaccctgagcagattttccagaatatacagttccagaaggacctcatggctaatattaggtgccgcccgtggaccatgggccaaaagctgcgggctctccgccaagcaaaaaacatcgtgctgaagttcgaagggcggctaacgaggacacggggctaccaggcggcaggagccgaactgtggcggaagttcgctcgtttagcttgcaactttgtagtgatttttataccatgggagatgaggataaaaaagatagagtcacatttcggctctggagtggcctcatatttcatcttcctccgatggttgttcgggatcaatattgttttgacaattatgacaggtgcctttatcgtcatccccgagctgatcgccgggcaacccttcgggtcaacagcgcggaagaccatccctaaagagcaggtctccagtgctcaggatctagacacggtttggtccctcggcgggtatctacaatactcagtcctcttttatgggtattacgggcgtgagcggaagataggaagagctgggtaccgtctcccattggcttacttcctggtcggcatggcagtgtttgcttactcatttattattctgctaaaaaagatggccaagaactcaagaacatctctggcttctgccagcaacgaaaactacaccttctgttggcgggtgttttgtgcctgggactatctcattggtaaccctgaggcggccgagtccaaaacagccgccatcgttaactccatccgggaagccatccttgaggaacaagaaaaaaaaaaatctaaaaacttggccgtcactatctgcctcagaattattgccaatatcctcgtgctgctttccctggccgggtccatttatctcatctattttgtcgtggataggagtcagaagctggagcagtccaagaaggaactcaccctgtgggagaaaaacgaggttagcgtcgtcgtgtcattagtaacaatgatcgccccctctgccttcgaccttatagccgcgttagagatgtatcacccacgtacaacactgagattccagttggcccgggtgttggtattatatctagggaacttatacagtctgatcattgccctcctcgacaaggtgaattcaatgagtatcgaagagatggcaacgaagaataatactagtcactggatcgactccacaactttctttgctactaggaccgcgcccgaagaagagaagtggtctacatcccggcccgggatggggcttagaaggaacaacacctgggccctagaggagacgtctatttctgcgtacaccatgccattgatcaaggcaaataaaacctcattgcatacacagtccccccaagatcaatgctgggagacctatgtggggcaagagatgctgaaattgagcataattgacatgttgttcaccgtagcatctattctgctgatcgatttctttcgagggctatttgtgaggtatctttcagattactggtgctgggacttggaatctaagttccccgagtacggcgaattcaagatagcagagaatgtcctgcatctggtgtacaaccagggcatgatttggatgggagccttctttagcccatgcctccccgctttcaatgtgctgaagctgattgggctgatgtacttgcggtcatgggctgttctgacttgtaatgtgccccatcaacaggtcttccgagcttccagaagcaacaacttctacctagctatgctcctcttcatgctgtttctgtgcatgcttcccactatttttgccatcgtgcggtacaagcccagcttgaactgcgggccattcagcggccaggaaaagatttatgacatcgtgtctgagaccattgagaaggacttccctgtgtggttcgggagtgtcgttggtcacatcagctctccagtggtgatactgccagccgtgctcttacttttcatgctgatatattacttacaaagcatcgccaggtcactcaaattgtctaaccatcaacttaagatgcagatccagaacgctcgatccgaggataagaagaaggttgctcagatggtggaagccagaatccaaacacaggaggagagcacgaagaagttaccaaatgatagcgatttgaccagtcagttgagctccgcacacagcggcacccctcagaacaatggcaatgtggctcatttcgattctggttccagtaagtctggacgcatagagaccgtcgcccagtctatgccacagtccccaaggccaggagatcgggctccttcatccccattgcctggcgttcccaagtccagactggaacatgagaccaatcggtacctccatggcttatgcgcatcaaccagcgacctccatcgcaatagatctcgaacgccaatgacttttactacacacatcgaggatgttcatagtgaacccctttttcgcaaggacttccaacagatcaatcctcctcataggggtccccaggcgtcgaccttgctggctcaaggtcctcgcccacacgctccacgctactatgtaattaatgagtgcgactcttacaagaaaaagcaccttaacgtgtggcctgaaaggcactttaaaattgatgccagcggagacatcgtagaactgtatccaagaaacgtgcgacaatatgcctcccgggtgcctcgccagcccccctcaccccagctatctgaggaagaagaagagacgccctccagggattggattaaacgatctcttccccctagatccctgattgaccttcgtcgtgccccgcacttttatattggggaaaggagcgagagccaaacccgggatcctgaacatcaggggcgcgtccattataagtcctggaatgaagactttgagggccacctcgagagaccagcctacgtgcctagaaaacctcggtcacggaattttcagtatccacagcctccactgaaacctcggggtaagcctagattcgagccttccctgacagaatccgactcagtgtctgctgccagttcctccgaccagcagaacagttctgctgaccagtacttgcaggttactcattctcaggggcggttcccacggagtgtggggcagccaagccgaaggaaggccaaatccgggcaggaacttacggtagatctcgacgatctgatctgtagcgatgtgtag

SEQ ID NO: 36911 - DNA, 3306 bp, Artificial Sequence
  derived and/or modified sequence
atgaagaccagcaaggccagccagcggtaccggggcatccggcggaacgcatcacagtgctatctttatcaggagtcccttttactgtccaaccttgacgactcattctccgccgacgaaactggcgatagtaatgaccccgaacagattttccagaatatccagttccaaaaagatctgatggccaatatccgttgtcgtccttggacaatgggtcagaaactgcgcgcactgaggcaggctaagaatattgtattaaaattcgagggtaggctgactaggacacgtggttatcaagccgctggggctgagctgtggagaaagtttgcacgtctcgcctgcaactttgtcgtaatcttcataccttgggagatgcggattaaaaagatcgaatctcactttgggagcggggtagcctcatactttatttttcttcgctggctgtttgggatcaatattgttctgacaattatgacgggcgcttttatcgtgatcccggaactgattgcaggccagcctttcggcagtaccgcccgcaagaccatacctaaagagcaagtgagctccgcgcaggatctggacaccgtgtggagccttggggggtacctgcagtattctgtcctgttctacggatattatggacgggaacggaaaattggtagggctggttatagactacctttggcttacttcttggtgggaatggccgtcttcgcttattccttcatcattctactgaaaaagatggctaaaaattcgcgcacatcattagcttctgcctcaaacgaaaactatacattttgttggcgcgtattttgtgcttgggactacctgatcgggaatccagaggccgccgagagcaagacagccgcaatcgtcaactccatacgggaggcaatcttggaagagcaggagaaaaagaagtctaagaatttggccgtgactatctgcctgcgtatcatcgccaacatattagtgttgttgtcccttgcgggttctatctatctgatttattttgtcgtggataggagccagaagctcgagcaaagcaaaaaggagctgacgctgtgggaaaagaacgaacaggtgtctgtcgtggtcagcctcgtgacaatgattgcaccgtctgcctttgatctgatcgcagccctggagatgtaccacccccggaccaccctgagattccaactcgcgcgggttctggtcctgtaccttggcaatctgtattctctgattatcgctctgctggacaaggtcaactcgatgtcaatcgaggagatggctacaaaaaataatacctcccactggatcgattcaaccacattctttgctacaaggaccgctccagaagaagagaaatggagtacatctcgtccaggtatgggcctgaggcgaaacaatacttgggccctggaagagacttccatctccgcgtatactatgccactgataaaagccaacaaaacgagcttgcatacacagagccctcaggaccagtgttgggaaacctacgtgggtcaggaaatgttaaagctctccattatcgacatgttgtttactgtcgctagtatcctgttgatagattttttccgagggttatttgtgaggtatctgtctgattattggtgctgggatctggaaagcaagtttccggaatacggcgagtttaaaattgccgagaatgttctgcacctggtctacaaccaaggcatgatttggatgggcgcattcttcagcccttgcctacctgctttcaacgttttaaagctgattgggcttatgtacctgcgcagctgggctgttctcacctgcaacgtgccacatcagcaggtttttagggcatcaaggagcaacaacttttatcttgctatgctgcttttcatgttgttcctatgcatgctgcccactatcttcgccatcgtgcgctacaagcccagcctgaactgcgggcccttcagcgggcaggaaaagatttatgacatcgtatccgaaacaattgagaaggacttccccgtttggttcggatcagtagtagggcatatcagttccccggtagtgatattgccagcagtgctgttgcttttcatgctgatctactatctccagagcattgccagaagcttaaagttatcaaatcaccagttaaaaatgcaaatacagaatgcccgttctgaggacaagaaaaaagtcgctcaaatggttgaggcgcgaatacagacacaagaggagtctaccaaaaagctgccaaatgactctgacctgacatcccaactgtcaagcgcccattctggtacaccacagaacaatggcaacgtcgcccatttcgactccgggtccagcaaaagcgggagaattgagactgttgcccagtcaatgccgcagagtccccgccctggcgaccgtgctcctagtagcccactgccaggcgttcctaaaagtcgattagaacatgagaccaacaggtatctacacggactgtgtgcgagtacaagcgatcttcaccggaaccggtccaggactcctatgacatttacaacccatatcgaagatgtccacagcgagcccctttttcggaaagacttccaacaaatcaatcccccgcaccggggcccgcaggcctcaactttgctcgcccaagggcccaggccccacgctcccaggtattacgtaattaacgagtgcgattcatataaaaaaaaacacttaaatgtttggcccgaacggcatttcaaaattgacgcttccggggacattgtcgagctctacccaagaaatgtgagacagtacgcgtccagggtcccccgacagcctccttccccccaattatcggaggaggaggaggagacaccgtctcgagactggataaagcgctccctgccgcctagatcactgatcgacctgcgtagggcaccccacttctacataggggaacgatctgagtcccagacccgtgaccctgagcaccagggcagggtccactacaagtcctggaacgaagacttcgagggacacctcgagcggccagcttacgtaccaaggaagccccggagtaggaatttccagtacccacagcccccgctcaagcccagaggaaaacccaggtttgaaccatccttaactgaatccgactcagtctcagccgcgtccagctccgaccagcagaatagtagcgctgaccagtatctgcaggtgacacactcgcagggccgttttccgcgcagtgtaggtcaaccttctagaagaaaggcgaagtcaggacaggagctgaccgtcgatctggacgatcttatatgttccgatgtgtag

SEQ ID NO: 36912 - DNA, 3303 bp, Artificial Sequence
  derived and/or modified sequence
atgaaaaccagcaaggctagtcagagataccgaggaattagacggaacgcctcacagtgctatttgtatcaagagtctctgcttctgtccaacctggacgactccttctctgcggacgaaaccggagactctaacgatccggaacaaatcttccagaatattcaattccaaaaggatttgatggcaaatattcggtgtcgcccttggaccatgggccaaaagctgagggcgctgagacaggccaagaacatcgttctgaagtttgaagggagactgacaaggactcggggatatcaagcggcaggagcagagctttggcggaagttcgctaggctcgcctgtaatttcgtggtgattttcattccatgggagatgcgaattaagaagatcgagtctcatttcggctccggagtggcttcttacttcatctttcttaggtggctatttgggatcaatatagtcctgactatcatgacaggcgcttttatagttattcccgaattgatagccggtcagccttttggctctactgccagaaagaccatccctaaagagcaggtgtccagcgcccaagatttggacaccgtatggagtttaggcggatacctgcagtacagtgtgctattctacggttactacggacgcgaaagaaagattgggagagcaggttatagactccccctggcatactttctagtgggcatggctgtctttgcttattctttcattatccttcttaagaaaatggcaaagaattcgagaacttctctcgcatcagcctccaacgagaactacacattctgctggagagtcttctgtgcctgggattatcttatcggcaaccctgaggcggctgagtctaagactgctgcgattgtgaatagtattagagaggcgattctggaagagcaagagaaaaagaagtctaaaaatctggctgtcacaatatgcctgcgcattattgcaaacattctggtgcttctgagtcttgctggctccatctacctgatctacttcgtcgtggataggagccagaaactggaacagagtaaaaaggagttgacactgtgggagaaaaacgaggtgtccgttgtggtgagtctcgtaaccatgatcgccccatccgcattcgaccttattgctgccttggaaatgtatcaccccaggacaactctccgatttcagcttgccagagttctggtgctttaccttggcaacctatacagcctgattatcgctcttctggacaaggtcaacagcatgagcattgaggaaatggccaccaagaacaacacctcacactggatcgattcgactacattttttgcaaccaggacagcccctgaggaggagaagtggagcacatccagacctggcatgggcctgcgcaggaacaacacttgggcccttgaagagacctccatctccgcatatacaatgcccctcatcaaggcaaacaagacctctctccatacacaaagtccccaggatcagtgctgggaaacatacgttggacaggaaatgctgaagctgtccatcatagatatgctgtttacggtggccagcatcctgcttattgattttttcagagggctatttgtccggtatctctcggattactggtgctgggatcttgaatcaaaattccctgagtatggcgagttcaagatagccgagaacgtgctgcaccttgtgtataatcaggggatgatttggatgggggcatttttcagcccctgtcttcctgcctttaatgtactgaagctaatcggtttgatgtaccttcggtcttgggccgttctcacttgcaacgttccccaccagcaggtcttccgcgcatcacgcagtaataatttctaccttgccatgctgctgtttatgttattcctctgtatgttgcccactatattcgccattgtaagatacaagccttcattgaactgtgggcctttttccggccaggagaagatttacgatatcgtgagcgaaaccatcgaaaaagacttccctgtctggttcggctctgttgttggccacatttcctcacccgtggtcattctccctgccgtcttgttgctgttcatgcttatatattatctgcaatccatcgccagatcccttaagctctcaaatcaccagctaaagatgcagatacagaatgcccgttccgaggataaaaaaaaggttgctcagatggtggaggcacggatccagacgcaagaagaaagcaccaaaaaactgccaaatgacagcgatctcacgagtcagctgagcagtgcacattcaggaacaccacagaataacggtaatgtcgctcacttcgattcaggctcctccaaaagcgggaggatcgagacagtggctcagtccatgccacagagcccacgacctggcgaccgggcacccagctctccactccctggagttccgaagagcagactggagcacgagaccaacaggtatcttcacggactgtgcgcgagcacctcagacttacatcgcaatagatcccgtacccccatgactttcacgacccacattgaagatgtacatagcgaaccgctgttccggaaagactttcagcagatcaatcctccgcatcgcggtccgcaggcaagtaccctgttagcacaggggccacggccacatgcaccacgctattacgtaattaatgaatgtgacagttataagaaaaaacatctgaacgtgtggccggagagacactttaagatagatgcaagcggagacatagtggagctctatccacggaatgtgaggcagtatgcttcaagagtacccagacagcctcccagtccccaattgtctgaagaggaggaagaaactccaagccgagactggatcaagaggtctctcccccctaggagcctgattgatctgaggcgggctccacatttttacattggtgaacggagcgaaagccagactagagatccagagcaccagggcagagtccactacaagtcttggaacgaagattttgaaggccacctggaaaggcccgcttatgtgcctcgcaaaccacggagcaggaactttcaataccctcaaccaccgctcaagccacggggaaaacctagatttgagccatcccttaccgaaagtgacagtgtgagcgctgccagttcaagtgaccagcagaacagctcagccgaccagtatttgcaggtcactcattcacagggacggttcccacggtctgtgggacagccctcccgcagaaaggccaagtccggacaggaactgacagtcgacctagacgacctgatctgcagtgacgtttag

SEQ ID NO: 36913 - DNA, 3306 bp, Artificial Sequence
  derived and/or modified sequence
atgaaaacgtcaaaggctagccagcgctatcgcggaatccggaggaatgcatcccagtgctatttgtaccaggagagcttgcttctgtctaacctcgacgattcatttagtgcagatgagaccggcgactcgaatgatcctgagcaaatcttccagaacattcagtttcaaaaggaccttatggccaacataagatgtcggccttggactatggggcagaaactccgtgccttacggcaggcaaaaaatattgtgctaaagttcgaaggccgtctaacacggacccgcggataccaggcagcaggggctgaattgtggaggaaattcgcacgcttagcctgcaactttgttgtaatattcatcccatgggagatgcggattaaaaagattgagagccattttggatctggggtggcctcgtacttcattttcctaaggtggctatttgggatcaatatagtcctgactatcatgactggggcttttatagtgattcccgagctgatcgctggacagccgttcgggagtacagcacgcaaaactatacccaaggagcaggtttcaagtgcacaagatctggacacggtgtggagcctgggcggatacctccagtatagcgtgctgttctatgggtactatggtagagagagaaagattgggagggcaggatatcgcctgcctctggcatactttcttgtcggtatggccgtgttcgcttactcctttatcatcctgctgaagaaaatggctaagaattcaaggaccagcctcgcttcagcctctaacgagaactacacattctgttggcgcgtcttttgcgcctgggattaccttattgggaatccggaggctgccgaaagcaaaacggcagccatcgtgaatagtattagagaagctatcctggaggagcaggagaagaagaaatcaaagaacttagcggttaccatctgcctgcggatcattgctaacatcttagtacttctgtctttagctggcagtatctatctgatttactttgtggtcgataggtcacagaaactggagcagtcgaagaaggaactcaccctatgggaaaaaaacgaacaagtgtctgtcgtggtttctttggtgactatgattgctccgtccgcatttgatctcattgctgcgttggagatgtaccaccctaggacaacattgaggtttcaactcgcgagagttcttgtgttatacctggggaatttgtattcgctgatcatagccctccttgacaaggtgaacagtatgtccatcgaagagatggctaccaaaaataataccagtcattggattgacagtacaaccttctttgccacaagaacagcaccggaagaagagaagtggtcaacctcccgccctgggatgggtttacggaggaataacacatgggcgctggaggaaaccagtatctctgcgtacaccatgcctctcatcaaggcaaataagacatctttacacacccagtcaccgcaggaccagtgttgggaaacatacgttggacaggaaatgctcaagctcagcatcattgatatgctttttaccgtggcatccatattgcttattgattttttccgaggactctttgtgcgttacctgagtgactactggtgttgggatctggagtcaaagtttcctgagtatggcgaatttaagattgctgagaatgtcctgcatctggtctataatcaaggaatgatatggatgggggcttttttctccccttgccttccggctttcaacgtgcttaaactgataggccttatgtatttgagatcgtgggccgttctcacttgtaacgtgccccatcagcaggtcttcagggcaagtcgctcaaataatttctacctggccatgttgctgtttatgctgtttctttgcatgctgcctaccatctttgcgattgtgaggtacaaaccgtccctgaattgtggaccattttccggccaagaaaagatttatgacattgtgtccgagactatagaaaaggacttccctgtgtggttcgggtctgtggtcgggcacataagctctcctgtggtgattttgccagctgtgctgttgctctttatgctcatttactacctgcagtcaatcgcgaggagcctgaaactgagcaatcaccagcttaagatgcaaattcagaacgcgagatctgaagacaagaaaaaagtggcacagatggtggaggcacggattcagacccaggaagagtcaactaagaagttgcccaatgatagtgacctcactagtcagctaagctctgctcacagcggaactccccagaacaacggaaacgtcgctcactttgacagtggctcctcaaaatctggaaggattgagacagtagcccagtctatgccccagtcaccgcgacctggagaccgagcgccaagcagccctcttcccggagtcccaaaatctcgcctggaacacgaaaccaatcggtatctccacgggctgtgtgcttcgacgagtgacctccataggaataggagcagaaccccgatgacctttactacacacatagaagacgttcattcagagcccctgtttcgcaaagactttcaacaaataaaccctccacatagaggaccacaagcctcaactcttcttgcgcagggaccccgaccccatgcgccacggtactatgtcattaatgaatgcgatagctacaagaaaaagcacctgaatgtctggcctgagcgccatttcaagatcgacgccagcggcgatattgtcgagctatacccccgtaatgtgaggcagtacgcttcgagggtgcctcgtcagcctccaagcccacagttgtccgaggaggaggaggaaacaccatctagagactggatcaaacgcagcctacctcccaggagtttgatcgacctgcgtagggccccacacttctacattggtgaacgaagcgaatcccagacaagggatcccgaacatcaagggagagtccactataagtcctggaacgaggattttgaaggtcatctggagcgcccagcttacgtgccgaggaaaccgaggtctcgcaacttccagtacccacagcccccactcaagccgagaggaaaaccaaggtttgagccctcactgactgaaagcgactctgtgtctgctgcgtctagttcagaccagcagaacagctcagctgatcagtatttgcaggtgacgcattctcagggccgttttccgcgatccgtgggccagcctagtcgaaggaaggctaaatccggtcaggagctgaccgtagacctggatgacttaatctgttcagacgtgtag

SEQ ID NO: 36914 - DNA, 3551 bp, Artificial Sequence
  derived and/or modified sequence
tctctggccagcttctgattgttagcagtgggttagctcccatgaaaacctcgaaggcatcccagcgctatagaggcatccggagaaatgccagccagtgctacctctaccaggaatctctgctgctcagcaacttggatgacagctttagtgctgatgaaacaggggacagcaatgatccggaacaaatcttccagaatatacagttccagaaagatctcatggcaaacattcgctgcagaccctggactatgggacagaagctgagggcattgagacaagcgaagaacattgtgctgaagtttgaagggaggctgaccaggacccgaggctaccaagcagcaggtgcagagctctggcggaaatttgctcgtctcgcctgtaactttgtggtcatcttcattccctgggaaatgaggataaagaaaatcgagagtcattttggatctggcgttgcctcctatttcatattcttgagatggttatttggaattaatattgtgctcaccattatgacaggtgcttttattgtcattccagagctgattgcaggccagccctttggaagcacagccaggaagaccatccccaaggagcaggtttcgtctgcccaagacctggacaccgtctggtctctggggggctacctccagtactctgtcctcttctacggatattacggcagggagaggaagatcgggagagctggctaccggctgcccttggcgtatttcctagtggggatggcagtgtttgcttacagcttcatcattcttttaaaaaagatggctaagaactcccgcacgagtcttgccagtgcttccaatgaaaactataccttctgctggcgggtgttctgtgcctgggattacctcattggaaacccagaggctgcagagagcaaaacagctgccatagtgaacagcatcagggaagctatattggaagaacaggagaaaaagaaaagcaaaaacctggcagtgaccatctgcctgaggattattgccaacatcctggtgcttctctcactggctgggagcatttatctcatctactttgtggtggaccggtcccagaagctggagcagtcgaagaaggagctgacactttgggaaaagaatgaggtcagtgtggtggtctccctcgtcaccatgatagcaccatcagcctttgacctcattgctgccttagagatgtaccaccccaggaccacgctgcgcttccagcttgcaagggtccttgtgctgtatttgggaaatctctacagcctgatcattgctctcctggacaaagttaacagcatgagcattgaggaaatggctaccaaaaataacacaagtcattggatagattccaccaccttctttgcaaccaggacagcccctgaagaagagaaatggtccacatctcggcctggaatggggctcaggagaaacaacacatgggccttggaagagaccagcatttcagcttataccatgcctcttataaaggccaacaagactagcctccacactcagagtccacaagaccagtgctgggagacatacgttggtcaggagatgctgaagctctccatcattgacatgctcttcaccgtggcgagcattctgctcatagacttcttccgaggacttttcgtgcggtacttaagtgactactggtgttgggatctggagagcaagtttcctgaatatggagaattcaaaatagctgagaatgtgctacatttagtctacaaccaaggaatgatttggatgggggccttcttctccccatgtctcccagcgttcaacgttctcaaactcattgggctcatgtacctgagaagctgggctgtgctgacctgcaatgtgccccaccagcaagtatttcgagcctcaagatccaacaacttctacttggcaatgctcctgtttatgctgtttctgtgcatgctgccaaccatttttgctattgtccgatacaagccatctctaaactgtgggccattcagtggacaagagaaaatttatgacattgtgtcagaaacgattgagaaagactttcctgtgtggtttggctccgtggttggacacatcagtagccccgtggtcatcctgcccgcagtactcctgcttttcatgctcatctattatctccagagcatcgcacggtctctaaagctcagcaaccaccagctcaaaatgcagatccaaaacgcaagatcagaggataagaaaaaggttgcccagatggtagaagcccgaatccagacccaggaagaaagcaccaagaagcttccaaacgacagtgatcttaccagccagctgtcctcagcgcactcgggcacaccccaaaacaacggcaacgtggcccattttgactcagggagcagcaagagtggcaggatagagacagtcgcacagtccatgccccagagcccgaggccaggggacagggctcctagctcacctctccctggggtccccaaatccaggctagagcatgaaactaacaggtatctgcacggtctgtgtgcaagcaccagtgaccttcacaggaacagatcgcgcacacctatgacatttacaacgcacatcgaagatgtacactcagaacctcttttccgaaaagactttcagcaaatcaaccctcctcaccgtggaccacaggcctcgactttgctggcacagggtcccaggccccacgcccccagatactatgtcattaatgaatgtgactcttacaagaaaaaacatctaaatgtctggccagaaagacatttcaagatagatgcttcaggtgacattgtggagctgtaccccaggaacgtgcgacaatatgcatcccgggtcccccgccagcctccctccccacagctgagtgaagaagaggaggagacgccaagcagagattggatcaaacggtctcttcccccacgctccctgatagacctccgtcgggctcctcatttttatattggggagaggtccgaaagtcagacccgggatcccgagcaccaggggagggtgcactacaagtcgtggaatgaagattttgagggtcaccttgagaggccagcctatgtgcccagaaagccacgatcccggaatttccaatacccacagccccctctgaagcccagagggaagcccaggttcgagccatccctcacggaatctgactccgtgtcggcagcatccagcagtgaccagcagaacagcagcgctgaccagtacctgcaggtcacccacagccagggcaggttcccgaggtccgtgggccagcccagcaggaggaaggccaagtcggggcaggagctgaccgtggatctggatgacttgatttgttcagatgtctaggcttcctccagtgtcccgttcctagaggtcaggcccctgttggagtgctgggccagcacatggcatctccctttctggaaaaagaggtgaacaagtgtgttagagacctgaggggcatggtcagcggctgctagctgaggccctgaggctgacagggctacagatacctattctacagctactgttagccaaatttatccgagttag

SEQ ID NO: 36915 - DNA, 4644 bp, Artificial Sequence
  derived and/or modified sequence
acacagtcttcttcctgagaactagcgggcagagcaaactccgctgcttccattcagaaacctcggaacagacctttgcctgccaacttcctagctctctggccagcttctgattgttagcagtgggttagctcccatgaaaacctcgaaggcatcccagcgctatagaggcatccggagaaatgccagccagtgctacctctaccaggaatctctgctgctcagcaacttggatgacagctttagtgctgatgaaacaggggacagcaatgatccggaacaaatcttccagaatatacagttccagaaagatctcatggcaaacattcgctgcagaccctggactatgggacagaagctgagggcattgagacaagcgaagaacattgtgctgaagtttgaagggaggctgaccaggacccgaggctaccaagcagcaggtgcagagctctggcggaaatttgctcgtctcgcctgtaactttgtggtcatcttcattccctgggaaatgaggataaagaaaatcgagagtcattttggatctggcgttgcctcctatttcatattcttgagatggttatttggaattaatattgtgctcaccattatgacaggtgcttttattgtcattccagagctgattgcaggccagccctttggaagcacagccaggaagaccatccccaaggagcaggtttcgtctgcccaagacctggacaccgtctggtctctggggggctacctccagtactctgtcctcttctacggatattacggcagggagaggaagatcgggagagctggctaccggctgcccttggcgtatttcctagtggggatggcagtgtttgcttacagcttcatcattcttttaaaaaagatggctaagaactcccgcacgagtcttgccagtgcttccaatgaaaactataccttctgctggcgggtgttctgtgcctgggattacctcattggaaacccagaggctgcagagagcaaaacagctgccatagtgaacagcatcagggaagctatattggaagaacaggagaaaaagaaaagcaaaaacctggcagtgaccatctgcctgaggattattgccaacatcctggtgcttctctcactggctgggagcatttatctcatctactttgtggtggaccggtcccagaagctggagcagtcgaagaaggagctgacactttgggaaaagaatgagcaggtcagtgtggtggtctccctcgtcaccatgatagcaccatcagcctttgacctcattgctgccttagagatgtaccaccccaggaccacgctgcgcttccagcttgcaagggtccttgtgctgtatttgggaaatctctacagcctgatcattgctctcctggacaaagttaacagcatgagcattgaggaaatggctaccaaaaataacacaagtcattggatagattccaccaccttctttgcaaccaggacagcccctgaagaagagaaatggtccacatctcggcctggaatggggctcaggagaaacaacacatgggccttggaagagaccagcatttcagcttataccatgcctcttataaaggccaacaagactagcctccacactcagagtccacaagaccagtgctgggagacatacgttggtcaggagatgctgaagctctccatcattgacatgctcttcaccgtggcgagcattctgctcatagacttcttccgaggacttttcgtgcggtacttaagtgactactggtgttgggatctggagagcaagtttcctgaatatggagaattcaaaatagctgagaatgtgctacatttagtctacaaccaaggaatgatttggatgggggccttcttctccccatgtctcccagcgttcaacgttctcaaactcattgggctcatgtacctgagaagctgggctgtgctgacctgcaatgtgccccaccagcaagtatttcgagcctcaagatccaacaacttctacttggcaatgctcctgtttatgctgtttctgtgcatgctgccaaccatttttgctattgtccgatacaagccatctctaaactgtgggccattcagtggacaagagaaaatttatgacattgtgtcagaaacgattgagaaagactttcctgtgtggtttggctccgtggttggacacatcagtagccccgtggtcatcctgcccgcagtactcctgcttttcatgctcatctattatctccagagcatcgcacggtctctaaagctcagcaaccaccagctcaaaatgcagatccaaaacgcaagatcagaggataagaaaaaggttgcccagatggtagaagcccgaatccagacccaggaagaaagcaccaagaagcttccaaacgacagtgatcttaccagccagctgtcctcagcgcactcgggcacaccccaaaacaacggcaacgtggcccattttgactcagggagcagcaagagtggcaggatagagacagtcgcacagtccatgccccagagcccgaggccaggggacagggctcctagctcacctctccctggggtccccaaatccaggctagagcatgaaactaacaggtatctgcacggtctgtgtgcaagcaccagtgaccttcacaggaacagatcgcgcacacctatgacatttacaacgcacatcgaagatgtacactcagaacctcttttccgaaaagactttcagcaaatcaaccctcctcaccgtggaccacaggcctcgactttgctggcacagggtcccaggccccacgcccccagatactatgtcattaatgaatgtgactcttacaagaaaaaacatctaaatgtctggccagaaagacatttcaagatagatgcttcaggtgacattgtggagctgtaccccaggaacgtgcgacaatatgcatcccgggtcccccgccagcctccctccccacagctgagtgaagaagaggaggagacgccaagcagagattggatcaaacggtctcttcccccacgctccctgatagacctccgtcgggctcctcatttttatattggggagaggtccgaaagtcagacccgggatcccgagcaccaggggagggtgcactacaagtcgtggaatgaagattttgagggtcaccttgagaggccagcctatgtgcccagaaagccacgatcccggaatttccaatacccacagccccctctgaagcccagagggaagcccaggttcgagccatccctcacggaatctgactccgtgtcggcagcatccagcagtgaccagcagaacagcagcgctgaccagtacctgcaggtcacccacagccagggcaggttcccgaggtccgtgggccagcccagcaggaggaaggccaagtcggggcaggagctgaccgtggatctggatgacttgatttgttcagatgtctaggcttcctccagtgtcccgttcctagaggtcaggcccctgttggagtgctgggccagcacatggcatctccctttctggaaaaagaggtgaacaagtgtgttagagacctgaggggcatggtcagcggctgctagctgaggccctgaggctgacagggctacagatacctattctacagctactgttagccaaatttatccgagttaggtggcaccaaagtatgtcaccagcagtgaatcatcacgggtctgcagcaatctcaatacttgcctcctcggaagaaagaatttggcagaggggctcaagacagaaggagagactgaggcaagttttagagcaggcatgaaagtttactgaaaagctttaaagcaggaatgaaagaacgtaaaacatacttagtagagggccaagcaggcgacttgagagatccagtgcactgtttgacctttgacttggggttttacacgttggcatgcttccggggtcttgcgttgcttctccccacgattcttccctttcttcccttggggtgggctgtccgcatgcgcagtagtggcctgctagcgctggggaggggagcatgcgcagtgtgtttactggagttgtgcacgcgctcactcgaggttcttcccttaccaggggaatgctccattttgtctcttagtgcgcatgtttgagcccactcgcccaactcctgacattttatggggaagctgccgatcaccagtttcaggttttttctatctattgggagactgtcgttccctggtgccagctgtgaccaattattattttagagagacaatcagcagccacctgaccatcacctgatggtcgcctgacattcctgggggttgtgttgaagaaggaattcatgaattttacaagtataatcaaagacaaccaaaaatttttactttttccttcaaaagctaagtgtagtgtagctcccccatagtctaagttaaagaagaacactaactgcctgtttttccttctgtgctcagcaagccttatctgtacttgctagtttcacattccttgaggctcagcgagttcctgcttcaccaccctagcgcagctgcaaagttacaaggttgatgcagaaacatggtttcccagggatgtggaacatgtagtatagataaatgtaaaagactgaacaactgcctttgctctcgcttctgtaagtacgcttcctg

SEQ ID NO: 36916 - protein, 2214 aa, Artificial Sequence
  derived and/or modified sequence
MVANFFKSLILPYIHKLCKGMFTKKLGNTNKNKEYRQQKKDQDFPTAGQTKSPKFSYTFKSTVKKIAKCSSTHNLSTEEDEASKEFSLSPTFSYRVAIANGLQKNAKVTNSDNEDLLQELSSIESSYSESLNELRSSTENQAQSTHTMPVRRNRKSSSSLAPSEGSSDGERTLHGLKLGALRKLRKWKKSQECVSSDSELSTMKKSWGIRSKSLDRTVRNPKTNALEPGFSSSGCISQTHDVMEMIFKELQGISQIETELSELRGHVNALKHSIDEISSSVEVVQSEIEQLRTGFVQSRRETRDIHDYIKHLGHMGSKASLRFLNVTEERFEYVESVVYQILIDKMGFSDAPNAIKIEFAQRIGHQRDCPNAKPRPILVYFETPQQRDSVLKKSYKLKGTGIGISTDILTHDIRERKEKGIPSSQTYESMAIKLSTPEPKIKKNNWQSPDDSDEDLESDLNRNSYAVLSKSELLTKGSTSKPSSKSHSARSKNKTANSSRISNKSDYDKISSQLPESDILEKQTTTHYADATPLWHSQSDFFTAKLSRSESDFSKLCQSYSEDFSENQFFTRTNGSSLLSSSDRELWQRKQEGTATLYDSPKDQHLNGGVQGIQGQTETENTETVDSGMSNGMVCASGDRSHYSDSQLSLHEDLSPWKEWNQGADLGLDSSTQEGFDYETNSLFDQQLDVYNKDLEYLGKCHSDLQDDSESYDLTQDDNSSPCPGLDNEPQGQWVGQYDSYQGANSNELYQNQNQLSMMYRSQSELQSDDSEDAPPKSWHSRLSIDLSDKTFSFPKFGSTLQRAKSALEVVWNKSTQSLSGYEDSGSSLMGRFRTLSQSTANESSTTLDSDVYTEPYYYKAEDEEDYTEPVADNETDYVEVMEQVLAKLENRTSITETDEQMQAYDHLSYETPYETPQDEGYDGPADDMVSEEGLEPLNETSAEMEIREDENQNIPEQPVEITKPKRIRPSFKEAALRAYKKQMAELEEKILAGDSSSVDEKARIVSGNDLDASKFSALQVCGGAGGGLYGIDSMPDLRRKKTLPIVRDVAMTLAARKSGLSLAMVIRTSLNNEELKMHVFKKTLQALIYPMSSTIPHNFEVWTATTPTYCYECEGLLWGIARQGMKCLECGVKCHEKCQDLLNADCLQRAAEKSSKHGAEDKTQTIITAMKERMKIREKNRPEVFEVIQEMFQISKEDFVQFTKAAKQSVLDGTSKWSAKITITVVSAQGLQAKDKTGSSDPYVTVQVGKNKRRTKTIFGNLNPVWDEKFYFECHNSTDRIKVRVWDEDDDIKSRVKQHFKKESDDFLGQTIVEVRTLSGEMDVWYNLEKRTDKSAVSGAIRLKINVEIKGEEKVAPYHIQYTCLHENLFHYLTEVKSNGGVKIPEVKGDEAWKVFFDDASQEIVDEFAMRYGIESIYQAMTHFSCLSSKYMCPGVPAVMSTLLANINAFYAHTTVSTNIQVSASDRFAATNFGREKFIKLLDQLHNSLRIDLSKYRENFPASNTERLQDLKSTVDLLTSITFFRMKVLELQSPPKASMVVKDCVRACLDSTYKYIFDNCHELYSQLTDPSKKQDIPREDQGPTTKNLDFWPQLITLMVTIIDEDKTAYTPVLNQFPQELNMGKISAEIMWTLFALDMKYALEEHENQRLCKSTDYMNLHFKVKWFYNEYVRELPAFKDAVPEYSLWFEPFVMQWLDENEDVSMEFLHGALGRDKKDGFQQTSEHALFSCSVVDVFAQLNQSFEIIKKLECPNPEALSHLMRRFAKTINKVLLQYAAIVSSDFSSHCDKENVPCILMNNIQQLRVQLEKMFESMGGKELDSEASTILKELQVKLSGVLDELSVTYGESFQVIIEECIKQMSFELNQMRANGNTTSNKNSAAMDAEIVLRSLMDFLDKTLSLSAKICEKTVLKRVLKELWKLVLNKIEKQIVLPPLTDQTGPQMIFIAAKDLGQLSKLKEHMIREDARGLTPRQCAIMEVVLATIKQYFHAGGNGLKKNFLEKSPDLQSLRYALSLYTQTTDALIKKFIDTQTSQSRSSKDAVGQISVHVDITATPGTGDHKVTVKVIAINDLNWQTTAMFRPFVEVCILGPNLGDKKRKQGTKTKSNTWSPKYNETFQFILGKENRPGAYELHLSVKDYCFAREDRIIGMTVIQLQNIAEKGSYGAWYPLLKNISMDETGLTILRILSQRTSDDVAKEFVRLKSETRSTEESA

SEQ ID NO: 36917 - protein, 2212 aa, Artificial Sequence
  derived and/or modified sequence
MVANFFKSLILPYIHKLCKGMFTKKLGNTNKNKEYRQQKKDQDFPTAGQTKSPKFSYTFKSTVKKIAKCSSTHNLSTEEDEASKEFSLSPTFSYRVAIANGLQKNAKVTNSDNEDLLQELSSIESSYSESLNELRSSTENQAQSTHTMPVRRNRKSSSSLAPSEGSSDGERTLHGLKLGALRKLRKWKKSQECVSSDSELSTMKKSWGIRSKSLDRTVRNPKTNALEPGFSSSGCISQTHDVMEMIFKELQGISQIETELSELRGHVNALKHSIDEISSSVEVVQSEIEQLRTGFVQSRRETRDIHDYIKHLGHMGSKASLRFLNVTEERFEYVESVVYQILIDKMGFSDAPNAIKIEFAQRIGHQRDCPNAKPRPILVYFETPQQRDSVLKKSYKLKGTGIGISTDILTHDIRERKEKGIPSSQTYESMAIKLSTPEPKIKKNNWQSPDDSDEDLESDLNRNSYAVLSKSELLTKGSTSKPSSKSHSARSKNKTANSSRISNKSDYDKISSQLPESDILEKQTTTHYADATPLWHSQSDFFTAKLSRSESDFSKLCQSYSEDFSENQFFTRTNGSSLLSSSDRELWQRKQEGTATLYDSPKDQHLNGGVQGIQGQTETENTETVDSGMSNGMVCASGDRSHYSDSQLSLHEDLSPWKEWNQGADLGLDSSTQEGFDYETNSLFDQQLDVYNKDLEYLGKCHSDLQDDSESYDLTQDDNSSPCPGLDNEPQGQWVGQYDSYQGANSNELYQNQNQLSMMYRSQSELQSDDSEDAPPKSWHSRLSIDLSDKTFSFPKFGSTLQRAKSALEVVWNKSTQSLSGYEDSGSSLMGRFRTLSQSTANESSTTLDSDVYTEPYYYKAEDEEDYTEPVADNETDYVEVMEQVLAKLENRTSITETDEQMQAYDHLSYETPYETPQDEGYDGPADDMVSEEGLEPLNETSAEMEIREDENQNIPEQPVEITKPKRIRPSFKEAALRAYKKQMAELEEKILAGDSSSVDEKARIVSGNDLDASKFSALQVCGGAGGGLYGIDSMPDLRRKKTLPIVRDVTLAARKSGLSLAMVIRTSLNNEELKMHVFKKTLQALIYPMSSTIPHNFEVWTATTPTYCYECEGLLWGIARQGMKCLECGVKCHEKCQDLLNADCLQRAAEKSSKHGAEDKTQTIITAMKERMKIREKNRPEVFEVIQEMFQISKEDFVQFTKAAKQSVLDGTSKWSAKITITVVSAQGLQAKDKTGSSDPYVTVQVGKNKRRTKTIFGNLNPVWDEKFYFECHNSTDRIKVRVWDEDDDIKSRVKQHFKKESDDFLGQTIVEVRTLSGEMDVWYNLEKRTDKSAVSGAIRLKINVEIKGEEKVAPYHIQYTCLHENLFHYLTEVKSNGGVKIPEVKGDEAWKVFFDDASQEIVDEFAMRYGIESIYQAMTHFSCLSSKYMCPGVPAVMSTLLANINAFYAHTTVSTNIQVSASDRFAATNFGREKFIKLLDQLHNSLRIDLSKYRENFPASNTERLQDLKSTVDLLTSITFFRMKVLELQSPPKASMVVKDCVRACLDSTYKYIFDNCHELYSQLTDPSKKQDIPREDQGPTTKNLDFWPQLITLMVTIIDEDKTAYTPVLNQFPQELNMGKISAEIMWTLFALDMKYALEEHENQRLCKSTDYMNLHFKVKWFYNEYVRELPAFKDAVPEYSLWFEPFVMQWLDENEDVSMEFLHGALGRDKKDGFQQTSEHALFSCSVVDVFAQLNQSFEIIKKLECPNPEALSHLMRRFAKTINKVLLQYAAIVSSDFSSHCDKENVPCILMNNIQQLRVQLEKMFESMGGKELDSEASTILKELQVKLSGVLDELSVTYGESFQVIIEECIKQMSFELNQMRANGNTTSNKNSAAMDAEIVLRSLMDFLDKTLSLSAKICEKTVLKRVLKELWKLVLNKIEKQIVLPPLTDQTGPQMIFIAAKDLGQLSKLKEHMIREDARGLTPRQCAIMEVVLATIKQYFHAGGNGLKKNFLEKSPDLQSLRYALSLYTQTTDALIKKFIDTQTSQSRSSKDAVGQISVHVDITATPGTGDHKVTVKVIAINDLNWQTTAMFRPFVEVCILGPNLGDKKRKQGTKTKSNTWSPKYNETFQFILGKENRPGAYELHLSVKDYCFAREDRIIGMTVIQLQNIAEKGSYGAWYPLLKNISMDETGLTILRILSQRTSDDVAKEFVRLKSETRSTEESA

SEQ ID NO: 36918 - protein, 2214 aa, Artificial Sequence
  derived and/or modified sequence
MVANFFKSLILPYIHKLCKGMFTKKLGNTNKNKEYRQQKKDQDFPTAGQTKSPKFSYTFKSTVKKIAKCSSTHNLSTEEDEASKEFSLSPTFSYRVAIANGLQKNAKVTNSDNEDLLQELSSIESSYSESLNELRSSTENQAQSTHTMPVRRNRKSSSSLAPSEGSSDGERTLHGLKLGALRKLRKWKKSQECVSSDSELSTMKKSWGIRSKSLDRTVRNPKTNALEPGFSSSGCISQTHDVMEMIFKELQGISQIETELSELRGHVNALKHSIDEISSSVEVVQSEIEQLRTGFVQSRRETRDIHDYIKHLGHMGSKASLRFLNVTEERFEYVESVVYQILIDKMGFSDAPNAIKIEFAQRIGHQRDCPNAKPRPILVYFETPQQRDSVLKKSYKLKGTGIGISTDILTHDIRERKEKGIPSSQTYESMAIKLSTPEPKIKKNNWQSPDDSDEDLESDLNRNSYAVLSKSELLTKGSTSKPSSKSHSARSKNKTANSSRISNKSDYDKISSQLPESDILEKQTTTHYADATPLWHSQSDFFTAKLSRSESDFSKLCQSYSEDFSENQFFTRTNGSSLLSSSDRELWQRKQEGTATLYDSPKDQHLNGGVQGIQGQTETENTETVDSGMSNGMVCASGDRSHYSDSQLSLHEDLSPWKEWNQGADLGLDSSTQEGFDYETNSLFDQQLDVYNKDLEYLGKCHSDLQDDSESYDLTQDDNSSPCPGLDNEPQGQWVGQYDSYQGANSNELYQNQNQLSMMYRSQSELQSDDSEDAPPKSWHSRLSIDLSDKTFSFPKFGSTLQRAKSALEVVWNKSTQSLSGYEDSGSSLMGRFRTLSQSTANESSTTLDSDVYTEPYYYKAEDEEDYTEPVADNETDYVEVMEQVLAKLENRTSITETDEQMQAYDHLSYETPYETPQDEGYDGPADDMVSEEGLEPLNETSAEMEIREDENQNIPEQPVEITKPKRIRPSFKEAALRAYKKQMAELEEKILAGVSLDVDLEARIVSGNDLDASKFSALQVCGGAGGGLYGIDSMPDLRRKKTLPIVRDVLLTLAARKSGLSLAMVIRTSLNNEELKMHVFKKTLQALIYPMSSTIPHNFEVWTATTPTYCYECEGLLWGIARQGMKCLECGVKCHEKCQDLLNADCLQRAAEKSSKHGAEDKTQTIITAMKERMKIREKNRPEVFEVIQEMFQISKEDFVQFTKAAKQSVLDGTSKWSAKITITVVSAQGLQAKDKTGSSDPYVTVQVGKNKRRTKTIFGNLNPVWDEKFYFECHNSTDRIKVRVWDEDDDIKSRVKQHFKKESDDFLGQTIVEVRTLSGEMDVWYNLEKRTDKSAVSGAIRLKINVEIKGEEKVAPYHIQYTCLHENLFHYLTEVKSNGGVKIPEVKGDEAWKVFFDDASQEIVDEFAMRYGIESIYQAMTHFSCLSSKYMCPGVPAVMSTLLANINAFYAHTTVSTNIQVSASDRFAATNFGREKFIKLLDQLHNSLRIDLSKYRENFPASNTERLQDLKSTVDLLTSITFFRMKVLELQSPPKASMVVKDCVRACLDSTYKYIFDNCHELYSQLTDPSKKQDIPREDQGPTTKNLDFWPQLITLMVTIIDEDKTAYTPVLNQFPQELNMGKISAEIMWTLFALDMKYALEEHENQRLCKSTDYMNLHFKVKWFYNEYVRELPAFKDAVPEYSLWFEPFVMQWLDENEDVSMEFLHGALGRDKKDGFQQTSEHALFSCSVVDVFAQLNQSFEIIKKLECPNPEALSHLMRRFAKTINKVLLQYAAIVSSDFSSHCDKENVPCILMNNIQQLRVQLEKMFESMGGKELDSEASTILKELQVKLSGVLDELSVTYGESFQVIIEECIKQMSFELNQMRANGNTTSNKNSAAMDAEIVLRSLMDFLDKTLSLSAKICEKTVLKRVLKELWKLVLNKIEKQIVLPPLTDQTGPQMIFIAAKDLGQLSKLKEHMIREDARGLTPRQCAIMEVVLATIKQYFHAGGNGLKKNFLEKSPDLQSLRYALSLYTQTTDALIKKFIDTQTSQSRSSKDAVGQISVHVDITATPGTGDHKVTVKVIAINDLNWQTTAMFRPFVEVCILGPNLGDKKRKQGTKTKSNTWSPKYNETFQFILGKENRPGAYELHLSVKDYCFAREDRIIGMTVIQLQNIAEKGSYGAWYPLLKNISMDETGLTILRILSQRTSDDVAKEFVRLKSETRSTEESA

SEQ ID NO: 36919 - DNA, 6645 bp, Artificial Sequence
  derived and/or modified sequence
atggtggccaacttcttcaagagcctgatcctgccctacatccacaagctgtgcaagggcatgttcaccaagaagctgggcaacaccaacaagaacaaggagtacagacagcagaagaaggaccaggacttccccaccgccggccagaccaagagccccaagttcagctacaccttcaagagcaccgtgaagaagatcgccaagtgcagcagcacccacaacctgagcaccgaggaggacgaggccagcaaggagttcagcctgagccccaccttcagctacagagtggccatcgccaacggcctgcagaagaacgccaaggtgaccaacagcgacaacgaggacctgctgcaggagctgagcagcatcgagagcagctacagcgagagcctgaacgagctgagaagcagcaccgagaaccaggcccagagcacccacaccatgcccgtgagaagaaacagaaagagcagcagcagcctggcccccagcgagggcagcagcgacggcgagagaaccctgcacggcctgaagctgggcgccctgagaaagctgagaaagtggaagaagagccaggagtgcgtgagcagcgacagcgagctgagcaccatgaagaagagctggggcatcagaagcaagagcctggacagaaccgtgagaaaccccaagaccaacgccctggagcccggcttcagcagcagcggctgcatcagccagacccacgacgtgatggagatgatcttcaaggagctgcagggcatcagccagatcgagaccgagctgagcgagctgagaggccacgtgaacgccctgaagcacagcatcgacgagatcagcagcagcgtggaggtggtgcagagcgagatcgagcagctgagaaccggcttcgtgcagagcagaagagagaccagagacatccacgactacatcaagcacctgggccacatgggcagcaaggccagcctgagattcctgaacgtgaccgaggagagattcgagtacgtggagagcgtggtgtaccagatcctgatcgacaagatgggcttcagcgacgcccccaacgccatcaagatcgagttcgcccagagaatcggccaccagagagactgccccaacgccaagcccagacccatcctggtgtacttcgagaccccccagcagagagacagcgtgctgaagaagagctacaagctgaagggcaccggcatcggcatcagcaccgacatcctgacccacgacatcagagagagaaaggagaagggcatccccagcagccagacctacgagagcatggccatcaagctgagcacccccgagcccaagatcaagaagaacaactggcagagccccgacgacagcgacgaggacctggagagcgacctgaacagaaacagctacgccgtgctgagcaagagcgagctgctgaccaagggcagcaccagcaagcccagcagcaagagccacagcgccagaagcaagaacaagaccgccaacagcagcagaatcagcaacaagagcgactacgacaagatcagcagccagctgcccgagagcgacatcctggagaagcagaccaccacccactacgccgacgccacccccctgtggcacagccagagcgacttcttcaccgccaagctgagcagaagcgagagcgacttcagcaagctgtgccagagctacagcgaggacttcagcgagaaccagttcttcaccagaaccaacggcagcagcctgctgagcagcagcgacagagagctgtggcagagaaagcaggagggcaccgccaccctgtacgacagccccaaggaccagcacctgaacggcggcgtgcagggcatccagggccagaccgagaccgagaacaccgagaccgtggacagcggcatgagcaacggcatggtgtgcgccagcggcgacagaagccactacagcgacagccagctgagcctgcacgaggacctgagcccctggaaggagtggaaccagggcgccgacctgggcctggacagcagcacccaggagggcttcgactacgagaccaacagcctgttcgaccagcagctggacgtgtacaacaaggacctggagtacctgggcaagtgccacagcgacctgcaggacgacagcgagagctacgacctgacccaggacgacaacagcagcccctgccccggcctggacaacgagccccagggccagtgggtgggccagtacgacagctaccagggcgccaacagcaacgagctgtaccagaaccagaaccagctgagcatgatgtacagaagccagagcgagctgcagagcgacgacagcgaggacgccccccccaagagctggcacagcagactgagcatcgacctgagcgacaagaccttcagcttccccaagttcggcagcaccctgcagagagccaagagcgccctggaggtggtgtggaacaagagcacccagagcctgagcggctacgaggacagcggcagcagcctgatgggcagattcagaaccctgagccagagcaccgccaacgagagcagcaccaccctggacagcgacgtgtacaccgagccctactactacaaggccgaggacgaggaggactacaccgagcccgtggccgacaacgagaccgactacgtggaggtgatggagcaggtgctggccaagctggagaacagaaccagcatcaccgagaccgacgagcagatgcaggcctacgaccacctgagctacgagaccccctacgagaccccccaggacgagggctacgacggccccgccgacgacatggtgagcgaggagggcctggagcccctgaacgagaccagcgccgagatggagatcagagaggacgagaaccagaacatccccgagcagcccgtggagatcaccaagcccaagagaatcagacccagcttcaaggaggccgccctgagagcctacaagaagcagatggccgagctggaggagaagatcctggccggcgacagcagcagcgtggacgagaaggccagaatcgtgagcggcaacgacctggacgccagcaagttcagcgccctgcaggtgtgcggcggcgccggcggcggcctgtacggcatcgacagcatgcccgacctgagaagaaagaagaccctgcccatcgtgagagacgtggccatgaccctggccgccagaaagagcggcctgagcctggccatggtgatcagaaccagcctgaacaacgaggagctgaagatgcacgtgttcaagaagaccctgcaggccctgatctaccccatgagcagcaccatcccccacaacttcgaggtgtggaccgccaccacccccacctactgctacgagtgcgagggcctgctgtggggcatcgccagacagggcatgaagtgcctggagtgcggcgtgaagtgccacgagaagtgccaggacctgctgaacgccgactgcctgcagagagccgccgagaagagcagcaagcacggcgccgaggacaagacccagaccatcatcaccgccatgaaggagagaatgaagatcagagagaagaacagacccgaggtgttcgaggtgatccaggagatgttccagatcagcaaggaggacttcgtgcagttcaccaaggccgccaagcagagcgtgctggacggcaccagcaagtggagcgccaagatcaccatcaccgtggtgagcgcccagggcctgcaggccaaggacaagaccggcagcagcgacccctacgtgaccgtgcaggtgggcaagaacaagagaagaaccaagaccatcttcggcaacctgaaccccgtgtgggacgagaagttctacttcgagtgccacaacagcaccgacagaatcaaggtgagagtgtgggacgaggacgacgacatcaagagcagagtgaagcagcacttcaagaaggagagcgacgacttcctgggccagaccatcgtggaggtgagaaccctgagcggcgagatggacgtgtggtacaacctggagaagagaaccgacaagagcgccgtgagcggcgccatcagactgaagatcaacgtggagatcaagggcgaggagaaggtggccccctaccacatccagtacacctgcctgcacgagaacctgttccactacctgaccgaggtgaagagcaacggcggcgtgaagatccccgaggtgaagggcgacgaggcctggaaggtgttcttcgacgacgccagccaggagatcgtggacgagttcgccatgagatacggcatcgagagcatctaccaggccatgacccacttcagctgcctgagcagcaagtacatgtgccccggcgtgcccgccgtgatgagcaccctgctggccaacatcaacgccttctacgcccacaccaccgtgagcaccaacatccaggtgagcgccagcgacagattcgccgccaccaacttcggcagagagaagttcatcaagctgctggaccagctgcacaacagcctgagaatcgacctgagcaagtacagagagaacttccccgccagcaacaccgagagactgcaggacctgaagagcaccgtggacctgctgaccagcatcaccttcttcagaatgaaggtgctggagctgcagagcccccccaaggccagcatggtggtgaaggactgcgtgagagcctgcctggacagcacctacaagtacatcttcgacaactgccacgagctgtacagccagctgaccgaccccagcaagaagcaggacatccccagagaggaccagggccccaccaccaagaacctggacttctggccccagctgatcaccctgatggtgaccatcatcgacgaggacaagaccgcctacacccccgtgctgaaccagttcccccaggagctgaacatgggcaagatcagcgccgagatcatgtggaccctgttcgccctggacatgaagtacgccctggaggagcacgagaaccagagactgtgcaagagcaccgactacatgaacctgcacttcaaggtgaagtggttctacaacgagtacgtgagagagctgcccgccttcaaggacgccgtgcccgagtacagcctgtggttcgagcccttcgtgatgcagtggctggacgagaacgaggacgtgagcatggagttcctgcacggcgccctgggcagagacaagaaggacggcttccagcagaccagcgagcacgccctgttcagctgcagcgtggtggacgtgttcgcccagctgaaccagagcttcgagatcatcaagaagctggagtgccccaaccccgaggccctgagccacctgatgagaagattcgccaagaccatcaacaaggtgctgctgcagtacgccgccatcgtgagcagcgacttcagcagccactgcgacaaggagaacgtgccctgcatcctgatgaacaacatccagcagctgagagtgcagctggagaagatgttcgagagcatgggcggcaaggagctggacagcgaggccagcaccatcctgaaggagctgcaggtgaagctgagcggcgtgctggacgagctgagcgtgacctacggcgagagcttccaggtgatcatcgaggagtgcatcaagcagatgagcttcgagctgaaccagatgagagccaacggcaacaccaccagcaacaagaacagcgccgccatggacgccgagatcgtgctgagaagcctgatggacttcctggacaagaccctgagcctgagcgccaagatctgcgagaagaccgtgctgaagagagtgctgaaggagctgtggaagctggtgctgaacaagatcgagaagcagatcgtgctgccccccctgaccgaccagaccggcccccagatgatcttcatcgccgccaaggacctgggccagctgagcaagctgaaggagcacatgatcagagaggacgccagaggcctgacccccagacagtgcgccatcatggaggtggtgctggccaccatcaagcagtacttccacgccggcggcaacggcctgaagaagaacttcctggagaagagccccgacctgcagagcctgagatacgccctgagcctgtacacccagaccaccgacgccctgatcaagaagttcatcgacacccagaccagccagagcagaagcagcaaggacgccgtgggccagatcagcgtgcacgtggacatcaccgccacccccggcaccggcgaccacaaggtgaccgtgaaggtgatcgccatcaacgacctgaactggcagaccaccgccatgttcagacccttcgtggaggtgtgcatcctgggccccaacctgggcgacaagaagagaaagcagggcaccaagaccaagagcaacacctggagccccaagtacaacgagaccttccagttcatcctgggcaaggagaacagacccggcgcctacgagctgcacctgagcgtgaaggactactgcttcgccagagaggacagaatcatcggcatgaccgtgatccagctgcagaacatcgccgagaagggcagctacggcgcctggtaccccctgctgaagaacatcagcatggacgagaccggcctgaccatcctgagaatcctgagccagagaaccagcgacgacgtggccaaggagttcgtgagactgaagagcgagaccagaagcaccgaggagagcgcctag

SEQ ID NO: 36920 - DNA, 6639 bp, Artificial Sequence
  derived and/or modified sequence
atggtggccaacttcttcaagagcctgatcctgccctacatccacaagctgtgcaagggcatgttcaccaagaagctgggcaacaccaacaagaacaaggagtacagacagcagaagaaggaccaggacttccccaccgccggccagaccaagagccccaagttcagctacaccttcaagagcaccgtgaagaagatcgccaagtgcagcagcacccacaacctgagcaccgaggaggacgaggccagcaaggagttcagcctgagccccaccttcagctacagagtggccatcgccaacggcctgcagaagaacgccaaggtgaccaacagcgacaacgaggacctgctgcaggagctgagcagcatcgagagcagctacagcgagagcctgaacgagctgagaagcagcaccgagaaccaggcccagagcacccacaccatgcccgtgagaagaaacagaaagagcagcagcagcctggcccccagcgagggcagcagcgacggcgagagaaccctgcacggcctgaagctgggcgccctgagaaagctgagaaagtggaagaagagccaggagtgcgtgagcagcgacagcgagctgagcaccatgaagaagagctggggcatcagaagcaagagcctggacagaaccgtgagaaaccccaagaccaacgccctggagcccggcttcagcagcagcggctgcatcagccagacccacgacgtgatggagatgatcttcaaggagctgcagggcatcagccagatcgagaccgagctgagcgagctgagaggccacgtgaacgccctgaagcacagcatcgacgagatcagcagcagcgtggaggtggtgcagagcgagatcgagcagctgagaaccggcttcgtgcagagcagaagagagaccagagacatccacgactacatcaagcacctgggccacatgggcagcaaggccagcctgagattcctgaacgtgaccgaggagagattcgagtacgtggagagcgtggtgtaccagatcctgatcgacaagatgggcttcagcgacgcccccaacgccatcaagatcgagttcgcccagagaatcggccaccagagagactgccccaacgccaagcccagacccatcctggtgtacttcgagaccccccagcagagagacagcgtgctgaagaagagctacaagctgaagggcaccggcatcggcatcagcaccgacatcctgacccacgacatcagagagagaaaggagaagggcatccccagcagccagacctacgagagcatggccatcaagctgagcacccccgagcccaagatcaagaagaacaactggcagagccccgacgacagcgacgaggacctggagagcgacctgaacagaaacagctacgccgtgctgagcaagagcgagctgctgaccaagggcagcaccagcaagcccagcagcaagagccacagcgccagaagcaagaacaagaccgccaacagcagcagaatcagcaacaagagcgactacgacaagatcagcagccagctgcccgagagcgacatcctggagaagcagaccaccacccactacgccgacgccacccccctgtggcacagccagagcgacttcttcaccgccaagctgagcagaagcgagagcgacttcagcaagctgtgccagagctacagcgaggacttcagcgagaaccagttcttcaccagaaccaacggcagcagcctgctgagcagcagcgacagagagctgtggcagagaaagcaggagggcaccgccaccctgtacgacagccccaaggaccagcacctgaacggcggcgtgcagggcatccagggccagaccgagaccgagaacaccgagaccgtggacagcggcatgagcaacggcatggtgtgcgccagcggcgacagaagccactacagcgacagccagctgagcctgcacgaggacctgagcccctggaaggagtggaaccagggcgccgacctgggcctggacagcagcacccaggagggcttcgactacgagaccaacagcctgttcgaccagcagctggacgtgtacaacaaggacctggagtacctgggcaagtgccacagcgacctgcaggacgacagcgagagctacgacctgacccaggacgacaacagcagcccctgccccggcctggacaacgagccccagggccagtgggtgggccagtacgacagctaccagggcgccaacagcaacgagctgtaccagaaccagaaccagctgagcatgatgtacagaagccagagcgagctgcagagcgacgacagcgaggacgccccccccaagagctggcacagcagactgagcatcgacctgagcgacaagaccttcagcttccccaagttcggcagcaccctgcagagagccaagagcgccctggaggtggtgtggaacaagagcacccagagcctgagcggctacgaggacagcggcagcagcctgatgggcagattcagaaccctgagccagagcaccgccaacgagagcagcaccaccctggacagcgacgtgtacaccgagccctactactacaaggccgaggacgaggaggactacaccgagcccgtggccgacaacgagaccgactacgtggaggtgatggagcaggtgctggccaagctggagaacagaaccagcatcaccgagaccgacgagcagatgcaggcctacgaccacctgagctacgagaccccctacgagaccccccaggacgagggctacgacggccccgccgacgacatggtgagcgaggagggcctggagcccctgaacgagaccagcgccgagatggagatcagagaggacgagaaccagaacatccccgagcagcccgtggagatcaccaagcccaagagaatcagacccagcttcaaggaggccgccctgagagcctacaagaagcagatggccgagctggaggagaagatcctggccggcgacagcagcagcgtggacgagaaggccagaatcgtgagcggcaacgacctggacgccagcaagttcagcgccctgcaggtgtgcggcggcgccggcggcggcctgtacggcatcgacagcatgcccgacctgagaagaaagaagaccctgcccatcgtgagagacgtgaccctggccgccagaaagagcggcctgagcctggccatggtgatcagaaccagcctgaacaacgaggagctgaagatgcacgtgttcaagaagaccctgcaggccctgatctaccccatgagcagcaccatcccccacaacttcgaggtgtggaccgccaccacccccacctactgctacgagtgcgagggcctgctgtggggcatcgccagacagggcatgaagtgcctggagtgcggcgtgaagtgccacgagaagtgccaggacctgctgaacgccgactgcctgcagagagccgccgagaagagcagcaagcacggcgccgaggacaagacccagaccatcatcaccgccatgaaggagagaatgaagatcagagagaagaacagacccgaggtgttcgaggtgatccaggagatgttccagatcagcaaggaggacttcgtgcagttcaccaaggccgccaagcagagcgtgctggacggcaccagcaagtggagcgccaagatcaccatcaccgtggtgagcgcccagggcctgcaggccaaggacaagaccggcagcagcgacccctacgtgaccgtgcaggtgggcaagaacaagagaagaaccaagaccatcttcggcaacctgaaccccgtgtgggacgagaagttctacttcgagtgccacaacagcaccgacagaatcaaggtgagagtgtgggacgaggacgacgacatcaagagcagagtgaagcagcacttcaagaaggagagcgacgacttcctgggccagaccatcgtggaggtgagaaccctgagcggcgagatggacgtgtggtacaacctggagaagagaaccgacaagagcgccgtgagcggcgccatcagactgaagatcaacgtggagatcaagggcgaggagaaggtggccccctaccacatccagtacacctgcctgcacgagaacctgttccactacctgaccgaggtgaagagcaacggcggcgtgaagatccccgaggtgaagggcgacgaggcctggaaggtgttcttcgacgacgccagccaggagatcgtggacgagttcgccatgagatacggcatcgagagcatctaccaggccatgacccacttcagctgcctgagcagcaagtacatgtgccccggcgtgcccgccgtgatgagcaccctgctggccaacatcaacgccttctacgcccacaccaccgtgagcaccaacatccaggtgagcgccagcgacagattcgccgccaccaacttcggcagagagaagttcatcaagctgctggaccagctgcacaacagcctgagaatcgacctgagcaagtacagagagaacttccccgccagcaacaccgagagactgcaggacctgaagagcaccgtggacctgctgaccagcatcaccttcttcagaatgaaggtgctggagctgcagagcccccccaaggccagcatggtggtgaaggactgcgtgagagcctgcctggacagcacctacaagtacatcttcgacaactgccacgagctgtacagccagctgaccgaccccagcaagaagcaggacatccccagagaggaccagggccccaccaccaagaacctggacttctggccccagctgatcaccctgatggtgaccatcatcgacgaggacaagaccgcctacacccccgtgctgaaccagttcccccaggagctgaacatgggcaagatcagcgccgagatcatgtggaccctgttcgccctggacatgaagtacgccctggaggagcacgagaaccagagactgtgcaagagcaccgactacatgaacctgcacttcaaggtgaagtggttctacaacgagtacgtgagagagctgcccgccttcaaggacgccgtgcccgagtacagcctgtggttcgagcccttcgtgatgcagtggctggacgagaacgaggacgtgagcatggagttcctgcacggcgccctgggcagagacaagaaggacggcttccagcagaccagcgagcacgccctgttcagctgcagcgtggtggacgtgttcgcccagctgaaccagagcttcgagatcatcaagaagctggagtgccccaaccccgaggccctgagccacctgatgagaagattcgccaagaccatcaacaaggtgctgctgcagtacgccgccatcgtgagcagcgacttcagcagccactgcgacaaggagaacgtgccctgcatcctgatgaacaacatccagcagctgagagtgcagctggagaagatgttcgagagcatgggcggcaaggagctggacagcgaggccagcaccatcctgaaggagctgcaggtgaagctgagcggcgtgctggacgagctgagcgtgacctacggcgagagcttccaggtgatcatcgaggagtgcatcaagcagatgagcttcgagctgaaccagatgagagccaacggcaacaccaccagcaacaagaacagcgccgccatggacgccgagatcgtgctgagaagcctgatggacttcctggacaagaccctgagcctgagcgccaagatctgcgagaagaccgtgctgaagagagtgctgaaggagctgtggaagctggtgctgaacaagatcgagaagcagatcgtgctgccccccctgaccgaccagaccggcccccagatgatcttcatcgccgccaaggacctgggccagctgagcaagctgaaggagcacatgatcagagaggacgccagaggcctgacccccagacagtgcgccatcatggaggtggtgctggccaccatcaagcagtacttccacgccggcggcaacggcctgaagaagaacttcctggagaagagccccgacctgcagagcctgagatacgccctgagcctgtacacccagaccaccgacgccctgatcaagaagttcatcgacacccagaccagccagagcagaagcagcaaggacgccgtgggccagatcagcgtgcacgtggacatcaccgccacccccggcaccggcgaccacaaggtgaccgtgaaggtgatcgccatcaacgacctgaactggcagaccaccgccatgttcagacccttcgtggaggtgtgcatcctgggccccaacctgggcgacaagaagagaaagcagggcaccaagaccaagagcaacacctggagccccaagtacaacgagaccttccagttcatcctgggcaaggagaacagacccggcgcctacgagctgcacctgagcgtgaaggactactgcttcgccagagaggacagaatcatcggcatgaccgtgatccagctgcagaacatcgccgagaagggcagctacggcgcctggtaccccctgctgaagaacatcagcatggacgagaccggcctgaccatcctgagaatcctgagccagagaaccagcgacgacgtggccaaggagttcgtgagactgaagagcgagaccagaagcaccgaggagagcgcctag

SEQ ID NO: 36921 - DNA, 6645 bp, Artificial Sequence
  derived and/or modified sequence
atggtggccaacttcttcaagagcctgatcctgccctacatccacaagctgtgcaagggcatgttcaccaagaagctgggcaacaccaacaagaacaaggagtacagacagcagaagaaggaccaggacttccccaccgccggccagaccaagagccccaagttcagctacaccttcaagagcaccgtgaagaagatcgccaagtgcagcagcacccacaacctgagcaccgaggaggacgaggccagcaaggagttcagcctgagccccaccttcagctacagagtggccatcgccaacggcctgcagaagaacgccaaggtgaccaacagcgacaacgaggacctgctgcaggagctgagcagcatcgagagcagctacagcgagagcctgaacgagctgagaagcagcaccgagaaccaggcccagagcacccacaccatgcccgtgagaagaaacagaaagagcagcagcagcctggcccccagcgagggcagcagcgacggcgagagaaccctgcacggcctgaagctgggcgccctgagaaagctgagaaagtggaagaagagccaggagtgcgtgagcagcgacagcgagctgagcaccatgaagaagagctggggcatcagaagcaagagcctggacagaaccgtgagaaaccccaagaccaacgccctggagcccggcttcagcagcagcggctgcatcagccagacccacgacgtgatggagatgatcttcaaggagctgcagggcatcagccagatcgagaccgagctgagcgagctgagaggccacgtgaacgccctgaagcacagcatcgacgagatcagcagcagcgtggaggtggtgcagagcgagatcgagcagctgagaaccggcttcgtgcagagcagaagagagaccagagacatccacgactacatcaagcacctgggccacatgggcagcaaggccagcctgagattcctgaacgtgaccgaggagagattcgagtacgtggagagcgtggtgtaccagatcctgatcgacaagatgggcttcagcgacgcccccaacgccatcaagatcgagttcgcccagagaatcggccaccagagagactgccccaacgccaagcccagacccatcctggtgtacttcgagaccccccagcagagagacagcgtgctgaagaagagctacaagctgaagggcaccggcatcggcatcagcaccgacatcctgacccacgacatcagagagagaaaggagaagggcatccccagcagccagacctacgagagcatggccatcaagctgagcacccccgagcccaagatcaagaagaacaactggcagagccccgacgacagcgacgaggacctggagagcgacctgaacagaaacagctacgccgtgctgagcaagagcgagctgctgaccaagggcagcaccagcaagcccagcagcaagagccacagcgccagaagcaagaacaagaccgccaacagcagcagaatcagcaacaagagcgactacgacaagatcagcagccagctgcccgagagcgacatcctggagaagcagaccaccacccactacgccgacgccacccccctgtggcacagccagagcgacttcttcaccgccaagctgagcagaagcgagagcgacttcagcaagctgtgccagagctacagcgaggacttcagcgagaaccagttcttcaccagaaccaacggcagcagcctgctgagcagcagcgacagagagctgtggcagagaaagcaggagggcaccgccaccctgtacgacagccccaaggaccagcacctgaacggcggcgtgcagggcatccagggccagaccgagaccgagaacaccgagaccgtggacagcggcatgagcaacggcatggtgtgcgccagcggcgacagaagccactacagcgacagccagctgagcctgcacgaggacctgagcccctggaaggagtggaaccagggcgccgacctgggcctggacagcagcacccaggagggcttcgactacgagaccaacagcctgttcgaccagcagctggacgtgtacaacaaggacctggagtacctgggcaagtgccacagcgacctgcaggacgacagcgagagctacgacctgacccaggacgacaacagcagcccctgccccggcctggacaacgagccccagggccagtgggtgggccagtacgacagctaccagggcgccaacagcaacgagctgtaccagaaccagaaccagctgagcatgatgtacagaagccagagcgagctgcagagcgacgacagcgaggacgccccccccaagagctggcacagcagactgagcatcgacctgagcgacaagaccttcagcttccccaagttcggcagcaccctgcagagagccaagagcgccctggaggtggtgtggaacaagagcacccagagcctgagcggctacgaggacagcggcagcagcctgatgggcagattcagaaccctgagccagagcaccgccaacgagagcagcaccaccctggacagcgacgtgtacaccgagccctactactacaaggccgaggacgaggaggactacaccgagcccgtggccgacaacgagaccgactacgtggaggtgatggagcaggtgctggccaagctggagaacagaaccagcatcaccgagaccgacgagcagatgcaggcctacgaccacctgagctacgagaccccctacgagaccccccaggacgagggctacgacggccccgccgacgacatggtgagcgaggagggcctggagcccctgaacgagaccagcgccgagatggagatcagagaggacgagaaccagaacatccccgagcagcccgtggagatcaccaagcccaagagaatcagacccagcttcaaggaggccgccctgagagcctacaagaagcagatggccgagctggaggagaagatcctggccggcgtgagcctggacgtggacctggaggccagaatcgtgagcggcaacgacctggacgccagcaagttcagcgccctgcaggtgtgcggcggcgccggcggcggcctgtacggcatcgacagcatgcccgacctgagaagaaagaagaccctgcccatcgtgagagacgtgctgctgaccctggccgccagaaagagcggcctgagcctggccatggtgatcagaaccagcctgaacaacgaggagctgaagatgcacgtgttcaagaagaccctgcaggccctgatctaccccatgagcagcaccatcccccacaacttcgaggtgtggaccgccaccacccccacctactgctacgagtgcgagggcctgctgtggggcatcgccagacagggcatgaagtgcctggagtgcggcgtgaagtgccacgagaagtgccaggacctgctgaacgccgactgcctgcagagagccgccgagaagagcagcaagcacggcgccgaggacaagacccagaccatcatcaccgccatgaaggagagaatgaagatcagagagaagaacagacccgaggtgttcgaggtgatccaggagatgttccagatcagcaaggaggacttcgtgcagttcaccaaggccgccaagcagagcgtgctggacggcaccagcaagtggagcgccaagatcaccatcaccgtggtgagcgcccagggcctgcaggccaaggacaagaccggcagcagcgacccctacgtgaccgtgcaggtgggcaagaacaagagaagaaccaagaccatcttcggcaacctgaaccccgtgtgggacgagaagttctacttcgagtgccacaacagcaccgacagaatcaaggtgagagtgtgggacgaggacgacgacatcaagagcagagtgaagcagcacttcaagaaggagagcgacgacttcctgggccagaccatcgtggaggtgagaaccctgagcggcgagatggacgtgtggtacaacctggagaagagaaccgacaagagcgccgtgagcggcgccatcagactgaagatcaacgtggagatcaagggcgaggagaaggtggccccctaccacatccagtacacctgcctgcacgagaacctgttccactacctgaccgaggtgaagagcaacggcggcgtgaagatccccgaggtgaagggcgacgaggcctggaaggtgttcttcgacgacgccagccaggagatcgtggacgagttcgccatgagatacggcatcgagagcatctaccaggccatgacccacttcagctgcctgagcagcaagtacatgtgccccggcgtgcccgccgtgatgagcaccctgctggccaacatcaacgccttctacgcccacaccaccgtgagcaccaacatccaggtgagcgccagcgacagattcgccgccaccaacttcggcagagagaagttcatcaagctgctggaccagctgcacaacagcctgagaatcgacctgagcaagtacagagagaacttccccgccagcaacaccgagagactgcaggacctgaagagcaccgtggacctgctgaccagcatcaccttcttcagaatgaaggtgctggagctgcagagcccccccaaggccagcatggtggtgaaggactgcgtgagagcctgcctggacagcacctacaagtacatcttcgacaactgccacgagctgtacagccagctgaccgaccccagcaagaagcaggacatccccagagaggaccagggccccaccaccaagaacctggacttctggccccagctgatcaccctgatggtgaccatcatcgacgaggacaagaccgcctacacccccgtgctgaaccagttcccccaggagctgaacatgggcaagatcagcgccgagatcatgtggaccctgttcgccctggacatgaagtacgccctggaggagcacgagaaccagagactgtgcaagagcaccgactacatgaacctgcacttcaaggtgaagtggttctacaacgagtacgtgagagagctgcccgccttcaaggacgccgtgcccgagtacagcctgtggttcgagcccttcgtgatgcagtggctggacgagaacgaggacgtgagcatggagttcctgcacggcgccctgggcagagacaagaaggacggcttccagcagaccagcgagcacgccctgttcagctgcagcgtggtggacgtgttcgcccagctgaaccagagcttcgagatcatcaagaagctggagtgccccaaccccgaggccctgagccacctgatgagaagattcgccaagaccatcaacaaggtgctgctgcagtacgccgccatcgtgagcagcgacttcagcagccactgcgacaaggagaacgtgccctgcatcctgatgaacaacatccagcagctgagagtgcagctggagaagatgttcgagagcatgggcggcaaggagctggacagcgaggccagcaccatcctgaaggagctgcaggtgaagctgagcggcgtgctggacgagctgagcgtgacctacggcgagagcttccaggtgatcatcgaggagtgcatcaagcagatgagcttcgagctgaaccagatgagagccaacggcaacaccaccagcaacaagaacagcgccgccatggacgccgagatcgtgctgagaagcctgatggacttcctggacaagaccctgagcctgagcgccaagatctgcgagaagaccgtgctgaagagagtgctgaaggagctgtggaagctggtgctgaacaagatcgagaagcagatcgtgctgccccccctgaccgaccagaccggcccccagatgatcttcatcgccgccaaggacctgggccagctgagcaagctgaaggagcacatgatcagagaggacgccagaggcctgacccccagacagtgcgccatcatggaggtggtgctggccaccatcaagcagtacttccacgccggcggcaacggcctgaagaagaacttcctggagaagagccccgacctgcagagcctgagatacgccctgagcctgtacacccagaccaccgacgccctgatcaagaagttcatcgacacccagaccagccagagcagaagcagcaaggacgccgtgggccagatcagcgtgcacgtggacatcaccgccacccccggcaccggcgaccacaaggtgaccgtgaaggtgatcgccatcaacgacctgaactggcagaccaccgccatgttcagacccttcgtggaggtgtgcatcctgggccccaacctgggcgacaagaagagaaagcagggcaccaagaccaagagcaacacctggagccccaagtacaacgagaccttccagttcatcctgggcaaggagaacagacccggcgcctacgagctgcacctgagcgtgaaggactactgcttcgccagagaggacagaatcatcggcatgaccgtgatccagctgcagaacatcgccgagaagggcagctacggcgcctggtaccccctgctgaagaacatcagcatggacgagaccggcctgaccatcctgagaatcctgagccagagaaccagcgacgacgtggccaaggagttcgtgagactgaagagcgagaccagaagcaccgaggagagcgcctag

SEQ ID NO: 36922 - DNA, 6645 bp, Artificial Sequence
  derived and/or modified sequence
atggtggctaacttctttaaatctctgatactgccatacattcacaaactctgtaaagggatgttcaccaagaaacttggaaacacaaacaagaacaaggagtataggcagcagaagaaggaccaggacttccccacggctggccagacaaaatcgcctaaattctcctacacattcaaatcgaccgtcaaaaaaatcgcgaaatgctccagtacacacaaccttagtaccgaggaggacgaggcaagcaaagagtttagcctgtcacctactttctcttatagagtagctatcgctaacggattacagaagaacgccaaagtaactaacagcgacaacgaagatttacttcaggaactttccagcattgaaagcagctacagcgaatccctcaatgaactgaggtcatccacagaaaatcaggctcagtcaactcatactatgccagtcaggcggaaccggaaatctagttccagccttgctcctagtgaaggatcctctgacggagaaaggacgctgcacggactgaagctcggagccttgcgaaaactcaggaaatggaagaaatctcaggaatgcgtcagctccgattctgaattaagcaccatgaaaaagtcatggggcatacgaagcaagagcctcgatcgcactgttagaaaccctaaaacaaatgccttggagcccggcttctcctcttccgggtgcatcagtcagacacatgatgtaatggaaatgatttttaaggaattgcaaggaattagccaaatcgaaaccgagctctcagagctgaggggtcacgtcaatgcactcaaacattcgattgacgagatctcgagcagcgttgaggtggtgcagagcgaaatcgagcagctccggaccggcttcgtgcagagccgacgggaaacacgcgacatacacgattacattaaacatctgggacatatgggctctaaagcgtccctgaggtttttgaacgtaactgaagagcggttcgagtatgtcgagagcgtcgtgtaccagattctgatcgataaaatgggattttcggacgctcctaatgccattaaaatagagttcgcgcagcggattggacatcagcgggattgccccaatgctaaaccaaggccgattcttgtgtactttgaaacgcctcagcaaagggacagtgtcctgaaaaagtcttacaagctgaaaggcaccgggatcggcataagtaccgacattttgactcacgatatacgagaaaggaaggagaagggtattccgagttcccagacctacgaaagcatggcgattaagctcagtacccccgaaccaaagatcaaaaagaataactggcagtctcccgatgattctgacgaggatctcgagtcagacctgaaccgcaatagctacgccgtcctttctaagtctgagctactcacaaaggggagcacgagcaagccaagttccaagagtcatagcgctaggtccaaaaataagacagcgaactcatctcgcatctcaaacaagagcgactacgataaaatcagcagtcaacttcctgaatccgacatcttggagaagcagacaacaactcattacgcggatgctacgcccctatggcattctcaaagcgacttttttacagctaagctgagccggagcgagagcgattttagcaagctgtgccaatcatactccgaggacttcagtgaaaaccaattcttcacccggacgaacggcagctcactcctgtcctctagtgatagagagttatggcagaggaaacaggaggggactgccactctgtatgattcacccaaagaccagcacctgaatgggggggtccaggggatacagggccaaaccgagactgagaataccgaaacagttgattccggaatgagtaacggcatggtgtgcgcatctggcgacaggagccactacagcgacagccagttatcattgcatgaagatctgagcccatggaaggagtggaaccagggagccgaccttggcctggactccagtacgcaggagggctttgactacgaaacaaattctttgttcgaccaacagctggacgtttacaacaaggacctcgagtacctgggcaagtgccactcagatctgcaggacgactcagagtcctacgatctgacccaggacgacaactcctccccttgccctggcctcgataatgaaccccagggccagtgggtggggcagtacgattcttaccaaggggccaatagtaacgagctctatcagaatcagaatcagcttagcatgatgtaccgctcccagtcagagctccagtcggacgacagtgaggacgcaccccctaagagttggcactcaaggctgtccattgacctttccgacaaaaccttctcctttcctaaattcgggagtactttacagagagcaaaatctgccttggaggttgtgtggaacaagtcaacacagtcactctctgggtacgaagatagcggcagctctcttatggggcggtttagaaccctgtcacagtctactgccaacgagtcaagtacaacgctggattccgacgtctatacggagccttattattataaagcagaagacgaggaggactatacagaacctgtggctgataatgaaactgactacgtggaggttatggaacaggtcctagccaagctggagaacaggacaagtatcactgagacagacgagcagatgcaagcatacgatcatctcagttacgagaccccctatgaaactccacaggatgagggttacgatggaccagcagatgatatggtgtctgaagagggactggagcccctgaacgagacctccgccgaaatggaaatcagggaggacgagaatcaaaatatacctgaacagccggttgagattaccaagccgaaacgcattcggcccagcttcaaggaggcagcactacgcgcatacaaaaaacaaatggctgagcttgaagagaaaatcctcgctggcgattcatcatctgtggacgagaaggcaagaatagtgagtggcaatgatctagacgcctccaagttctccgctctacaggtctgtgggggggcagggggcgggctgtatggtatagatagcatgccagacctgagaagaaagaagactctgccaattgtgagagacgtggccatgactctcgcagctcgaaagagcggactatccctggccatggtgattcggacatccctgaacaatgaagagttgaagatgcatgttttcaagaagactctgcaggcactgatttacccaatgtctagtaccattccgcataattttgaggtttggacagctactacccctacctactgttatgagtgtgaagggctgctctggggtatcgccaggcaggggatgaagtgcctcgaatgcggcgtaaagtgccacgagaaatgccaagacttacttaacgcagattgcttacagagagccgctgagaagtcatccaaacacggagcagaagacaaaacgcaaacaataattactgctatgaaggagagaatgaagattagggagaaaaatagaccagaggtcttcgaggtcatccaggaaatgtttcagatctcaaaagaggatttcgtgcagttcacaaaggccgctaaacaatcagtactagacggaactagcaaatggagtgcaaagattacaattaccgtggtgagtgcccagggcctccaggcaaaagataagactggcagcagcgacccttacgtcactgtgcaggtggggaaaaacaagagaaggaccaagacaatttttggcaatctgaaccctgtctgggatgaaaagttctactttgagtgtcacaactccaccgaccggattaaagtccgggtgtgggacgaggacgatgatattaaatcccgagtcaaacaacacttcaagaaggaaagcgatgactttttgggccagacgattgtggaagtgcgcacactctccggtgaaatggatgtctggtacaatctcgagaaacgaactgacaaatctgcggtgtctggagccatacgtctcaagattaacgtcgagataaaaggagaggagaaagtcgcaccttaccacatacaatatacttgcctgcatgaaaacctctttcactacctgactgaggtgaaatccaatggtggggtcaagatccctgaagtgaaaggtgatgaagcatggaaggtgttttttgacgatgccagccaagagatcgtggacgaattcgccatgagatacggaattgagtctatataccaggccatgacacacttctcttgtttatcctcaaaatatatgtgccccggggtgccagctgtgatgagtactctactggccaacattaacgccttctacgctcatacaacggtgagcaccaatattcaggtgagcgcttcagatcgctttgccgccaccaattttggtcgggagaagtttatcaagctcctggatcagctgcacaatagtctacggatagacttaagcaaatatagagagaatttccctgccagtaataccgagaggttgcaggacttaaagtccactgtggatttattgacaagcataaccttcttcaggatgaaggtcttggaactccagagcccacctaaggcatctatggttgtgaaggattgcgttcgggcgtgtcttgacagtacatataagtacatatttgacaattgtcatgagctgtactcacaactgaccgatccatccaaaaagcaagacatcccccgcgaggatcaggggccgaccacaaaaaacttggacttctggccacagctgatcacactcatggtcaccatcatcgacgaagataagaccgcgtatactccagtcttaaaccaattcccacaggagcttaatatggggaaaatttccgctgaaatcatgtggactctgttcgccctggacatgaaatacgcactggaagagcatgagaaccagcggttgtgtaagtccaccgattatatgaatttgcacttcaaagtcaagtggttttacaacgagtacgtacgcgagctgccagcatttaaggatgccgtgcctgaatactcactgtggtttgagccctttgtgatgcaatggttggacgagaatgaagatgtgtcaatggaatttctgcatggtgcattgggcagagataagaaggatgggttccaacagacgagtgagcatgccctgttttcatgcagcgtcgtggatgtctttgctcagctcaatcagtcattcgaaataatcaaaaaattagagtgcccaaatcccgaagccctatcccacctgatgagacgatttgccaaaaccattaacaaggtgctcttgcagtatgctgccatcgttagctcagacttcagttcacactgcgataaggaaaatgtcccttgtatcctcatgaacaacattcagcagctcagagtacagcttgagaagatgtttgaatcgatgggcgggaaggagttggattcggaagcaagcaccattttgaaagaattacaagtcaagctcagtggagtgctcgatgaactgtccgtaacatatggtgagtcatttcaggtgatcatcgaggaatgtatcaagcagatgtcgttcgagctgaatcagatgagggcgaacggaaacactacaagtaacaagaactccgccgctatggatgccgagatcgtgcttaggtcgctgatggactttctggacaaaacactaagcctttcagccaagatctgtgagaagacggtgctgaaaagagtgcttaaggagctgtggaagctagttcttaataagatcgagaagcagattgtcttaccgcccctcacagatcagacaggcccacagatgatatttattgctgccaaagacctcggccagttgtcaaaattgaaagagcacatgattcgcgaggacgcccgcggcctcacgcctcggcagtgtgctataatggaagtcgttctggcaactattaagcagtattttcacgctggcggcaatggcctcaagaagaattttcttgagaagtctcccgatctacagagtctgcggtacgccctgtccctgtacacgcagacaacagacgccctcatcaaaaagttcatagatactcaaacatctcagagccgcagcagtaaggatgccgtgggacaaatttcagttcacgttgacatcacggccactcccggaacaggcgaccacaaggtgactgttaaagtcatcgcaatcaatgacttaaactggcagacaactgcaatgtttagacccttcgtcgaagtgtgcattttaggtccaaacctgggtgataagaaaaggaagcagggaaccaagacaaagtccaatacgtggtccccgaaatataacgagacttttcaattcatcttgggcaaggagaaccggccaggtgcatatgaactgcacctttcggtaaaggactattgtttcgcaagggaagataggatcatcggcatgacagtcattcagctgcagaacatcgccgagaaggggtcttatggtgcctggtatccacttcttaagaacattagtatggacgagaccggcctaaccattctgaggatattaagccaacgaacaagtgacgatgtggctaaagagtttgtccgcctaaagtctgaaactcgttccacagaagaaagcgcatag

SEQ ID NO: 36923 - DNA, 6639 bp, Artificial Sequence
  derived and/or modified sequence
atggtggcgaattttttcaaatccttaattctaccatatatccacaaactttgcaaaggaatgttcacgaagaagctcgggaacactaacaagaacaaagagtaccgccagcagaaaaaagatcaggattttcctacagcaggacagacgaaaagccccaagttctcgtacactttcaagtctaccgtgaaaaagattgctaaatgcagcagcacacacaacctaagcaccgaagaggacgaggcctctaaagaattcagtctttctcccaccttcagctacagggtggctatcgctaacggtcttcaaaagaacgctaaagttaccaacagcgataatgaggatctgctccaggagctatcaagcattgaatcttcatactccgaatcccttaatgaactgcggtctagcaccgaaaatcaagctcagtcgactcacactatgcctgtaaggagaaaccgaaaatcctcctcatcgcttgcacccagcgaggggagttctgatggcgaaaggacgctccacggacttaagctcggtgccctgcggaaattgcgcaagtggaagaagagtcaggagtgcgtatcgtctgatagcgagctgtccaccatgaaaaaaagctggggaatccgttctaaatctctggaccgtaccgtcaggaacccgaagaccaacgcgctggaacccggcttttcatcctccgggtgtatctcacagacacatgatgttatggaaatgatctttaaagagctgcagggcataagtcagatagagaccgagctatcagaactcaggggccatgttaacgcactcaagcactctatagacgagatttcctctagcgtggaggtcgtgcagagcgagatcgaacagttgaggacaggttttgtgcagtcgcgaagagaaactcgtgatattcacgattacatcaaacatcttgggcacatggggagtaaggcctcgttacggtttcttaacgtcacggaagagagatttgagtatgtcgagtccgtagtttatcaaatcctcatcgacaagatgggcttctctgacgccccaaacgcaattaagatcgaattcgcccagcgtattgggcatcagcgcgattgtcctaatgccaaaccacggcctatcttagtgtatttcgaaactccccaacagcgcgatagcgtgcttaagaaatcttataagcttaaagggacgggcatcggaatatcaactgatattttgacccacgatatcagggagagaaaggagaagggcattccaagctcccaaacatacgaatccatggctattaaactgtctacgccagagcctaaaattaaaaagaacaattggcagagccccgatgattctgacgaggatctggaatccgatctaaacagaaactcttacgctgtcctttcgaaatccgagctgctcacaaaaggatctacgtccaaaccctcctccaaaagtcattccgcacgttccaagaacaagacagccaactccagccgtatttctaacaagtccgattatgataagatctcatcccagctgccagagagtgacattcttgaaaaacaaaccaccacacactacgcggatgcgactcctctgtggcatagtcagtccgacttcttcaccgctaagctatctcgctctgagtcggacttctctaaactttgccagagctactctgaagacttctcagaaaatcagttcttcacacgtactaatgggtcaagtctgcttagtagtagcgaccgagaactgtggcaacggaagcaagaggggaccgccactctctacgactcaccaaaagatcaacacctgaatggaggcgttcagggcatacagggtcagactgaaaccgaaaatactgaaactgtcgattcaggtatgtccaatggaatggtttgcgccagcggagatcggtcccactactccgattcacaactctcactgcatgaagatctatcaccttggaaggaatggaatcaaggggccgacttgggactggacagctctacacaggagggtttcgactacgagacaaatagtctatttgaccaacagttggatgtgtataacaaagatctcgaatatctgggaaaatgccacagtgatctgcaagatgacagtgagtcatatgatcttacccaagatgataactccagcccctgtccaggactcgacaatgaaccacagggtcagtgggtggggcagtatgatagttatcaaggcgcaaacagcaatgagctctatcagaaccagaatcagttgtcgatgatgtaccgatctcagagtgaactgcagagcgacgactcggaagatgcgccgcccaagtcatggcattctcggctgtctatagacttatccgataaaaccttttctttccccaagttcggcagcacgcttcagagggcaaaatcagccctcgaggtggtctggaacaaatctacccagtccctatcaggatacgaagactcaggctcaagtctgatgggccggtttagaactctgtctcagagcactgctaacgagtcctcaaccaccttggattccgatgtttatacggaaccatactactacaaggcagaggatgaggaggactacaccgagcccgtcgctgacaatgagaccgactatgtcgaagtgatggagcaggtcttagcgaaactggaaaaccggacttcaattaccgagacagacgagcagatgcaggcttacgatcacttatcttacgaaaccccttatgaaacaccacaggacgaggggtacgacggaccagctgatgacatggtttcagaagaaggattagagcctctgaacgagacatctgccgagatggagattcgtgaggatgagaaccagaatattccagaacaacctgttgagatcaccaagcccaagcgcatacgtccttcttttaaggaggccgccctgagggcctacaaaaaacaaatggccgagctcgaagagaagatcctcgcaggagactccagctccgtggatgaaaaggctaggattgtctctgggaacgatcttgacgcctcgaaattcagtgcattacaggtctgcgggggcgctggaggggggctctacggcatagattccatgcccgatctgagacgaaaaaaaacgcttcccattgtgcgcgatgtcaccctagcagccaggaagagcggactgtccctggccatggttattagaacctctctgaataatgaggagctcaaaatgcacgtgttcaagaaaaccttacaggccctgatttatccaatgtcatccaccataccacataactttgaggtgtggaccgctaccacccccacttactgctacgaatgtgagggcttgttgtggggtattgcccgtcagggtatgaagtgccttgagtgtggtgtgaaatgtcacgaaaagtgccaagaccttctgaacgccgactgcttgcagcgagctgctgaaaagagctctaaacatggagcggaagacaagacccagaccatcatcacggccatgaaggagcgcatgaagatcagagagaagaaccggccggaggtcttcgaggtgatacaagaaatgtttcagatctctaaagaggactttgtgcagtttaccaaagcagccaagcagagcgtgttagacggcacgagtaaatggtccgctaagatcaccatcaccgtcgtgtctgcccaaggtctgcaggctaaggacaaaaccggctcctcagacccttacgtgaccgttcaggtggggaagaataagcggcgtactaaaacaatcttcggcaatctcaatcccgtgtgggacgagaagttttatttcgaatgtcataattccactgataggattaaagtgagagtctgggatgaggacgacgacatcaagtccagggtaaaacaacatttcaagaaagagtccgatgacttcctgggacagaccattgtggaggttaggacccttagcggcgaaatggatgtatggtacaatcttgaaaaacgcaccgataagagcgccgtttctggggccatccgcctgaaaatcaatgtcgagatcaaaggggaggaaaaagttgccccttaccacatccaatatacttgcctccacgaaaatctgttccactatctgacagaagttaagagtaatggaggggttaagattccggaggttaaaggtgatgaggcctggaaagtgttttttgacgacgcatctcaggagattgtagatgagtttgctatgaggtatggcattgaatcgatctatcaggccatgacccatttcagttgcttatccagcaaatacatgtgcccaggagttcctgccgtcatgtcaacattattagctaatatcaatgccttctacgcccacaccactgtgagcactaacattcaggtgagcgcctccgaccggttcgctgctacaaacttcgggagggagaaattcataaagctgctggaccagctgcacaactctttacgaatcgatctctctaagtaccgggagaacttcccagccagcaacaccgagagactccaggacttaaaatctactgtggaccttctaacaagcattacgtttttccgcatgaaggtgctggagctgcagtcacctcctaaggcctcaatggtggtaaaagattgcgtccgggcctgtctggattccacttataagtacatctttgataattgtcacgaactgtactctcaacttacagatccttctaagaagcaggatattccaagggaggatcagggtcctacaaccaagaatcttgatttctggccccagctgatcacactgatggttacaatcatcgatgaggacaaaacagcttacactcccgtcctgaatcaattcccccaagaactaaacatgggaaagatctccgccgaaataatgtggacgttgttcgccctagacatgaagtacgccctggaggagcacgaaaaccagagattgtgcaagtcaaccgattacatgaatcttcacttcaaagtgaagtggttctataacgagtatgtaagggagttgccagcctttaaggatgcagtgccagaatacagcttgtggtttgagcccttcgtgatgcagtggttggacgagaacgaggacgtgtcaatggagttcctccacggagcccttggtcgagacaagaaggacgggttccagcaaaccagtgaacacgctctttttagctgtagtgtggtcgatgtgttcgcccagctaaatcaaagcttcgaaatcattaagaaactcgagtgtcctaacccagaggctctgagccacttaatgagaagatttgccaagacgattaacaaggtccttctgcaatacgcagctattgttagctctgatttcagcagtcactgtgataaggagaacgtcccttgtatactcatgaacaatatccagcagctccgtgtgcagctggagaaaatgttcgagtctatgggcggaaaagagcttgatagcgaggctagcacaatcttgaaagaactgcaggtgaagctaagcggggtcctggacgagctatccgtgacctatggagagtcgttccaagttattatcgaagaatgcattaaacaaatgtcttttgagctcaatcagatgcgcgctaacggcaacacgacttcaaataaaaactccgccgccatggacgctgaaatcgtgcttaggagcttaatggacttcctggataagactctgtccctaagtgcgaagatatgtgagaaaaccgtgctcaagagggtgctcaaggagctgtggaagctggtgctgaacaagattgaaaagcagatcgtcctgcctcctttgaccgaccaaacgggcccccaaatgattttcatagctgccaaggatctggggcagctgagtaagctgaaggaacacatgatccgcgaggatgccagagggctaaccccaagacagtgcgctatcatggaggtcgtgctcgccaccatcaagcagtattttcacgccggagggaatggacttaagaagaatttccttgaaaagtcacccgacctgcagtccctgcggtacgccttgagtctatacacacagactactgatgccctgatcaaaaagttcatcgatacccagacttcacagagtcgctccagcaaggacgccgtcggacagatctctgtacatgttgatatcactgccacacccggaaccggtgatcataaggttactgtaaaggtgatcgcaatcaacgacctcaactggcaaactacggctatgttccgcccgttcgtggaagtgtgcatacttgggcccaacctgggagacaagaaacgcaagcaggggacgaagacgaagtctaacacttggtcacctaagtacaatgaaacattccagttcatccttggtaaggaaaacaggccgggagcctacgaactccacctgtccgtcaaggactattgtttcgccagagaggacaggatcattggcatgaccgtgatacagctgcagaatattgcagagaaaggtagctacggggcctggtaccctctgctaaaaaatatctccatggatgagaccggtttgacaatcctccgcattcttagccagaggactagcgatgatgtggcaaaggagtttgttaggcttaaatcggagactcgctctacagaggagagcgcctag

SEQ ID NO: 36924 - DNA, 6645 bp, Artificial Sequence
  derived and/or modified sequence
atggtagctaatttcttcaaaagtcttattctgccctacattcacaaattgtgtaagggaatgttcaccaaaaagctgggtaataccaataagaacaaagaatacagacaacaaaaaaaggatcaggactttccaacagccggtcaaactaagtcgcccaaattttcgtatacgtttaaaagtactgtcaagaaaattgctaagtgtagctctacacataacctgtcaaccgaagaagacgaagctagcaaggagttctctctctcccccaccttctcataccgagttgctattgctaacggactgcagaagaacgccaaggtgaccaattctgacaacgaggatttactccaggagctgtcgtcgattgaatcctcgtacagtgaaagtctgaatgagctgcggagctctacggagaaccaggcacagtctactcacaccatgcctgtgagacgtaaccgcaagtcaagctcctctctggcgccaagtgagggttcatctgatggggagaggacactgcatggcctgaagctgggcgctttgcgaaagctgcggaaatggaagaagtcccaagaatgcgtctcctcggatagcgaattgtctactatgaaaaagtcttgggggataaggtcaaagagcctggatagaaccgtacgcaatccgaaaacgaacgcccttgagcccggattctcctctagcggctgcatctcacagactcacgatgtgatggagatgatcttcaaagagttacaaggcatctcacaaatagagacagagctctccgaactacgagggcacgtcaacgcactgaagcactccatagatgaaatcagcagctcagtggaggtggtccagagcgaaatagagcaactgagaactgggttcgtgcagtctaggagggagacccgagatatccatgactatattaaacatctgggccatatggggtcaaaggcatcgctgaggttccttaacgtgacagaggaacgattcgagtatgtggagagcgtagtctatcaaattttgatagacaaaatgggtttttcagacgcccctaatgccataaaaatagaattcgctcagaggatcgggcaccagcgcgactgtcccaacgccaaacctcgcccaatactcgtgtactttgaaaccccacagcaacgtgatagtgtcctgaagaagagctataagttaaagggaaccggtatcggcattagtacagatatcttaacccacgatatccgcgaacgcaaggagaagggcatcccttcctctcaaacatacgagtcaatggcaattaaattgagtaccccagagccaaagataaagaagaataactggcagagccccgacgacagcgacgaggacctggaatctgacttaaaccgcaacagttacgcagtcctgtccaagagtgagctgctgacaaagggaagcactagtaagccgtcaagcaagtctcactcagccaggtctaaaaataagaccgctaacagctccagaataagcaacaagtccgattacgataagattagctcgcaacttcccgaaagtgacatcttggagaaacagacaacaacccactacgcagacgccactccactttggcactcccaatcagactttttcacggccaagttatctagatctgagtctgatttctctaaactgtgccaaagttatagcgaggatttttctgaaaatcagttctttacccggacgaacggaagttctcttctgagctcgtcggaccgggaactgtggcaaaggaagcaggagggcacagcaacgttgtatgatagtcccaaagatcagcacttgaacggaggggtgcaggggattcaagggcagacagagacagagaacactgagacggtggatagtggaatgtcaaatggtatggtgtgtgcttccggggacagatcccattactctgattctcagctgtcactacacgaagacctgtccccgtggaaggagtggaatcagggagcagacctgggcctagatagttcaacccaggaagggtttgactatgaaacaaacagcctctttgatcaacagctagacgtctacaataaagatctggagtatctaggcaaatgccatagtgacttgcaggacgatagcgagtcctatgacctgacccaggacgataactctagtccctgtccgggtctcgacaacgagccccaaggacagtgggtggggcagtatgacagctaccaaggtgccaatagtaatgaactctaccagaaccagaaccagctctccatgatgtacaggtctcagtcggagttacagtcagatgatagcgaagacgctcccccaaagtcatggcactcccgcctttcaattgacctctccgacaaaacctttagctttccaaagttcgggtcaaccctgcagagagctaaatctgccctagaagttgtgtggaacaagagtacgcagtctctttctggatatgaagacagcggatcaagcctgatggggcgcttccggacactttcacagtctacagccaatgagtcctccactactctggatagcgatgtatatactgaaccctactattacaaagcagaggatgaagaggactatacagaacccgtcgccgataacgagaccgactacgtggaggtgatggagcaggtgctagccaagctcgagaaccgtacgagtattactgagactgacgagcagatgcaggcatatgatcacctgtcctacgaaacaccttatgaaaccccgcaggacgaaggatacgacggtccagcagatgacatggtcagtgaggaagggctggagcctctgaatgaaacatctgctgaaatggaaattcgggaggacgaaaatcagaatattcccgagcaacctgtggagattactaaacccaagcgcattagacctagctttaaagaggcagccctacgcgcttacaaaaagcagatggctgaactcgaagagaaaatcctggctggcgtctcactcgacgtagatctggaggctcgcatcgtgtctggaaacgacctggacgctagcaagttctccgcccttcaggtgtgcggtggcgccgggggtggactttatggcatcgattctatgcctgacttgcggcggaagaaaaccttgcctattgttcgagacgtcctactaaccctggctgcccgaaagtctggattatcattggccatggtaattaggacttcactgaataacgaggagttaaaaatgcacgtgttcaagaaaacactgcaggcgctgatctaccctatgagctccaccataccgcataactttgaggtctggactgccaccacccccacgtactgctacgaatgcgaaggcctgctttggggcattgcccgccaaggaatgaagtgcttagaatgtggcgttaaatgccacgagaaatgtcaagacctgctgaatgcggattgtttgcagagagcagccgagaaaagttccaagcatggggcagaagataaaacacaaactatcataactgcaatgaaggagcgtatgaaaattcgggaaaagaaccgccccgaagtctttgaagtcattcaggagatgttccagataagcaaggaggattttgtgcagtttacgaaggccgctaaacagagtgtgctggacggtacctccaaatggtctgccaaaataacgatcacagtcgtctctgcgcagggcttgcaggcaaaagacaagacaggcagttccgacccatatgtcaccgtgcaggtaggtaagaataagcggcggacaaaaaccatctttggtaatctgaatcccgtgtgggatgagaaattctacttcgaatgtcataactcaaccgacagaatcaaagtcagggtgtgggacgaggacgacgacattaaaagcagagtcaaacagcacttcaagaaggaaagcgatgattttctcggtcagaccatcgtggaagttcggacactcagtggggagatggatgtgtggtacaacctcgagaagcggactgacaagtctgccgtcagtggtgcgatccggttgaagatcaacgtggagattaaaggagaggagaaggtagccccctatcatattcaatatacctgcctgcatgagaatcttttccattatctaacagaggtgaagagcaatggaggggttaaaattccagaggtgaagggggacgaggcctggaaggtgttcttcgacgacgcatcccaagaaatcgtcgacgagtttgccatgaggtatgggatagagtctatttatcaggcaatgacgcacttttcctgccttagcagtaaatacatgtgccccggcgtgcccgccgtcatgtcgaccttactcgcaaacattaatgcattttatgcacatactaccgtcagcactaatatccaggtcagcgcatctgatcgcttcgctgcaacaaactttggcagggagaagttcatcaaactcctggatcagctgcacaatagtctgaggattgatctttcgaaatacagggaaaactttcctgccagcaataccgagcgcctccaggatctgaagtccactgtggacttgttgacttccatcactttctttagaatgaaagttctggagctacagagccctcctaaggcctcgatggtggtgaaggactgtgttcgcgcgtgcctggattctacctataagtacatctttgacaactgccacgagctctacagtcagctgactgatccatccaagaagcaggacatcccacgagaggaccaaggaccaacaactaagaatttagacttttggccacaacttatcaccctgatggttacgatcattgacgaggataagacagcttacactccagtcctcaatcaattcccgcaggaattgaatatgggtaaaatatctgccgagattatgtggactctctttgcattagatatgaaatatgccctggaggaacatgagaaccagcggttatgcaagagcacagattacatgaacttgcatttcaaagtgaagtggttttacaacgagtatgtgagagagctgccagcatttaaagacgcagtcccggagtatagcctctggtttgagccattcgtgatgcagtggcttgacgagaatgaggatgtgtctatggagttcctgcacggagccctcggccgtgataagaaggatggatttcaacagacgtccgaacacgctctgttctcatgcagcgtggtggacgtgtttgcacagctgaaccagtcttttgaaattattaagaaactcgaatgtccaaaccccgaggccctgtctcatctaatgaggaggtttgcgaaaacgataaacaaggtgctcctgcaatacgccgccattgtatccagtgatttttcctctcactgcgataaagagaatgttccttgcatcttgatgaacaatatccaacagctgcgtgtgcagttggagaaaatgttcgagagtatgggtgggaaggagctggactcagaagccagcactatcctgaaggagctgcaggtcaaactcagcggagttctcgatgaattgagcgtgacctatggcgaatcctttcaggtgattattgaggagtgcataaagcagatgtcctttgaactgaatcaaatgcgcgccaacggcaatacaacaagcaataagaattccgccgcaatggatgccgagatcgtgctccggagcctcatggattttttagacaagacgttgtccctatccgctaagatctgcgagaagactgtgctgaaacgagtgctgaaggaactttggaagcttgtcctaaacaagatcgagaaacagatcgtcctgcctcctcttacggatcaaaccggacctcagatgattttcattgctgccaaagatctggggcaattaagcaaacttaaagagcatatgatcagggaagacgcacgcggcctaacaccaaggcagtgcgccatcatggaggtggtcctggcgaccattaagcagtattttcatgccggaggtaatggactaaaaaaaaattttctcgagaagtcccccgacttgcaaagtctaaggtacgccctgtccttgtatacccaaacgaccgatgccctcatcaagaagtttatcgatacccagacttcccaatcacggagcagcaaagatgcagttggccaaattagcgtgcacgttgacataactgctactcctggaaccggagatcataaggtgaccgtcaaggtcatcgccatcaacgacctcaactggcagaccacagccatgttcagaccattcgtggaagtgtgcatcttgggcccaaaccttggggataagaagaggaagcagggtacgaaaacgaaaagtaatacctggtcaccaaaatataacgagacattccagttcatcctaggaaaagaaaaccgtcccggcgcctacgagttgcatcttagtgtaaaggattactgcttcgcccgcgaagatcgcatcatcgggatgacagttatacagctgcagaacatagccgagaaaggatcctacggcgcctggtacccccttctgaaaaacatctccatggatgaaaccggacttacaattcttcggatactgagccagcggacttcagatgatgtggccaaggagttcgtgcgactgaagagtgaaactcggtctacagaagaaagtgcttag

SEQ ID NO: 36925 - DNA, 6645 bp, Artificial Sequence
  derived and/or modified sequence
atggtggccaacttcttcaagagcctcatcctgccctacatccacaagctgtgcaagggcatgttcaccaagaagctgggcaacaccaacaagaacaaggagtaccggcagcagaagaaggaccaggacttccccacagctggccagaccaagagccccaagttctcctacaccttcaagagcacagtgaagaagatcgccaagtgcagcagcacccacaacctgagcacagaagaagatgaggccagcaaggagttcagcctgagccccaccttctcctacagagtggccatcgccaacggcctgcagaagaatgccaaggtgaccaacagcgacaatgaagacctgctgcaggagctgagcagcattgagagcagctacagcgagagcctgaatgagctgcggagcagcacagagaaccaggcccagagcacccacaccatgcctgtgagaagaaacaggaagagcagcagcagcctggcccccagcgagggcagcagtgatggagagaggaccctgcacggcctgaagctgggcgccctgaggaagctgaggaagtggaagaagagccaggagtgtgtgtccagtgacagcgagctgagcaccatgaagaagtcctggggcatccgcagcaagagcctggacagaacagtgaggaaccccaagaccaatgccctggagcccggcttcagcagcagcggctgcatcagccagacccatgatgtgatggagatgatcttcaaggagctgcagggcatcagccagatcgagacagagctgtctgagctgcggggccacgtgaatgccctgaagcacagcattgatgagatcagcagctctgtggaggtggtgcagagcgagattgagcagctgaggactggatttgtgcagagcagaagagagacccgggacatccatgactacatcaagcacctgggccacatgggcagcaaggccagcctgcgcttcctgaatgtgacagaggagagatttgaatatgtggagagcgtggtgtaccagatcctgattgacaagatgggcttcagtgatgccccaaatgccatcaagattgaatttgcccagagaattggccaccagagggactgccccaatgccaagccccggcccatcctggtgtactttgagaccccccagcagagggacagcgtgctgaagaagagctacaagctgaagggcaccggcatcggcatcagcacagacatcctgacccatgacatccgggagaggaaggagaagggcatccccagcagccagacctatgaatccatggccatcaagctgagcaccccagagcccaagatcaagaagaacaactggcagagcccagatgacagtgatgaggacctggagagtgacctgaacagaaacagctatgctgtgctgagcaagtctgagctgctgaccaagggcagcaccagcaagcccagcagcaagagccacagcgcccggagcaagaacaagacagccaacagcagccgcatcagcaacaagagtgactatgacaagatcagcagccagctgcctgagagtgacatcctggagaagcagaccaccacccactatgcagatgccacccccctgtggcacagccagagcgacttcttcaccgccaagctgagccgctctgagagtgacttcagcaagctgtgccagagctacagcgaggacttcagcgagaaccagttcttcaccaggaccaacggcagcagcctgctgagcagcagtgaccgggagctgtggcagaggaagcaggagggcacagccaccctgtatgacagccccaaggaccagcacctgaatggaggagtgcagggcatccagggccagacagaaacagagaacacagagaccgtggacagcggcatgagcaatggcatggtgtgtgccagcggggacaggagccactacagcgacagccagctgagcctgcacgaggacctgagcccctggaaggagtggaaccagggcgctgacctgggcctggacagcagcacccaggagggctttgattatgagaccaacagcctgtttgaccagcagctggatgtgtacaacaaggacctggagtacctgggcaagtgccacagcgacctgcaggatgattctgagagctatgacctgacccaggatgacaacagcagcccctgccccggcctggacaatgagccccagggccagtgggtgggccagtatgacagctaccagggcgccaacagcaatgagctgtaccagaaccagaaccagctgtccatgatgtaccgcagccagagcgagctgcagagtgatgattctgaagatgccccacccaagtcctggcacagccggctgagcattgacctgagtgacaagaccttctccttccccaagtttggcagcaccctgcagagggccaagagcgccctggaggtggtgtggaacaagagcacccagagcctgagcggctatgaagattctggcagcagcctgatgggccgcttccgcaccctgagccagagcacagccaatgaaagcagcaccaccctggacagtgatgtgtacacagagccctactactacaaggccgaggatgaggaggactacacagagcctgtggccgacaatgaaacagattatgtggaggtgatggagcaggtgctggccaagctggagaacagaaccagcatcacagaaacagatgagcagatgcaggcctatgaccacctgtcctatgagaccccctatgagaccccccaggatgagggctatgatggccctgcagatgacatggtgtctgaggagggcctggagcccctgaatgagaccagcgctgagatggagatcagagaagatgagaaccagaacatccctgagcagcctgtggagatcaccaagcccaagaggatccggcccagcttcaaggaggccgccctgcgggcctacaagaagcagatggccgagctggaggagaagatcctggccggggacagcagctctgtggatgagaaggccagaattgtgtctggaaatgacctggatgccagcaagttcagcgccctgcaggtgtgtggcggggccggcggcggcctgtatggcatcgacagcatgccagacctgcggaggaagaagaccctgcccatcgtgagagatgtggccatgaccctggccgccaggaagagcggcctgagcctggccatggtgatccgcaccagcctgaacaatgaggagctgaagatgcacgtgttcaagaagaccctgcaggccctgatctaccccatgagcagcaccatcccccacaactttgaggtgtggacagccaccacccccacctactgctatgaatgtgagggcctgctgtggggcatcgcccggcagggcatgaagtgcctggagtgtggggtgaagtgccacgagaagtgccaggacctgctgaatgctgactgcctgcagagagctgctgagaagagcagcaagcacggggctgaggacaagacccagaccatcatcacagccatgaaggagaggatgaagatccgggagaagaacagacctgaggtgtttgaggtgatccaggagatgttccagatcagcaaggaggactttgtgcagttcaccaaggccgccaagcagagcgtgctggatggcaccagcaagtggagcgccaagatcaccatcaccgtggtgtctgcccagggcctgcaggccaaggacaagacaggcagcagtgacccctacgtgacagtgcaggtgggcaagaacaagaggaggaccaagaccatcttcggcaacctgaaccctgtgtgggatgagaagttctactttgagtgccacaacagcacagaccgcatcaaggtgcgggtgtgggatgaagatgatgacatcaagagccgggtgaagcagcacttcaagaaggagagtgatgacttcctgggccagaccatcgtggaggtgaggaccctgagcggggagatggatgtgtggtacaacctggagaagaggacagacaagtctgctgtgtctggggccatccggctgaagatcaacgtggagatcaagggggaggagaaggtggccccctaccacatccagtacacctgcctgcacgagaacctcttccactacctgacagaggtgaagagcaatggaggagtgaagatccctgaggtgaagggagatgaggcctggaaggtgttctttgatgatgccagccaggagatcgtggatgaatttgccatgagatatggaattgagagcatctaccaggccatgacccacttcagctgcctgagcagcaagtacatgtgccctggggtgcctgctgtgatgagcaccctgctggccaacatcaatgccttctacgcccacaccaccgtgtccaccaacatccaggtgtctgccagtgacagatttgctgccaccaactttggccgggagaagttcatcaagctgctggaccagctgcacaacagcctgagaattgacctgagcaagtaccgggagaacttccctgccagcaacacagagcggctgcaggacctgaagagcacagtggacctgctgaccagcatcaccttcttcaggatgaaggtgctggagctgcagagcccccccaaggcctccatggtggtgaaggactgtgtgcgggcctgcctggacagcacctacaagtacatctttgacaactgccacgagctgtacagccagctgacagaccccagcaagaagcaggacatcccccgggaggaccagggccccaccaccaagaacctggacttctggccccagctgatcaccctgatggtgaccatcattgatgaggacaagacagcctacacccctgtgctgaaccagttcccccaggagctgaacatgggcaagatctctgctgagatcatgtggaccctgtttgccctggacatgaagtatgccctggaggagcacgagaaccagaggctgtgcaagagcacagactacatgaacctgcacttcaaggtgaagtggttctacaatgaatatgtgcgggagctgcctgccttcaaggatgctgtgcctgagtacagcctgtggtttgagccctttgtgatgcagtggctggatgaaaatgaagatgtgtccatggagttcctgcatggagccctgggccgggacaagaaggatggcttccagcagaccagcgagcacgccctcttcagctgcagcgtggtggatgtgtttgcccagctgaaccagagctttgagatcatcaagaagctggagtgccccaaccctgaggccctgagccacctgatgagaagatttgccaagaccatcaacaaggtgctgctgcagtatgctgccatcgtgtccagtgacttcagcagccactgtgacaaggaaaatgtgccctgcatcctgatgaacaacatccagcagctgcgggtgcagctggagaagatgtttgagagcatgggcggcaaggagctggacagcgaggccagcaccatcctgaaggagctgcaggtgaagctgagcggcgtgctggatgagctgtctgtgacctacggggagagcttccaggtgatcatcgaggagtgcatcaagcagatgagctttgagctgaaccagatgagggccaatggaaacaccaccagcaacaagaacagcgctgccatggatgctgagatcgtgctgcggagcctgatggacttcctggacaagaccctgagcctgagcgccaagatctgtgagaagacagtgctgaagagggtgctgaaggagctgtggaagctggtgctgaacaagattgagaagcagatcgtgctgccccccctgacagaccagacaggcccccagatgatcttcatcgccgccaaggacctgggccagctgagcaagctgaaggagcacatgatcagagaagatgcccggggcctgaccccccggcagtgtgccatcatggaggtggtgctggccaccatcaagcagtacttccacgccggcggcaatggcctgaagaagaacttcctggagaagagcccagacctgcagagcctgcgctatgccctgagcctgtacacccagaccacagatgccctgatcaagaagttcatcgacacccagaccagccagagccgcagcagcaaggatgctgtgggccagatctctgtgcacgtggacatcacagccaccccaggcaccggggaccacaaggtgacagtgaaggtgattgccatcaatgacctgaactggcagaccacagccatgttccggccctttgtggaggtgtgcatcctgggccccaacctgggggacaagaagaggaagcagggcaccaagaccaagagcaacacctggagccccaagtacaatgagaccttccagttcatcctgggcaaggaaaatagacctggggcctatgagctgcacctgtctgtgaaggactactgctttgccagagaagatcgcatcatcggcatgaccgtcatccagctgcagaacattgctgagaagggcagctatggagcctggtaccccctgctgaagaacatctccatggatgagaccggcctgaccatcctgcgcatcctgagccagaggaccagtgatgatgtggccaaggagtttgtgcggctgaagtctgagaccaggagcacagaggagagcgcctag

SEQ ID NO: 36926 - DNA, 6639 bp, Artificial Sequence
  derived and/or modified sequence
atggtggccaacttcttcaagagcctcatcctgccctacatccacaagctgtgcaagggcatgttcaccaagaagctgggcaacaccaacaagaacaaggagtaccggcagcagaagaaggaccaggacttccccacagctggccagaccaagagccccaagttctcctacaccttcaagagcacagtgaagaagatcgccaagtgcagcagcacccacaacctgagcacagaagaagatgaggccagcaaggagttcagcctgagccccaccttctcctacagagtggccatcgccaacggcctgcagaagaatgccaaggtgaccaacagcgacaatgaagacctgctgcaggagctgagcagcattgagagcagctacagcgagagcctgaatgagctgcggagcagcacagagaaccaggcccagagcacccacaccatgcctgtgagaagaaacaggaagagcagcagcagcctggcccccagcgagggcagcagtgatggagagaggaccctgcacggcctgaagctgggcgccctgaggaagctgaggaagtggaagaagagccaggagtgtgtgtccagtgacagcgagctgagcaccatgaagaagtcctggggcatccgcagcaagagcctggacagaacagtgaggaaccccaagaccaatgccctggagcccggcttcagcagcagcggctgcatcagccagacccatgatgtgatggagatgatcttcaaggagctgcagggcatcagccagatcgagacagagctgtctgagctgcggggccacgtgaatgccctgaagcacagcattgatgagatcagcagctctgtggaggtggtgcagagcgagattgagcagctgaggactggatttgtgcagagcagaagagagacccgggacatccatgactacatcaagcacctgggccacatgggcagcaaggccagcctgcgcttcctgaatgtgacagaggagagatttgaatatgtggagagcgtggtgtaccagatcctgattgacaagatgggcttcagtgatgccccaaatgccatcaagattgaatttgcccagagaattggccaccagagggactgccccaatgccaagccccggcccatcctggtgtactttgagaccccccagcagagggacagcgtgctgaagaagagctacaagctgaagggcaccggcatcggcatcagcacagacatcctgacccatgacatccgggagaggaaggagaagggcatccccagcagccagacctatgaatccatggccatcaagctgagcaccccagagcccaagatcaagaagaacaactggcagagcccagatgacagtgatgaggacctggagagtgacctgaacagaaacagctatgctgtgctgagcaagtctgagctgctgaccaagggcagcaccagcaagcccagcagcaagagccacagcgcccggagcaagaacaagacagccaacagcagccgcatcagcaacaagagtgactatgacaagatcagcagccagctgcctgagagtgacatcctggagaagcagaccaccacccactatgcagatgccacccccctgtggcacagccagagcgacttcttcaccgccaagctgagccgctctgagagtgacttcagcaagctgtgccagagctacagcgaggacttcagcgagaaccagttcttcaccaggaccaacggcagcagcctgctgagcagcagtgaccgggagctgtggcagaggaagcaggagggcacagccaccctgtatgacagccccaaggaccagcacctgaatggaggagtgcagggcatccagggccagacagaaacagagaacacagagaccgtggacagcggcatgagcaatggcatggtgtgtgccagcggggacaggagccactacagcgacagccagctgagcctgcacgaggacctgagcccctggaaggagtggaaccagggcgctgacctgggcctggacagcagcacccaggagggctttgattatgagaccaacagcctgtttgaccagcagctggatgtgtacaacaaggacctggagtacctgggcaagtgccacagcgacctgcaggatgattctgagagctatgacctgacccaggatgacaacagcagcccctgccccggcctggacaatgagccccagggccagtgggtgggccagtatgacagctaccagggcgccaacagcaatgagctgtaccagaaccagaaccagctgtccatgatgtaccgcagccagagcgagctgcagagtgatgattctgaagatgccccacccaagtcctggcacagccggctgagcattgacctgagtgacaagaccttctccttccccaagtttggcagcaccctgcagagggccaagagcgccctggaggtggtgtggaacaagagcacccagagcctgagcggctatgaagattctggcagcagcctgatgggccgcttccgcaccctgagccagagcacagccaatgaaagcagcaccaccctggacagtgatgtgtacacagagccctactactacaaggccgaggatgaggaggactacacagagcctgtggccgacaatgaaacagattatgtggaggtgatggagcaggtgctggccaagctggagaacagaaccagcatcacagaaacagatgagcagatgcaggcctatgaccacctgtcctatgagaccccctatgagaccccccaggatgagggctatgatggccctgcagatgacatggtgtctgaggagggcctggagcccctgaatgagaccagcgctgagatggagatcagagaagatgagaaccagaacatccctgagcagcctgtggagatcaccaagcccaagaggatccggcccagcttcaaggaggccgccctgcgggcctacaagaagcagatggccgagctggaggagaagatcctggccggggacagcagctctgtggatgagaaggccagaattgtgtctggaaatgacctggatgccagcaagttcagcgccctgcaggtgtgtggcggggccggcggcggcctgtatggcatcgacagcatgccagacctgcggaggaagaagaccctgcccatcgtgagagatgtgaccctggccgccaggaagagcggcctgagcctggccatggtgatccgcaccagcctgaacaatgaggagctgaagatgcacgtgttcaagaagaccctgcaggccctgatctaccccatgagcagcaccatcccccacaactttgaggtgtggacagccaccacccccacctactgctatgaatgtgagggcctgctgtggggcatcgcccggcagggcatgaagtgcctggagtgtggggtgaagtgccacgagaagtgccaggacctgctgaatgctgactgcctgcagagagctgctgagaagagcagcaagcacggggctgaggacaagacccagaccatcatcacagccatgaaggagaggatgaagatccgggagaagaacagacctgaggtgtttgaggtgatccaggagatgttccagatcagcaaggaggactttgtgcagttcaccaaggccgccaagcagagcgtgctggatggcaccagcaagtggagcgccaagatcaccatcaccgtggtgtctgcccagggcctgcaggccaaggacaagacaggcagcagtgacccctacgtgacagtgcaggtgggcaagaacaagaggaggaccaagaccatcttcggcaacctgaaccctgtgtgggatgagaagttctactttgagtgccacaacagcacagaccgcatcaaggtgcgggtgtgggatgaagatgatgacatcaagagccgggtgaagcagcacttcaagaaggagagtgatgacttcctgggccagaccatcgtggaggtgaggaccctgagcggggagatggatgtgtggtacaacctggagaagaggacagacaagtctgctgtgtctggggccatccggctgaagatcaacgtggagatcaagggggaggagaaggtggccccctaccacatccagtacacctgcctgcacgagaacctcttccactacctgacagaggtgaagagcaatggaggagtgaagatccctgaggtgaagggagatgaggcctggaaggtgttctttgatgatgccagccaggagatcgtggatgaatttgccatgagatatggaattgagagcatctaccaggccatgacccacttcagctgcctgagcagcaagtacatgtgccctggggtgcctgctgtgatgagcaccctgctggccaacatcaatgccttctacgcccacaccaccgtgtccaccaacatccaggtgtctgccagtgacagatttgctgccaccaactttggccgggagaagttcatcaagctgctggaccagctgcacaacagcctgagaattgacctgagcaagtaccgggagaacttccctgccagcaacacagagcggctgcaggacctgaagagcacagtggacctgctgaccagcatcaccttcttcaggatgaaggtgctggagctgcagagcccccccaaggcctccatggtggtgaaggactgtgtgcgggcctgcctggacagcacctacaagtacatctttgacaactgccacgagctgtacagccagctgacagaccccagcaagaagcaggacatcccccgggaggaccagggccccaccaccaagaacctggacttctggccccagctgatcaccctgatggtgaccatcattgatgaggacaagacagcctacacccctgtgctgaaccagttcccccaggagctgaacatgggcaagatctctgctgagatcatgtggaccctgtttgccctggacatgaagtatgccctggaggagcacgagaaccagaggctgtgcaagagcacagactacatgaacctgcacttcaaggtgaagtggttctacaatgaatatgtgcgggagctgcctgccttcaaggatgctgtgcctgagtacagcctgtggtttgagccctttgtgatgcagtggctggatgaaaatgaagatgtgtccatggagttcctgcatggagccctgggccgggacaagaaggatggcttccagcagaccagcgagcacgccctcttcagctgcagcgtggtggatgtgtttgcccagctgaaccagagctttgagatcatcaagaagctggagtgccccaaccctgaggccctgagccacctgatgagaagatttgccaagaccatcaacaaggtgctgctgcagtatgctgccatcgtgtccagtgacttcagcagccactgtgacaaggaaaatgtgccctgcatcctgatgaacaacatccagcagctgcgggtgcagctggagaagatgtttgagagcatgggcggcaaggagctggacagcgaggccagcaccatcctgaaggagctgcaggtgaagctgagcggcgtgctggatgagctgtctgtgacctacggggagagcttccaggtgatcatcgaggagtgcatcaagcagatgagctttgagctgaaccagatgagggccaatggaaacaccaccagcaacaagaacagcgctgccatggatgctgagatcgtgctgcggagcctgatggacttcctggacaagaccctgagcctgagcgccaagatctgtgagaagacagtgctgaagagggtgctgaaggagctgtggaagctggtgctgaacaagattgagaagcagatcgtgctgccccccctgacagaccagacaggcccccagatgatcttcatcgccgccaaggacctgggccagctgagcaagctgaaggagcacatgatcagagaagatgcccggggcctgaccccccggcagtgtgccatcatggaggtggtgctggccaccatcaagcagtacttccacgccggcggcaatggcctgaagaagaacttcctggagaagagcccagacctgcagagcctgcgctatgccctgagcctgtacacccagaccacagatgccctgatcaagaagttcatcgacacccagaccagccagagccgcagcagcaaggatgctgtgggccagatctctgtgcacgtggacatcacagccaccccaggcaccggggaccacaaggtgacagtgaaggtgattgccatcaatgacctgaactggcagaccacagccatgttccggccctttgtggaggtgtgcatcctgggccccaacctgggggacaagaagaggaagcagggcaccaagaccaagagcaacacctggagccccaagtacaatgagaccttccagttcatcctgggcaaggaaaatagacctggggcctatgagctgcacctgtctgtgaaggactactgctttgccagagaagatcgcatcatcggcatgaccgtcatccagctgcagaacattgctgagaagggcagctatggagcctggtaccccctgctgaagaacatctccatggatgagaccggcctgaccatcctgcgcatcctgagccagaggaccagtgatgatgtggccaaggagtttgtgcggctgaagtctgagaccaggagcacagaggagagcgcctag

SEQ ID NO: 36927 - DNA, 6645 bp, Artificial Sequence
  derived and/or modified sequence
atggtggccaacttcttcaagagcctcatcctgccctacatccacaagctgtgcaagggcatgttcaccaagaagctgggcaacaccaacaagaacaaggagtaccggcagcagaagaaggaccaggacttccccacagctggccagaccaagagccccaagttctcctacaccttcaagagcacagtgaagaagatcgccaagtgcagcagcacccacaacctgagcacagaagaagatgaggccagcaaggagttcagcctgagccccaccttctcctacagagtggccatcgccaacggcctgcagaagaatgccaaggtgaccaacagcgacaatgaagacctgctgcaggagctgagcagcattgagagcagctacagcgagagcctgaatgagctgcggagcagcacagagaaccaggcccagagcacccacaccatgcctgtgagaagaaacaggaagagcagcagcagcctggcccccagcgagggcagcagtgatggagagaggaccctgcacggcctgaagctgggcgccctgaggaagctgaggaagtggaagaagagccaggagtgtgtgtccagtgacagcgagctgagcaccatgaagaagtcctggggcatccgcagcaagagcctggacagaacagtgaggaaccccaagaccaatgccctggagcccggcttcagcagcagcggctgcatcagccagacccatgatgtgatggagatgatcttcaaggagctgcagggcatcagccagatcgagacagagctgtctgagctgcggggccacgtgaatgccctgaagcacagcattgatgagatcagcagctctgtggaggtggtgcagagcgagattgagcagctgaggactggatttgtgcagagcagaagagagacccgggacatccatgactacatcaagcacctgggccacatgggcagcaaggccagcctgcgcttcctgaatgtgacagaggagagatttgaatatgtggagagcgtggtgtaccagatcctgattgacaagatgggcttcagtgatgccccaaatgccatcaagattgaatttgcccagagaattggccaccagagggactgccccaatgccaagccccggcccatcctggtgtactttgagaccccccagcagagggacagcgtgctgaagaagagctacaagctgaagggcaccggcatcggcatcagcacagacatcctgacccatgacatccgggagaggaaggagaagggcatccccagcagccagacctatgaatccatggccatcaagctgagcaccccagagcccaagatcaagaagaacaactggcagagcccagatgacagtgatgaggacctggagagtgacctgaacagaaacagctatgctgtgctgagcaagtctgagctgctgaccaagggcagcaccagcaagcccagcagcaagagccacagcgcccggagcaagaacaagacagccaacagcagccgcatcagcaacaagagtgactatgacaagatcagcagccagctgcctgagagtgacatcctggagaagcagaccaccacccactatgcagatgccacccccctgtggcacagccagagcgacttcttcaccgccaagctgagccgctctgagagtgacttcagcaagctgtgccagagctacagcgaggacttcagcgagaaccagttcttcaccaggaccaacggcagcagcctgctgagcagcagtgaccgggagctgtggcagaggaagcaggagggcacagccaccctgtatgacagccccaaggaccagcacctgaatggaggagtgcagggcatccagggccagacagaaacagagaacacagagaccgtggacagcggcatgagcaatggcatggtgtgtgccagcggggacaggagccactacagcgacagccagctgagcctgcacgaggacctgagcccctggaaggagtggaaccagggcgctgacctgggcctggacagcagcacccaggagggctttgattatgagaccaacagcctgtttgaccagcagctggatgtgtacaacaaggacctggagtacctgggcaagtgccacagcgacctgcaggatgattctgagagctatgacctgacccaggatgacaacagcagcccctgccccggcctggacaatgagccccagggccagtgggtgggccagtatgacagctaccagggcgccaacagcaatgagctgtaccagaaccagaaccagctgtccatgatgtaccgcagccagagcgagctgcagagtgatgattctgaagatgccccacccaagtcctggcacagccggctgagcattgacctgagtgacaagaccttctccttccccaagtttggcagcaccctgcagagggccaagagcgccctggaggtggtgtggaacaagagcacccagagcctgagcggctatgaagattctggcagcagcctgatgggccgcttccgcaccctgagccagagcacagccaatgaaagcagcaccaccctggacagtgatgtgtacacagagccctactactacaaggccgaggatgaggaggactacacagagcctgtggccgacaatgaaacagattatgtggaggtgatggagcaggtgctggccaagctggagaacagaaccagcatcacagaaacagatgagcagatgcaggcctatgaccacctgtcctatgagaccccctatgagaccccccaggatgagggctatgatggccctgcagatgacatggtgtctgaggagggcctggagcccctgaatgagaccagcgctgagatggagatcagagaagatgagaaccagaacatccctgagcagcctgtggagatcaccaagcccaagaggatccggcccagcttcaaggaggccgccctgcgggcctacaagaagcagatggccgagctggaggagaagatcctggccggcgtgtccctggatgtggacctggaggccagaattgtgtctggaaatgacctggatgccagcaagttcagcgccctgcaggtgtgtggcggggccggcggcggcctgtatggcatcgacagcatgccagacctgcggaggaagaagaccctgcccatcgtgagagatgtgctgctgaccctggccgccaggaagagcggcctgagcctggccatggtgatccgcaccagcctgaacaatgaggagctgaagatgcacgtgttcaagaagaccctgcaggccctgatctaccccatgagcagcaccatcccccacaactttgaggtgtggacagccaccacccccacctactgctatgaatgtgagggcctgctgtggggcatcgcccggcagggcatgaagtgcctggagtgtggggtgaagtgccacgagaagtgccaggacctgctgaatgctgactgcctgcagagagctgctgagaagagcagcaagcacggggctgaggacaagacccagaccatcatcacagccatgaaggagaggatgaagatccgggagaagaacagacctgaggtgtttgaggtgatccaggagatgttccagatcagcaaggaggactttgtgcagttcaccaaggccgccaagcagagcgtgctggatggcaccagcaagtggagcgccaagatcaccatcaccgtggtgtctgcccagggcctgcaggccaaggacaagacaggcagcagtgacccctacgtgacagtgcaggtgggcaagaacaagaggaggaccaagaccatcttcggcaacctgaaccctgtgtgggatgagaagttctactttgagtgccacaacagcacagaccgcatcaaggtgcgggtgtgggatgaagatgatgacatcaagagccgggtgaagcagcacttcaagaaggagagtgatgacttcctgggccagaccatcgtggaggtgaggaccctgagcggggagatggatgtgtggtacaacctggagaagaggacagacaagtctgctgtgtctggggccatccggctgaagatcaacgtggagatcaagggggaggagaaggtggccccctaccacatccagtacacctgcctgcacgagaacctcttccactacctgacagaggtgaagagcaatggaggagtgaagatccctgaggtgaagggagatgaggcctggaaggtgttctttgatgatgccagccaggagatcgtggatgaatttgccatgagatatggaattgagagcatctaccaggccatgacccacttcagctgcctgagcagcaagtacatgtgccctggggtgcctgctgtgatgagcaccctgctggccaacatcaatgccttctacgcccacaccaccgtgtccaccaacatccaggtgtctgccagtgacagatttgctgccaccaactttggccgggagaagttcatcaagctgctggaccagctgcacaacagcctgagaattgacctgagcaagtaccgggagaacttccctgccagcaacacagagcggctgcaggacctgaagagcacagtggacctgctgaccagcatcaccttcttcaggatgaaggtgctggagctgcagagcccccccaaggcctccatggtggtgaaggactgtgtgcgggcctgcctggacagcacctacaagtacatctttgacaactgccacgagctgtacagccagctgacagaccccagcaagaagcaggacatcccccgggaggaccagggccccaccaccaagaacctggacttctggccccagctgatcaccctgatggtgaccatcattgatgaggacaagacagcctacacccctgtgctgaaccagttcccccaggagctgaacatgggcaagatctctgctgagatcatgtggaccctgtttgccctggacatgaagtatgccctggaggagcacgagaaccagaggctgtgcaagagcacagactacatgaacctgcacttcaaggtgaagtggttctacaatgaatatgtgcgggagctgcctgccttcaaggatgctgtgcctgagtacagcctgtggtttgagccctttgtgatgcagtggctggatgaaaatgaagatgtgtccatggagttcctgcatggagccctgggccgggacaagaaggatggcttccagcagaccagcgagcacgccctcttcagctgcagcgtggtggatgtgtttgcccagctgaaccagagctttgagatcatcaagaagctggagtgccccaaccctgaggccctgagccacctgatgagaagatttgccaagaccatcaacaaggtgctgctgcagtatgctgccatcgtgtccagtgacttcagcagccactgtgacaaggaaaatgtgccctgcatcctgatgaacaacatccagcagctgcgggtgcagctggagaagatgtttgagagcatgggcggcaaggagctggacagcgaggccagcaccatcctgaaggagctgcaggtgaagctgagcggcgtgctggatgagctgtctgtgacctacggggagagcttccaggtgatcatcgaggagtgcatcaagcagatgagctttgagctgaaccagatgagggccaatggaaacaccaccagcaacaagaacagcgctgccatggatgctgagatcgtgctgcggagcctgatggacttcctggacaagaccctgagcctgagcgccaagatctgtgagaagacagtgctgaagagggtgctgaaggagctgtggaagctggtgctgaacaagattgagaagcagatcgtgctgccccccctgacagaccagacaggcccccagatgatcttcatcgccgccaaggacctgggccagctgagcaagctgaaggagcacatgatcagagaagatgcccggggcctgaccccccggcagtgtgccatcatggaggtggtgctggccaccatcaagcagtacttccacgccggcggcaatggcctgaagaagaacttcctggagaagagcccagacctgcagagcctgcgctatgccctgagcctgtacacccagaccacagatgccctgatcaagaagttcatcgacacccagaccagccagagccgcagcagcaaggatgctgtgggccagatctctgtgcacgtggacatcacagccaccccaggcaccggggaccacaaggtgacagtgaaggtgattgccatcaatgacctgaactggcagaccacagccatgttccggccctttgtggaggtgtgcatcctgggccccaacctgggggacaagaagaggaagcagggcaccaagaccaagagcaacacctggagccccaagtacaatgagaccttccagttcatcctgggcaaggaaaatagacctggggcctatgagctgcacctgtctgtgaaggactactgctttgccagagaagatcgcatcatcggcatgaccgtcatccagctgcagaacattgctgagaagggcagctatggagcctggtaccccctgctgaagaacatctccatggatgagaccggcctgaccatcctgcgcatcctgagccagaggaccagtgatgatgtggccaaggagtttgtgcggctgaagtctgagaccaggagcacagaggagagcgcctag

SEQ ID NO: 36928 - DNA, 6645 bp, Artificial Sequence
  derived and/or modified sequence
atggtggccaacttcttcaagagcctgatcctgccctacatccacaagctctgtaagggcatgttcaccaagaaactggggaacacaaataaaaacaaagagtatcgacaacagaagaaggaccaggattttccgaccgccggccagacaaagtccccaaagttcagttatactttcaagagtaccgtgaaaaaaattgcaaagtgtagcagcactcataatctcagtaccgaggaggacgaagcgagcaaggagttttccctgtcacctacattcagttaccgggtggctatcgctaatggcctgcaaaaaaacgccaaagtcacgaactccgataacgaagatttgcttcaggagttatctagtatcgaaagcagctactccgaaagcctgaacgagttgcgcagtagcacagagaaccaggctcagagcacccacaccatgccagtgcggaggaatcggaagtccagctcatccttggcaccttctgaggggtcctctgacggagaaagaacattacatggactgaagttgggggctctgaggaaactgcgtaagtggaaaaaatcacaagagtgtgtctcctccgactcggaattgtctacgatgaaaaaatcctggggcatccggagcaaaagcctggaccggacggttcgcaatccgaaaacaaatgccctcgagccaggattctcctcttctggatgtatcagccagactcacgatgttatggagatgatttttaaagagctccagggaatctcccaaatcgagaccgagctctcagagctccgaggacatgttaacgccttaaaacactccattgacgagattagcagctcagttgaggtcgtacagagtgagatcgagcaactgagaaccggcttcgttcagtccagaagagaaacccgcgacatacacgactacattaaacatctcggtcacatgggatcaaaagccagcctgaggtttctaaacgttactgaggaacgctttgaatacgtggaaagtgtcgtgtatcagattctgatagacaagatggggttctctgatgcccctaatgctattaagatcgagttcgcccagagaatcggccaccagagggactgccctaacgccaagcctaggcctatactcgtctactttgagacgccccagcagagagatagcgtgttaaagaagtcctacaaactgaaggggaccggtatcgggatcagtacagatattctcacccacgatattcgcgaacgcaaggagaagggaataccaagttctcagacctatgagtcgatggctattaaattgagtacacctgagccaaagatcaagaaaaacaactggcaatccccggacgatagtgatgaggacctggaatccgatctgaaccgtaattcgtatgccgtgctgtccaagagtgaacttctgaccaagggcagtacctctaagccatcaagcaaatctcactctgccagatccaagaacaagactgcaaatagtagcaggatatccaataaaagcgactatgacaaaatctcaagccagttgcctgaatctgacatacttgagaagcagaccacaactcattacgccgatgctacaccattgtggcatagtcagtcagatttcttcacggccaaattgtcacgaagcgaatcagacttcagcaagctgtgtcaaagctatagtgaggatttctcagaaaaccagttcttcactaggactaacggctcatccttgttaagctcaagcgatagagagctgtggcagcgcaagcaggaaggaacggccaccctatatgactctcccaaagaccagcatttgaacgggggcgtacaggggatacaaggtcaaaccgaaacggaaaacaccgagaccgtggacagtgggatgagtaacggtatggtgtgcgcatccggagacaggagccactattcagacagtcagctgtccctccacgaggacctgtccccctggaaggagtggaatcagggtgcggatctaggtcttgacagctctacacaggagggattcgactatgagaccaactctctttttgaccagcagcttgacgtatataacaaagacctagagtaccttggaaagtgccactccgacctccaggatgactcggagagctacgacctgacccaggacgacaacagctctccatgtcccgggctggacaatgagcctcaaggccagtgggtgggccaatatgattcgtaccaaggcgccaattccaatgagctgtaccagaatcagaatcagctgagcatgatgtatcggtctcagagtgaactgcaatccgatgactcagaagatgcgcccccaaagtcctggcatagtagactgtcaatcgacctgagtgacaagactttctcatttcccaagttcggcagcaccctgcagcgcgccaagtccgcattagaagtcgtgtggaataaaagtacccagtctttgagcgggtacgaagactctgggtctagcctgatgggcagattcagaaccctgtcacagtcgaccgccaatgagagttccacaacccttgactctgacgtgtatacagaaccatactattataaggccgaagacgaggaggactatacagagcccgttgcagataacgaaactgattatgtagaagtcatggaacaggttctagctaaactggagaatcggacatccatcaccgagaccgacgagcagatgcaggcctatgaccatctcagttatgagacaccatacgagacaccgcaagatgaaggatatgatggcccagccgatgatatggtgagcgaggaggggctggaaccacttaacgagaccagcgccgagatggaaatcagagaagacgagaatcagaacattcctgaacagcctgtggaaatcactaagccaaagagaatccgtccttcttttaaggaagcagctctgcgcgcttacaagaagcagatggccgagctcgaggagaaaattctagctggcgattcatcatctgttgacgaaaaagccagaatagtgtctgggaatgatctggacgcaagcaagtttagcgctctgcaggtatgtggcggcgctggtgggggcttgtatgggatcgactccatgccagatctgaggaggaaaaaaacactccccatcgtgagggatgtggccatgactcttgccgcaaggaaatccgggctgtcattggcaatggtgatcaggacaagcctgaacaatgaagagctgaagatgcatgtgttcaaaaaaacactccaggccttaatctatccgatgtcctccaccatcccacacaattttgaagtgtggactgccactacaccaacctactgctatgaatgtgaagggctcctgtggggtatcgctagacaaggcatgaaatgtctcgaatgcggagtgaagtgccatgaaaagtgccaagatctgctcaacgccgactgcctccaacgggccgctgagaagagtagcaaacatggagctgaggataagacacagacaattattacagccatgaaggaacgaatgaaaattagagagaagaatcgcccagaggtgttcgaggtgatccaggagatgtttcagatttctaaggaggactttgtgcagttcactaaagctgcgaagcagagcgtgctcgatgggaccagcaaatggagcgcaaagattaccatcactgtggtgagcgctcagggcctccaggcgaaggacaagaccggaagctccgatccttacgtgaccgtccaggtcggaaagaacaaaaggagaacgaaaactatcttcggtaacctcaatccggtctgggacgagaaattctattttgaatgtcacaactccaccgacaggatcaaggtgcgagtgtgggatgaggatgatgacatcaagagtcgcgtgaagcaacactttaaaaaagagagcgacgattttctcgggcaaacaattgtggaggtgcgcaccttatccggcgagatggatgtttggtataatctggagaagcggacggataagagtgccgtttccggagccattaggctaaaaatcaatgtcgagattaagggggaggagaaagtggccccttaccatatccagtacacttgccttcacgaaaacctgtttcattacttaaccgaagttaaatccaacgggggggttaagataccggaggtcaaaggcgatgaagcttggaaagtcttctttgacgacgccagccaggagattgtggacgaatttgccatgcgctacggtatcgaatcaatttaccaggccatgactcacttctcttgcctcagctcaaagtatatgtgcccgggagtccccgctgtgatgagcacactgttagcaaacatcaacgctttctacgcccacactactgttagtactaatatccaggtcagtgcaagcgacaggttcgccgcgacaaatttcggtcgcgaaaagttcattaagttgctcgatcagctgcacaacagtttgcgcattgacctctccaaatatcgcgagaacttccccgcttcaaatactgagaggctgcaggacctgaaaagcaccgtcgatctcctgacatctattacatttttccgtatgaaagtgctcgagctacagagcccaccaaaagccagtatggtggtgaaggactgcgtcagagcctgtcttgactccacgtacaaatatatttttgataactgtcacgagttgtacagccagctgaccgacccctctaaaaagcaggatatccccagggaggatcaggggcctacgaccaagaatctggatttttggccccagctgataaccctcatggtgactattatcgacgaggataaaaccgcatacacacctgtgcttaaccagttccctcaagagctgaacatgggaaagatttccgctgagattatgtggaccctgtttgcactagatatgaagtacgccttggaggagcatgaaaaccagcgtctctgcaagtctaccgactatatgaatctgcattttaaggtgaaatggttttacaacgagtatgtcagagagctgccagcatttaaagacgcagtaccggagtactccctgtggttcgaaccatttgtgatgcagtggctcgacgaaaacgaggacgtgagcatggagtttctccatggcgcccttggccgtgacaaaaaggatggttttcagcagactagcgaacacgcgctcttttcatgctcagtggtggacgtgttcgcacagctaaatcagtccttcgagattatcaagaaattggagtgtccgaatcccgaggctctgagccatctaatgaggaggtttgccaagaccataaacaaggtcctcctccagtacgctgccattgtgtcctctgatttcagcagccactgcgacaaggaaaatgtaccgtgcattctcatgaataatattcagcagctgcgtgtgcagctcgagaagatgttcgaatcaatgggggggaaagaactggacagcgaggcatccacaatcctgaaggagctacaggtaaagctgtccggagtgctcgacgagctctcagtgacttatggggaatcttttcaagtcattatcgaagaatgcattaagcagatgtcatttgaacttaaccaaatgagagccaacggaaacactacctcaaacaaaaattcagcagcgatggatgccgaaatagtgctccgtagcttgatggactttttggacaagacactctctctgagcgctaagatctgcgagaaaaccgtcctgaagagagtgctcaaggagctctggaagctggtgctgaacaagattgagaagcagattgtactaccccctctaacggatcagactggcccccagatgattttcattgccgccaaggatttgggacagctctcgaaattgaaagaacacatgatcagggaggatgccagaggactaacaccccgtcagtgcgctataatggaggtcgtcctggctaccatcaaacagtacttccatgcaggcggcaacggcctgaagaaaaactttctcgaaaagtctcctgatctgcagagtctcagatatgccctctctctctatacccagaccaccgatgccctgatcaaaaaattcatagacacccagaccagtcaatcccggtcctccaaggacgcggtcgggcagataagcgtgcacgtggatattacggccacacctgggactggtgaccataaggtgactgtcaaggtcattgcaattaatgacctgaattggcagaccaccgcgatgtttagaccttttgtggaggtgtgtatcctcgggccaaacttaggagataagaagcggaagcaggggaccaagacaaagagcaacacatggtccccaaaatacaacgaaacctttcagtttattctaggcaaggaaaaccggcccggagcctacgagctccatctgtccgtcaaagattattgtttcgctagggaggatcgcatcatcggcatgacagttatccagctccagaacattgccgaaaagggctcctacggtgcctggtaccctctgctgaaaaatatttccatggatgaaactggcctgaccattctgcgtattttatcccagaggacctccgacgacgtggcaaaagaattcgtgagactgaaatctgaaaccaggtcgaccgaggaatccgcgtag

SEQ ID NO: 36929 - DNA, 6639 bp, Artificial Sequence
  derived and/or modified sequence
atggtggccaacttcttcaagagcctgatcctgccctacatccacaagctgtgcaagggtatgtttacaaagaaattgggcaacaccaataaaaacaaggagtaccgacagcagaaaaaagatcaggactttccgacagctgggcagactaagagccctaagttctcttatactttcaagagcacagtgaaaaagatcgctaagtgctcgtcaactcacaatctttcaacagaagaggatgaagcctccaaagagttttcgctgtcacccacatttagttacagagtggctatcgccaatggccttcaaaagaatgccaaggtcacaaactcagacaatgaggacctgctgcaggagttgagttcaattgagagttcatattcagagtctttgaacgaactgcgatcatccacagagaaccaggcacagtccacccacacaatgcccgtgcggaggaaccgaaaatcgtcatcttccttggcgcctagtgaggggagtagtgacggggagaggactctgcacggacttaagttgggagcccttcgcaaactgagaaaatggaaaaagagccaggaatgcgtctcgtccgactcagaactcagtaccatgaaaaaatcgtggggaatacgcagcaaaagtctggacaggaccgtcaggaaccctaaaacgaatgcacttgaacccgggttttcctctagcgggtgtatttcccagacccacgatgtgatggaaatgatcttcaaggaactccagggtatcagtcagatcgagaccgagctctccgaactgaggggtcatgtcaacgccctcaaacacagcatcgatgagatttcttcctcagtggaggtcgttcaatctgagattgaacagcttcgcaccggttttgtacagagccgcagggaaacccgcgacatccatgattacataaagcacctaggacacatggggtccaaagctagtctacgcttcctgaatgtgaccgaagagcggtttgaatacgtggaatcagtggtttaccagattctgattgacaagatgggatttagtgatgccccaaacgccataaaaatcgagttcgcacagcgcatcggccaccagcgtgattgtcccaatgcgaagcctaggcccatcctcgtttatttcgagacgccacagcagagagacagtgtactgaagaagagctacaaattgaaagggacaggcatagggatttcgacagatattctcacccatgatatcagagagagaaaagaaaaaggcataccaagttcacagacatatgaatctatggcaatcaagctgtcaacaccagagccaaaaattaagaaaaacaactggcagtctcctgacgatagcgacgaggatctggagtccgacctcaatcgtaactcgtatgctgtgctttccaagtctgagttgctcacgaaggggagtacatcaaaaccatcttctaaatcacattcagcgcgcagcaagaataagacagctaatagctctcgtatttcgaacaagtctgattatgataaaatctcaagccagctaccagaaagcgacatcctggagaagcagacaactacccattatgctgacgccacacctctctggcattcacagtctgacttctttacagcaaaactgagcagatccgagagtgatttctctaaactgtgccagtcctattctgaggatttctctgaaaatcaattctttactaggacgaatggatccagtctgctaagctcctctgatcgagagctttggcagcgaaagcaggaggggaccgctacactctatgatagtcccaaggaccaacatctgaacgggggcgtccagggaatccaggggcagactgagacagaaaacaccgagaccgttgatagcggcatgagcaatggcatggtctgtgcctctggagacaggtcccactactccgattcacaactttccctacacgaagatctgagcccctggaaggagtggaaccagggggccgatcttggtctggatagctccacccaggagggctttgattatgagaccaattctttgtttgaccaacagcttgatgtgtataacaaggatttggaatacctgggtaagtgccacagcgacctccaagacgattccgagagctacgatctcacccaagatgacaactccagcccttgccccggcttagacaatgaaccacaggggcaatgggtgggacaatacgactcctaccagggggccaacagtaatgagctttaccagaatcaaaaccaattatccatgatgtaccgaagccaatctgaacttcaaagcgacgatagcgaggacgccccaccaaagtcctggcatagcagattatcgatagatctgtccgacaagaccttttctttccccaaatttggctcaaccctccagcgggcgaagagtgcactggaagttgtatggaacaaatcaacccagtcactgagcggatacgaggatagtggctccagcctgatggggagattcaggactctgtcacagtcaaccgctaacgaaagctctaccaccctcgactctgacgtttatactgagccctattattataaagccgaggacgaagaagactacacagagcccgtggctgacaacgagactgactatgtggaagtcatggagcaagttctggcgaagctggagaaccggacttcgattaccgaaaccgacgagcaaatgcaagcctacgatcatctcagctacgaaaccccttatgaaactccccaggatgaaggctacgatgggccggccgacgacatggtgtcagaggaaggcttggagcctttgaatgaaacttctgctgaaatggaaataagagaagatgagaaccagaacattccagaacagccggtggagatcacaaagccaaaacggatacgtccttcgtttaaagaggccgccctaagggcctataaaaaacagatggctgagttagaagagaagattctcgccggggacagctctagcgttgacgaaaaggcgagaatcgtcagcgggaatgacctggatgccagtaagttttcagcccttcaagtctgcggaggtgcaggtggcggtctgtatggcatcgactcaatgccagatctgcgcaggaagaagacacttcctatcgtgagagacgtgactctcgcagcacgtaaaagcgggctcagcctagccatggtcattcgcacatcactcaataacgaagagctcaagatgcatgtcttcaagaaaacactgcaggccctaatctacccaatgtcaagcacaattccccacaattttgaagtgtggacggctactacccccacttattgttacgagtgtgaaggcctgctctgggggatagctaggcaaggcatgaagtgcttggaatgtggggtgaagtgtcacgagaagtgtcaggatctgttgaacgccgattgcctgcagcgcgctgcagaaaagtccagtaaacatggggccgaagataaaactcagacaattattaccgcgatgaaagaaagaatgaagatcagggagaagaaccggcccgaggtgttcgaagtgatccaagagatgtttcaaatctccaaggaggactttgtccaatttactaaggcggcaaaacaatccgtcttggatgggacctctaagtggtctgccaagatcaccattacagtggtatcggctcagggacttcaggcaaaagataagaccggttcatcggatccctacgtgactgtgcaggttggcaagaacaagagacggacaaagacaatctttggcaatctgaaccccgtttgggacgagaaattttactttgaatgccataattctacagacaggataaaagtgagggtctgggacgaggacgatgatattaagagtcgggttaagcagcattttaaaaaggaatccgacgactttctggggcaaaccattgttgaagtgaggactttgagtggcgaaatggatgtttggtataaccttgagaaacgaacagataagagcgcagtatctggcgcaatcaggctgaaaatcaatgtcgagatcaaaggcgaagagaaagtggcaccctaccacatacagtacacttgcctacacgaaaatctgttccactacttgaccgaagtcaaatccaacggaggagtcaaaatcccagaggtgaaaggcgatgaggcctggaaagtgtttttcgacgacgcgtcacaggagattgtcgacgagtttgcgatgcggtacggtattgaatctatatatcaggccatgacccatttttcttgtctctcgagcaaatacatgtgtcctggggtgccggccgtgatgagcaccttgctggcaaatataaacgccttttatgcgcatactactgtctccacgaacattcaggtgtcggccagcgacaggtttgctgcgacaaactttggaagagagaagttcattaagttgttggatcagctgcacaacagcttgcgaattgatctgtcaaagtaccgagaaaatttccctgcttctaacacagaaaggttacaggatctgaaatctaccgtggacctacttacttccataactttcttccgcatgaaggttctcgagctccagtctcctcctaaagctagtatggtggtaaaagactgtgtgcgcgcatgcttagactctacctataaatacatcttcgataactgccacgagctctactcacagctcacagacccctccaaaaagcaggacattccacgcgaggatcaaggccctacaactaagaacttggatttctggcctcagttgataaccctcatggtgaccatcattgacgaggacaaaaccgcatacaccccggtcctgaaccaattcccccaggaactcaacatgggaaagattagcgcagagatcatgtggacactcttcgctctggatatgaaatacgccttggaggagcatgagaaccagaggctgtgtaagagcacggactacatgaatctgcacttcaaagtaaaatggttctacaatgagtatgtccgagaactgccagcctttaaggacgccgtcccagagtacagtctgtggtttgagccgtttgtaatgcagtggctcgacgagaatgaggacgtgagtatggagtttctgcatggagctctcggccgcgacaagaaggatggcttccagcagacatctgaacacgcactgttctcctgctccgtagtggacgtgtttgctcagctgaatcagagctttgagatcattaagaaactcgagtgcccgaaccctgaggcactgtcccacctgatgagacgtttcgctaaaactattaacaaggtactgttacaatatgccgccatcgtgagctccgatttctcttcccactgtgataaagagaacgtgccttgcattctcatgaacaatattcaacagctccgggtgcagttggagaagatgttcgagtctatggggggcaaggagctggactccgaggcttccacaattctcaaagagctgcaggtaaaactgtccggcgtgctggacgaactgagcgtcacttacggggaatcttttcaggtgataattgaggagtgcatcaagcaaatgtcctttgagctgaaccaaatgcgtgcaaatgggaacaccactagtaataaaaattcggctgctatggatgctgagatcgttttgcgcagcctgatggatttcctcgataaaacactgtccctttcggcaaaaatttgcgaaaagactgtgcttaaacgcgtgctgaaagaactgtggaagctggtcctcaataagatcgaaaaacaaatcgtgctcccccccctcacagaccaaaccggtcctcagatgatatttattgcagccaaagatctgggccaactgtctaagcttaaagagcatatgatccgcgaggacgctagagggctgactcctcgacaatgcgctatcatggaagtagtgctggccacgattaaacagtattttcatgctggcggaaacggactcaagaaaaattttctcgagaaatcacctgacctccagagccttagatatgcactgtcactttacactcagaccaccgatgcgctcattaagaaattcatcgacacccagacctcccagtctcggtcaagcaaagacgctgtgggtcagatctccgtccacgtcgacattactgctacgccaggcaccggcgaccacaaggttaccgtgaaggtcattgcaatcaacgacctgaattggcagacaaccgccatgtttcgccccttcgtggaggtatgtattctgggccccaatctcggcgataaaaaacggaaacaaggcaccaaaactaaatcaaatacatggtctcccaagtacaatgaaaccttccaattcatcttaggaaaagaaaatagacccggagcatacgaattacacctgagcgtcaaggattattgttttgccagggaagacagaatcatcgggatgaccgtgatacaacttcagaacatagctgagaagggttcttacggcgcatggtacccattgctcaagaatatttccatggacgagacgggcttgacgatacttcgcatcctgagccagaggaccagcgatgatgtcgctaaagaatttgtcagactcaagagcgaaacaaggtcaacagaggaaagcgcatag

SEQ ID NO: 36930 - DNA, 6645 bp, Artificial Sequence
  derived and/or modified sequence
atggtggccaacttcttcaagagcctgatcctgccctacatccacaaactgtgcaaaggtatgtttactaaaaagctcggtaatacaaataaaaacaaagagtaccgccagcagaaaaaagatcaggacttccccaccgccgggcaaaccaagagcccaaagttcagttatactttcaaaagcactgtcaaaaaaatcgccaaatgctcttctacccataatctgtcaaccgaggaagacgaggcatccaaggagttcagtctgtctcccaccttttcttatcgcgttgccattgctaatggactgcaaaaaaatgccaaggtgacaaattccgacaacgaggacttgctgcaggagctttcctccatcgagtcctcctatagcgagtctttgaatgaactcagaagctctactgagaatcaggcacagagtacacataccatgcctgttaggcgcaatcggaaatcttcatcctcccttgcgccatctgagggatcttccgacggcgagagaacattacatgggctgaagctgggtgccctccgcaagcttcgtaaatggaagaaaagccaggagtgcgtctctagcgacagcgaactcagtacaatgaagaaatcctggggaattcgtagtaagagcctggatagaaccgtaaggaatcccaagacgaatgccctggagccggggttcagctcttccggatgcatttctcagacacatgatgtaatggaaatgatattcaaagagctacagggtataagccagatagagactgaactgagcgaactgcggggacatgtgaatgctcttaagcacagcatcgatgagattagctctagcgtggaagtggttcagagtgaaatagagcaacttagaaccgggttcgtgcagtctcggcgcgaaacccgggacattcacgattatatcaaacatctgggccacatgggcagtaaggcttccctgagatttcttaatgttacagaagaacgatttgagtacgttgagagtgttgtctaccagatactgatcgacaagatgggcttcagcgacgccccgaacgcaatcaaaattgaattcgctcagaggatagggcaccaaagggattgcccaaacgccaagccaagacccattctggtttatttcgaaacccctcaacagcgcgacagcgtgttgaaaaaatcatataagctcaagggtaccggcataggaatttccaccgatattctcactcacgacatccgcgagcggaaagagaagggaatcccgtctagccagacatacgagtcaatggccattaaactcagcacccccgaacccaaaataaagaagaacaactggcagtctcccgacgacagcgatgaagacctcgaatctgatctgaaccgcaattcctacgctgttctgagcaagagcgagctgctaaccaaaggctccacatccaagcccagctccaagtctcattctgcccgctccaagaacaagacagccaactcttctagaatcagtaataagtcagattatgacaagatttctagccagctgccagaaagcgatattttagagaagcagacaaccacccattacgccgatgctacgccactctggcacagccagtccgatttcttcaccgcaaaactatcaaggagtgagagcgacttctccaaactgtgtcagagctattcagaggatttttccgaaaatcaattttttactcgaacgaacggaagtagcctcctgagctcttctgatagggagttatggcagagaaagcaagaaggtaccgccacactgtatgatagccccaaagatcagcaccttaatgggggagtgcaaggcattcagggccagaccgagaccgagaatactgaaacggtggactccggcatgtctaatggaatggtatgtgcatcgggcgatcggtcccactattcagacagtcagttaagtctccacgaggacctgtccccttggaaggagtggaaccagggagccgatctcggattggattccagcacccaagagggctttgactacgaaaccaactcgctgttcgatcagcagttggatgtctacaataaggacctggagtacctcggcaaatgtcattctgatctccaagatgattcagaatcatacgatctgacgcaagacgacaacagtagcccctgtcccggcttagataacgagccccaaggtcagtgggtaggtcaatacgacagctatcaaggtgccaactcaaacgaactttaccagaaccaaaatcagctgagcatgatgtataggtcacaatccgagctccagagtgatgatagcgaggacgcacccccaaaatcttggcactcccgactgagtatagacctgagtgataaaaccttttcctttccaaagtttgggtccactctgcagagagctaagagcgcattagaggtggtgtggaataagagcacacagagtttgtccggctatgaggattctgggtccagcttaatgggaagattcagaaccctttcccagtctaccgcgaatgagtcgtctaccacgctggactctgacgtctacacagagccatactactacaaggccgaagacgaagaagactacactgagcctgtcgcagataatgagactgattacgtagaagttatggagcaggttttagccaaattagagaaccgaacaagcatcacagagacagatgagcagatgcaggcctacgatcacctgtcctatgagaccccgtacgagacaccgcaggatgagggttacgacggtcctgccgatgatatggtgtcagaagaggggcttgagcccctcaacgagacaagcgcagagatggagattagagaggacgagaaccagaacatcccagagcaaccggtggagatcacaaaacccaaacggatcagaccatcatttaaagaggcggcgttaagagcttacaagaagcagatggccgagcttgaggagaagatacttgctggggtgagcttagatgtggatctagaggcacgtatcgtgtctggcaatgatctagatgcttccaaattttcagccctgcaggtttgtggaggtgcgggcggcggcctgtacgggattgacagtatgccagatttacggaggaaaaagacactcccaatcgtaagggacgttctcctcactctcgccgccaggaaaagcggactcagcttggccatggtgatccgaacctctctgaataatgaggagctcaagatgcacgtgtttaagaaaaccctgcaggccctcatctaccccatgtcgagcacaattcctcacaacttcgaagtctggaccgccacgacacccacgtactgttacgagtgcgagggtctgttgtggggcatcgctaggcagggaatgaaatgtctcgaatgtggggtcaagtgtcatgagaagtgccaggacctgcttaacgctgattgcctccagagagccgcagagaagagctctaagcatggcgccgaagacaagacgcagacaattatcaccgctatgaaggagaggatgaagattcgagagaagaatagacctgaggtgttcgaagtgatccaggaaatgttccagatcagcaaggaggactttgtgcaatttactaaggccgccaagcagtctgttcttgacggaaccagtaagtggagcgctaagatcacgatcaccgtggtatcggcacagggcctgcaggcaaaggacaaaaccggctcaagcgatccttatgtgacggtacaagtgggaaagaataagcggcggaccaaaacaatcttcgggaacttgaaccctgtgtgggatgaaaagttttatttcgagtgtcataacagtactgaccgcattaaggtccgagtgtgggatgaggatgacgacatcaaatcgcgggtaaaacagcatttcaaaaaagaatcagatgatttcctggggcaaactatagtcgaggtccgtactttgtccggagagatggatgtgtggtacaacctggagaagcggactgataagtctgccgtgtcaggagccatacggttgaaaataaatgtcgaaatcaagggtgaagagaaggtggctccataccacattcagtatacatgcctccacgaaaacctcttccactatctgactgaagtaaaaagtaatggcggcgtgaagatcccagaagtgaagggagatgaggcctggaaggtgtttttcgacgacgccagtcaagaaatcgttgacgaattcgcgatgagatatggcatcgaaagcatctatcaggcaatgacgcacttcagttgtttgagtagtaagtatatgtgccccggagtgcccgcggtcatgtcgacgctgctcgccaacatcaacgccttttatgctcacaccacagtaagtacaaacatccaagtgtcagcctctgatcgatttgcggcaactaatttcgggcgggaaaagttcattaagctgctggaccaactccacaatagcctacgcatagatctttcaaagtatcgcgaaaatttccctgcatcaaacactgagagactgcaggatctcaaatctaccgtggacttgcttacatctatcacgttttttcgtatgaaagtgcttgagttgcagtcaccacccaaagcatcgatggtggtcaaggattgcgtgcgggcctgcttagacagtacctataagtacatcttcgacaactgtcatgaactttacagtcagttgaccgacccttccaagaagcaggacatcccccgcgaggaccagggacccaccaccaaaaaccttgatttctggccccaactcattaccctcatggtgactatcatcgacgaagacaagacagcatacaccccagtcctgaatcagtttccacaggaactgaacatgggcaagatcagcgctgaaatcatgtggactctgttcgctttggatatgaaatacgccttggaggaacacgagaaccagagattatgtaagtccactgactacatgaacttacatttcaaggttaagtggttttataatgagtatgtgcgcgagctgcctgccttcaaggacgcagtgccggagtattccctgtggttcgaaccttttgtgatgcaatggcttgatgagaacgaggacgtttctatggagttcttgcacggtgccctcgggcgtgataagaaagacggatttcagcaaacctccgaacacgccttattcagctgttccgtcgtcgatgtattcgcgcagctgaatcagtctttcgagatcataaagaagctcgagtgtcccaacccagaagctctgtcccatctgatgcggagatttgcaaaaaccattaacaaggtgctgttacaatatgcagccatagtctcaagtgacttttccagccactgcgacaaggagaacgtcccctgcatattaatgaacaatatccagcagcttagagtgcagctggaaaaaatgtttgaaagcatgggcgggaaagaactggattccgaggcatccactatactgaaagaactgcaggtgaagctcagcggggtgctggacgagttgagcgtgacctatggagaaagttttcaggtcattattgaagagtgcattaaacagatgtcgtttgaactgaaccaaatgcgtgcaaatggcaacacgacatctaataaaaatagcgccgccatggacgctgagattgtcctgagaagtttgatggacttcctcgacaagacactcagcctcagcgctaagatctgcgagaagaccgtactcaaacgggtgcttaaggagctgtggaagctagtgctgaataagattgaaaaacaaatcgtgctccctccattgaccgatcagaccggaccacaaatgatcttcattgccgctaaggacctgggtcagcttagcaagctgaaggagcacatgattagagaggacgctaggggcctgactcctagacagtgcgccattatggaagtggtcctcgccactattaagcaatactttcacgctggcggcaatggcctgaagaaaaatttcttagagaagagtcccgacctccaatctctcagatatgctctgtctttatatacacaaacgacagacgcgctgattaagaaattcattgatacccaaacaagtcaatcccgctcttccaaggacgccgttgggcagattagcgtgcatgtagatattactgccactcccggaaccggagatcacaaggtaactgtgaaagtgatagccataaatgatctgaactggcaaacaacagctatgttcagaccatttgtcgaagtgtgtatcctcggtccaaacctgggggacaaaaagaggaagcaggggaccaagaccaaaagcaatacttggtccccaaagtataacgagactttccagtttatcctgggtaaggagaacaggcccggggcatatgaactacacctgtccgtaaaggactactgctttgctcgggaggatcgcattataggaatgaccgtcatacaattacagaatattgctgagaagggatcctatggcgcgtggtatcctcttctgaagaacattagtatggacgaaacagggcttactattctccggatcttgtctcaaagaactagcgacgacgtggccaaagaattcgtccgtttaaaaagcgagactagatctaccgaggaaagcgcttag

SEQ ID NO: 36931 - DNA, 6644 bp, Artificial Sequence
  derived and/or modified sequence
atggtggccaacttctttaagtcactaattctgccttacatccacaagctgtgcaaaggcatgttcaccaagaagctcggaaacacgaataagaacaaggaatacaggcagcaaaaaaaagaccaagactttcccaccgctggccagactaaaagcccaaaattttcttatacctttaaatctacggtgaagaagattgctaaatgttcatcaactcacaacctgtctacagaggaagacgaggcgtcgaaggagttctcactctctcccacgttcagctatcgggtggctatagctaacggcctacagaaaaacgctaaggtcactaatagtgataacgaggacctgctacaggaattgagttctatcgagtctagctacagcgagagcttgaatgaactgcgcagctcgacagagaaccaggctcagagcacgcacacaatgccagtgaggcgtaataggaagtcctcttccagcctcgccccttccgaagggagttctgatggagagcgaacacttcatggactcaagttgggcgcactgcggaagttacggaagtggaaaaagagtcaagagtgtgtgtccagcgacagcgaattgtccaccatgaagaagagttggggtattcgatctaagtccctggataggacagtgcgaaatccaaaaacaaacgctctggagcctggtttttcctctagtggctgcatatctcagacacacgacgtcatggaaatgatctttaaggaattgcaggggatatcccaaatagagacagagttgtccgaattacggggacatgttaacgcactgaaacacagcatcgacgagatcagttccagcgtagaagtagttcagtctgagatcgagcagctgaggacgggctttgtccagtcgagaagggagacccgcgatattcatgactatatcaagcacctgggccacatgggctctaaagcatcccttagattcctgaacgtgacggaggagcggttcgagtacgtggaaagcgtggtgtaccagatcctaatcgataaaatgggattcagcgatgcccctaacgcaattaaaatcgagtttgcacaacggataggacatcagagagactgtcctaatgccaaaccacgcccaatacttgtgtacttcgaaactccccaacaaagagattctgtgctcaaaaaatcctacaagctcaaggggacaggcatcggcataagcacggacattctgactcacgacatccgggagcgaaaggagaagggtatcccttccagccagacttacgagtccatggctattaagctgagtactcccgaaccaaagattaagaagaacaactggcagagcccagatgattcagacgaggacctagagtctgaccttaatcgcaatagctacgcggttctgtcaaaatcagagcttctgactaaaggttctaccagcaagccttcatcaaaatcccatagcgccagaagcaaaaacaaaactgcaaactccagccggatttctaataagtcagattatgacaagattagttcccagctgcctgagtcggatattctggaaaagcaaaccacaacccattacgccgacgctactcctctgtggcattctcaatctgattttttcactgccaaattgtctagatctgagagtgatttcagcaagttatgtcagagctactcagaggattttagcgagaatcagttctttactcgaaccaacggatcttccttgcttagctcgtcggatcgcgagctttggcagagaaaacaggaaggcacagcaaccctttacgacagtcctaaagatcaacacctgaacgggggagtgcagggaatccagggacagacggagacagaaaacaccgagacagtggactccggtatgtccaacggcatggtttgcgcttccggtgataggtcccactatagcgacagccagctgagtctccacgaggacctctctccctggaaggaatggaaccagggagccgatctcggcctcgattcctcgacacaagaaggattcgactatgaaactaattcactgttcgaccagcagttagacgtctataacaaggatctggagtaccttggcaagtgccatagcgatctgcaggatgattccgaatcctatgacctcacacaggacgacaacagttctccatgccctggcctggacaacgagccccaggggcaatgggtgggccaatatgattcgtatcagggcgctaactcaaacgagctttaccaaaaccagaaccagttgtccatgatgtaccggtctcagtcggagttgcagtccgacgacagcgaagacgcaccaccgaaatcgtggcactcccgcctgagcattgacctctcagataagactttttcattcccgaagtttgggagcacgctgcagagggccaagtctgccctggaggtggtttggaacaaatctacccaaagcttatcaggctacgaagattcaggatcaagtttaatgggcagatttcgcactctgagtcagtccacagccaatgagagttccaccacactggatagtgacgtttatactgaaccctattactacaaggctgaagacgaggaagactacacggaacctgtggcagacaatgaaactgattatgtggaggtcatggagcaagttctcgccaagttggagaatcgcacttctattacagagacagacgagcagatgcaggcctacgatcacttaagttacgagacaccgtacgagactccacaggacgaggggtacgacgggcctgccgatgatatggtgagtgaggagggattggaaccattgaatgaaacttctgcagaaatggaaatcagggaggacgagaatcagaacattcctgagcaaccggtagagattacgaaaccgaagcgaattaggccttcatttaaggaggctgcgctgcgggcttataagaaacagatggctgagctggaggaaaaaatcctggccggtgactcatcctccgttgatgagaaggccaggatcgtatctgggaacgacttggatgccagtaagttttcagccctgcaggtctgcgggggagcaggcggtggcttgtacgggatagattctatgccagacctgcgtcgtaagaagaccctcccgatcgtccgggacgtggcgatgacactggcagcacgcaaaagtggcctctcactagccatggtgatcagaacctccctcaacaacgaggaactgaaaatgcatgtgtttaagaagaccttgcaggccctgatatacccaatgtcctcaaccatcccacacaatttcgaggtttggacggcgactacaccgacttactgctatgagtgcgaaggattactgtgggggatcgccaggcaggggatgaagtgcctcgagtgtggagtgaaatgccacgagaaatgtcaagatctgctcaacgccgattgcctgcagcgcgctgccgaaaagtcatctaagcatggagctgaggacaaaacacagaccataattacagcgatgaaggagagaatgaagattagagagaagaataggccggaggtgttcgaggtcatccaggagatgttccagatctcaaaagaagactttgtccagtttactaaagccgctaagcagagtgtgctcgatggaactagcaaatggtctgcaaagataaccatcaccgtggtgtctgcacagggcttgcaagctaaggacaaaactggctccagcgatccatacgtcactgtacaggtaggcaaaaataagcgaaggacaaagactatttttggcaatcttaacccggtctgggatgaaaaattttatttcgagtgccataactcaaccgatcgcatcaaagtgcgcgtgtgggacgaggacgatgatatcaaaagccgcgtgaagcagcatttcaaaaaggagtcggacgactttttgggccagaccatagtcgaagtccggaccctcagtggggaaatggacgtgtggtataatcttgagaaaagaactgataagtctgctgtttccggagcgatcagacttaagattaatgtggagatcaagggagaggagaaggttgccccataccacattcagtatacatgtctgcatgagaacctgtttcactatttgaccgaggtgaaatccaatgggggtgtgaagatacctgaggtgaaaggcgacgaggcctggaaggtgtttttcgatgatgcttcccaagagattgttgacgagtttgccatgcggtacggcatcgaatcgatctaccaggccatgactcatttctcatgtctatcctctaaatacatgtgtcccggtgtccctgccgtgatgtccacacttctggccaatattaatgccttctacgcccacacgacagtgagtaccaatattcaggtgagcgcctccgatcggttcgctgccaccaatttcggacgggagaagtttataaaattactggatcagctacacaacagcctgaggatcgacctctctaagtacagagaaaattttcccgcatctaacaccgaaaggctgcaagatctgaagtctactgtggatttactcacatccatcacatttttcaggatgaaagtgctggaactccagtcaccccctaaagctagtatggtagtcaaagactgcgtgcgggcttgtctggattcaacatataagtacatttttgataactgccacgagttgtatagccagttaaccgatccctccaagaagcaagatattcccagagaggaccagggccctaccacaaaaaacttggacttttggcctcagttaattacattgatggtgaccatcattgatgaggataagaccgcctacacaccagtcctgaatcagttccctcaggagttaaacatggggaagatctctgccgagattatgtggacactcttcgctctggacatgaaatatgccctggaggagcacgagaaccagcgcttatgcaagtcgacagactacatgaatctccattttaaggtgaagtggttttacaatgagtatgtgagagaactgcctgctttcaaagacgccgtgcccgagtactcactgtggttcgagcccttcgtcatgcagtggctggatgagaatgaggatgtctccatggaatttctgcatggcgcattgggaagggacaagaaggatggctttcaacagacctcagagcatgctctgttctcttgttccgtggtagacgtgtttgctcagctgaatcagtccttcgaaattattaagaagctggaatgtcccaatccggaggccctctcacacttgatgaggcggtttgctaaaaccatcaacaaggtactcctgcagtatgccgcaatcgtttcttctgacttcagcagccattgcgataaagagaacgtgccctgcatccttatgaacaacatccaacagctgcgcgtccaactggagaagatgttcgaatcaatggggggtaaagaactggatagcgaggcaagtacgatattaaaggagttgcaggtgaagctgtcaggggtacttgatgagttgagcgtcacttacggtgaaagttttcaggtcatcatcgaggagtgcatcaaacagatgtcgtttgaactgaaccagatgcgagcgaatgggaacaccacttctaataagaactccgcggctatggacgctgaaattgttttgcgatccctcatggactttcttgacaagaccctctccctctctgcaaaaatttgcgagaagacggtactgaaaagggttcttaaggaattgtggaagctcgtgctgaataagatagagaaacaaatcgtcttgccaccattgactgaccagaccggcccacagatgatcttcattgcagccaaggacctaggacagctttccaagctgaaggagcatatgatccgcgaggacgctcgagggctaactccgcgacaatgcgcaatcatggaggtggtcctggcgaccataaagcaatactttcacgctggaggcaatggcttgaagaagaatttcctcgagaagtctccagatttacagagtttgcggtatgcactgtctctctacacccagactacagacgctctgatcaagaagttcatagatacccagacttctcagtcgcggagcagcaaggacgctgtgggacaaatctcagtgcacgtagatatcactgccacccccggtaccggagaccataaagtgactgtgaaggttatagcgattaacgacctgaattggcagacaactgccatgttcagaccctttgtcgaagtctgcatactcggcccaaacctcggcgacaagaaaagaaagcaaggcaccaagacaaaaagcaacacttggagccccaaatataacgagacctttcagttcatattggggaaagaaaacaggcccggtgcctacgagttgcacttatcagtgaaggattattgcttcgcccgagaggaccggatcatcgggatgacagttatccagcttcagaacatagctgaaaagggtagttatggagcatggtaccccctccttaagaatatttcgatggatgagactgggctaactattttgaggatactcagtcagcgaactagtgacgatgttgccaaggaattcgtgaggctcaaaagcgaaactagatccacggaagaatctgcata

SEQ ID NO: 36932 - DNA, 6638 bp, Artificial Sequence
  derived and/or modified sequence
atggtggccaattttttcaagagcctgattctcccgtatatacacaagctatgcaagggcatgttcacaaaaaagctcggcaacactaataagaataaggagtataggcagcagaagaaggaccaagatttccccactgcgggtcaaaccaaatctcccaaattcagctacacgttcaagagcaccgtcaagaagatcgctaaatgctcctcaacccataatctgtcgacagaggaagacgaggcgagtaaggaattctctctgtctcccaccttcagctatcgggttgccatcgccaacggtcttcagaaaaacgccaaagttaccaactcagacaacgaggatttgctgcaggaactcagctctatagagtctagctattctgagagtctgaatgagctccgaagctcaacagagaatcaggcgcagtccactcataccatgccggtgcgcagaaataggaagtcctcatcatctttagctccttccgagggatcttctgatggagagcgcactctgcacggcctcaagcttggcgctcttcgaaaactccgcaaatggaaaaaaagccaggagtgcgtgagtagtgacagtgagctttcgactatgaaaaagtcctggggtatccgctccaaatccttggacaggacagttcggaaccctaagacaaacgcgttagagccgggattcagcagcagtggttgcatttcacaaacccatgatgtaatggagatgatttttaaagaactgcaaggaattagccagatcgagaccgagctcagtgaacttaggggccacgtaaacgccctgaagcacagcatcgacgagatctcatcctctgtggaggtcgtccaaagcgagatcgagcaattgcgaaccggtttcgtacagtctcgaagagaaacacgcgatattcacgactatattaaacacctgggccatatggggagcaaggcatctctgcgttttcttaatgtcactgaagagcgtttcgaatatgtggaatcagtagtctaccagattttaatcgacaagatgggctttagcgatgcacctaacgcaatcaagattgaattcgctcaacggataggacaccaacgggactgccctaacgccaaacctcggcctattctcgtctattttgagacaccccagcagcgggattccgttctgaagaaaagttacaaactaaaagggactggcatcggcattagtaccgatattctgacccacgacataagagagcggaaagaaaaaggcataccttcctcacagacttacgagagtatggccatcaagctgtctacacccgaaccaaaaatcaagaagaataactggcagagcccggatgattccgacgaagaccttgagtcagatctgaaccgtaactcttatgccgtgttgagtaagtctgagctgctgaccaaggggtcaacatcaaaaccatcttcaaagagccattccgccagaagtaagaacaaaactgcaaactcttctaggatctcaaataagtctgattacgacaagatcagcagccaactgcccgagtcagacatactcgagaagcagaccaccacacattacgccgatgctacccccctctggcactcacaaagcgatttttttacggccaagctatcaagatccgaatctgatttctcaaagctttgccaaagctacagtgaagatttttccgagaaccagtttttcacgcggaccaacggctccagcctgctgagcagcagcgatagagagttatggcagcgcaagcaggagggcacagcaactctgtatgatagcccaaaagaccaacatctaaatggaggcgtccaggggatccagggccagacagagacagagaacacagagaccgtcgactctgggatgagcaatggtatggtgtgcgccagcggcgatcgttctcactatagcgactcccaattgtctctccatgaagacctgtcgccgtggaaagagtggaaccagggtgctgaccttggactcgactcctccactcaggaaggatttgactatgaaacaaactcgctttttgatcagcaactggatgtgtataataaagacttggagtatctggggaagtgtcattctgaccttcaggatgactcagagtcctacgatctcacacaggatgataattcttcgccgtgtcctgggctggacaacgagccacagggacagtgggtgggacagtacgatagttaccaaggggcaaacagcaatgaattgtaccaaaaccagaaccaacttagcatgatgtatagatctcagtctgaactgcagtccgatgactccgaagatgcacctccgaagtcatggcatagtaggctgtccatagatctgtcagataaaactttctcttttcccaagttcggatccacacttcagcgagctaagtctgctctggaagttgtctggaacaaaagcacacaatcgctttctgggtacgaagatagcggatcatctcttatggggcgattccgcactttgtcccaaagtaccgcaaacgagtcctctactaccttggactctgacgtctacacggaaccgtactattacaaggctgaggatgaggaggactatactgagcctgtggcagataacgaaactgactacgtggaggtaatggaacaggtccttgcaaaattggaaaacagaacatccattactgagaccgacgaacagatgcaggcgtatgatcacttgagctatgaaaccccctacgagacacctcaggacgaaggatacgacggtccggctgacgatatggtgtcagaggagggtctggagccactgaacgagacttccgccgagatggaaatccgagaagacgaaaaccagaacatccctgagcagcccgttgaaatcactaagcccaaacgaattcggcctagctttaaggaagctgcactgcgcgcttacaagaaacagatggccgaactggaggagaaaattctcgcgggtgattcttctagcgtggatgagaaggctcgaatcgtgtccggtaatgatctggatgcctccaagttttcagccctgcaggtatgcggtggcgctggcggtggtctgtacgggatcgattcaatgcccgatcttcggagaaaaaaaacccttcccattgtgcgggacgtgacattagccgctcgtaagtccggactgagtctagccatggtcattcgcacgtccctgaacaatgaggaactcaaaatgcacgtgttcaagaagactctgcaggcgttaatttatcccatgagctcgacgattcctcacaattttgaagtgtggaccgcgactacaccgacgtattgttacgagtgcgaaggccttctgtggggcatcgctaggcagggcatgaagtgccttgagtgtggggttaaatgtcatgagaagtgtcaggacttacttaatgccgattgtcttcagagggctgcagaaaagtcctctaagcacggcgcagaggacaagactcagacaatcattaccgctatgaaagaacggatgaagatccgggaaaagaatagacccgaagtatttgaggtgatacaggagatgttccagatatccaaggaggactttgttcagtttacaaaagccgcaaagcagtcagttctcgacggaactagtaagtggagcgccaaaattactattacagtggtcagcgctcaaggacttcaggccaaggacaaaacagggtcaagcgacccttacgttactgtgcaagtagggaagaacaaaaggcgaaccaaaactatttttggcaacctcaaccccgtctgggacgaaaagttctatttcgagtgccacaacagtacggatcgcattaaggtgcgggtctgggacgaagatgacgacataaagtccagggtcaagcagcatttcaagaaagagtcagacgatttcttgggccagacaatagttgaggtccgtactctaagtggcgagatggacgtttggtacaatctggaaaagaggactgacaagtctgccgtgtccggcgcaatccgactcaagatcaatgtggagattaagggcgaggaaaaagtcgccccatatcatatccagtatacatgtctccacgagaatctgttccattacctcacagaggtcaaaagtaacggtggcgtcaagataccagaagttaagggcgatgaggcttggaaggttttcttcgatgacgcaagccaggaaatcgtagatgaattcgcgatgcggtacgggatcgagtccatttatcaggcaatgactcatttttcttgtctgtcatccaaatacatgtgtccaggcgtcccggcagttatgtctacccttctggcaaacattaacgccttctacgcacacacaactgtctctaccaatatacaggtttctgctagcgacagattcgcagccacgaacttcgggagagagaagttcataaaactactggatcaactgcataattctctgcggatcgatctgagcaagtatagagaaaatttccctgcaagtaacacggaaaggctccaggatcttaaaagtactgtggacctactaaccagcattaccttttttcggatgaaggtgctcgaactgcagagcccacctaaagcctccatggttgtgaaggactgtgtgcgcgcatgtctcgacagtacttataaatatatttttgacaactgtcatgagttgtactcccagctcactgatccatccaaaaagcaggatatccctagggaggatcagggacctacgactaaaaatctggacttttggccacagctgattactctgatggttacgatcattgatgaagataagacagcatacactccagtgttaaatcagttcccccaggagctgaacatgggcaagatcagtgcagagattatgtggacgctatttgctctggacatgaaatatgctctagaggaacatgagaaccaaaggttatgcaaaagtaccgactatatgaatctgcacttcaaggttaaatggttttacaacgagtatgtccgcgaattgccagcctttaaggatgctgtgcccgaatatagtctgtggttcgagccttttgtgatgcagtggctcgatgaaaatgaggatgttagcatggagttcttacacggcgctctgggtagggataagaaggacgggttccaacagacttcagagcatgccctgttttcctgctccgtagtcgacgtgttcgcccagctgaaccagtcgtttgagatcattaagaagcttgagtgccccaacccggaagccctgtcacacctgatgagacggtttgcaaagaccattaacaaagtgttgctccaatacgcagcaatcgtgagcagtgatttctcttcccattgtgataaggagaacgtcccatgtatactgatgaataacatccagcaattgagggtccagctggagaaaatgtttgagtctatgggcggtaaggagcttgattccgaggctagtacaatcctcaaagaactccaagtgaagctgagtggagtgctggacgaactctcagtgacttacggagagtctttccaggtaatcatcgaggaatgcattaaacagatgtcctttgaactgaaccagatgcgcgctaacggaaacacaacatcaaataaaaatagtgcggctatggacgccgaaatcgtcctgcgctcgttgatggattttctcgataaaaccctctccttgtctgccaaaatatgtgaaaagaccgtgctcaagagggtcctgaaggaactgtggaaactggtcctcaacaaaatagagaaacagatagtccttccccctctcacagatcaaacaggcccacaaatgatctttattgccgcaaaagacctgggacagctgagtaagctaaaggagcacatgattcgggaggatgccagaggccttacccccaggcagtgcgcaattatggaagtggtcctggcaactattaagcagtatttccacgcaggaggcaacgggttaaaaaaaaactttctcgagaagtcgcctgatctccagagtcttaggtacgctctgtccctgtacacacagactacagatgccctgattaaaaaattcattgatacacagactagccagagcaggtccagcaaagacgcggttggacaaatctctgtgcatgtggatattaccgccacgccaggaactggagaccataaagtcactgtcaaagtgatcgctattaacgatctgaattggcagactaccgcaatgtttagaccattcgttgaggtctgcatcctcggtcccaacctcggcgataagaagcgcaaacaggggaccaagaccaagtccaacacttggtcacctaagtataatgagacgttccagttcatcctgggaaaggaaaatcggcctggagcatacgaattgcatcttagcgtgaaggattactgcttcgccagggaggatcgcatcattggaatgactgtgatccagctccagaatatcgcagaaaagggatcatacggtgcatggtacccactgttgaagaatatcagcatggatgagacaggtttgactatcctgcggatcctgtcccagcgcaccagcgatgacgtggctaaggagttcgtcagattaaagtctgagacaagatccaccgaggaatctgcgta

SEQ ID NO: 36933 - DNA, 6644 bp, Artificial Sequence
  derived and/or modified sequence
atggtggccaactttttcaaatcattgattctgccatacatccataagctgtgtaagggcatgttcacgaagaagctgggtaacactaataaaaacaaggagtaccgacagcagaaaaaggaccaagattttcccacagctggacaaaccaagtcaccaaaattcagttatacttttaagagcaccgtcaaaaagatcgccaagtgttcaagcacacacaatctgtctaccgaggaggatgaagccagcaaggagttcagcctctctccaactttcagctaccgggtcgcaatcgccaatgggctgcagaaaaacgcgaaggtgacaaactcggacaacgaagatctcctccaagaactttcatcgatcgaatcgagttactcagagtctctgaatgagctgcgcagctctacagagaaccaagcacagtcaacacacaccatgcctgtgcgcaggaaccgcaagtcctcgagctctttggctccatcagaaggctcttccgatggggagagaacactccatgggctgaagctaggggctctgaggaagctcagaaagtggaaaaaatctcaggagtgtgtgagttccgactccgagctcagtacaatgaagaaaagctggggaattagaagtaagtccctggaccggactgtcaggaaccctaagaccaacgccctggagcccggtttctcgtcctctggctgcatatcccagacacatgatgtcatggagatgatcttcaaggaacttcaaggaatcagtcagatcgaaaccgagctgagcgaactgcggggacacgtgaatgccttgaagcatagcatcgatgaaatctcttctagcgtggaagtcgtgcagagcgaaatcgagcagttgaggaccggcttcgttcagtcccggagggagacaagggacatacacgattacatcaaacatcttgggcatatgggcagcaaggctagcctgcgcttcctcaatgtcaccgaggaacggtttgagtacgtcgaatcagtggtataccaaatccttatcgataagatggggttcagtgacgctccaaacgccattaagattgaatttgcacagcggatcggacaccaacgcgactgccctaacgccaagcccagaccaattttagtttattttgagactcctcagcagcgcgactctgtattaaagaaatcgtacaaactgaaaggaacagggatcggtataagtaccgatatactcacgcacgacatccgagagagaaaggagaagggcatccctagtagccagacatacgagagcatggccataaaacttagcaccccagaacccaaaataaaaaaaaacaactggcagagccccgacgattctgacgaggacctggagtcagatctgaacaggaatagctacgcggtcctgagcaaatctgagcttctgactaaggggtcaaccagcaaaccctcaagtaaatcccatagcgccagatccaagaataaaaccgctaattcctcccgaatatccaacaaatctgattacgacaaaattagttctcagctgccagaatcagatattctggagaagcagacaactacacactatgcggacgcaacaccactgtggcacagtcaatctgatttcttcaccgcaaagctttccaggtccgaatcagacttctccaagctgtgtcaaagttactctgaggactttagcgagaaccaattctttacacgaacaaacggcagctctctgttatcttcaagcgatcgcgaactgtggcaaagaaaacaggaagggaccgccactctgtacgacagcccaaaggatcagcaccttaatggcggagtgcagggtatccaggggcagacagagactgaaaatacagagacagtggatagcgggatgtcgaacggcatggtctgcgccagcggcgaccggagtcattatagcgattcccagctgtctctgcatgaggacctttccccctggaaagagtggaaccaaggggctgacctcgggctggattcctccacccaggaagggttcgactacgagaccaactccctattcgaccaacagctggacgtgtacaataaggaccttgagtatctggggaaatgtcacagtgacctgcaggatgattcggagtcctacgacttgacacaagatgacaacagctcaccatgccccggtcttgataacgaaccgcaggggcaatgggtgggacagtacgattcttaccagggcgctaatagcaatgaactgtatcaaaatcagaaccagctgagtatgatgtatcggtcgcagtccgaacttcagagcgacgactctgaagatgctccccctaagagctggcatagtcgactctccatcgacttgagcgacaaaacctttagttttcctaagtttggatcaacccttcagcgggctaagtcagcactggaggtcgtgtggaataagtccacacaatcactctcggggtatgaagattccggatctagcttaatgggaaggttccggacattgtcgcagagtacagctaatgagtcttccacaactttagactccgatgtttacactgaaccgtactactataaggcggaagacgaggaggattacaccgagccagttgctgataatgagaccgactacgtggaggtcatggagcaggtcctagccaaactggagaatcgaacaagcatcactgagaccgacgaacagatgcaagcctatgaccacctctcttacgagaccccgtatgagacaccacaggacgagggctacgatggacctgccgatgatatggtgtctgaggaaggacttgagccacttaacgaaacttcagctgagatggagataagagaggacgaaaatcagaacataccagaacaaccagtggagatcacaaaaccgaaacgcatcaggccctccttcaaagaggccgcactgcgggcttataaaaaacagatggcagagttggaggagaagattctggccggagtgagcctggatgtggatctggaagcacggattgtttcagggaatgatctggatgcttccaagtttagtgccctgcaagtttgcggtggcgcagggggtggtctctatggaattgacagtatgcccgatttgaggcgtaaaaaaactctccctatcgtgagggacgtcctcctcactttggctgccaggaagtcaggcctgtccctggccatggtgattcgcactagcctcaataatgaggagctcaagatgcacgtctttaagaagaccttgcaggcccttatctatccgatgagttctactattcctcacaacttcgaagtttggacagctactacacccacgtactgttacgaatgtgagggcctactgtggggtatcgcacgacagggtatgaagtgcctcgagtgtggagttaagtgccacgaaaaatgccaggacctgctcaacgcagactgcctccagcgcgcagccgagaagtcttctaaacacggggctgaagacaagactcagaccatcataaccgctatgaaagagcggatgaaaattagagagaagaaccgccctgaagttttcgaggtaatccaggagatgtttcagattagtaaagaagattttgtacagtttaccaaagctgctaaacagtccgtccttgacggaaccagcaagtggagtgcgaaaattacaattaccgtagtgagcgctcaaggactccaggcgaaagacaaaacaggaagttctgacccttatgtgactgtgcaggtgggaaagaataagcggaggaccaagacaattttcggcaacctcaaccctgtgtgggacgaaaaattttactttgaatgtcacaattccactgacaggattaaggtcagagtatgggatgaggacgatgatataaagtctagagtgaagcagcatttcaagaaggagagcgacgatttcctgggacagactattgtcgaggtgcggacgttatcaggagaaatggatgtttggtacaaccttgagaagcgaaccgacaaaagcgccgtctctggagctattcgcctgaagatcaatgttgagattaaaggtgaagagaaggtcgccccataccacatccagtacacttgcttgcacgaaaacctctttcattatctcacagaagtgaagagcaacggaggagtgaaaatccccgaggtgaagggcgacgaagcgtggaaggttttctttgacgatgcctcccaggaaattgtggatgaatttgccatgcgctacgggattgaatctatctaccaggccatgactcactttagctgtttatctagcaagtacatgtgtccgggagtgccggcagtcatgagcacacttctcgcaaacatcaacgcgttttacgcccatactaccgtgagcaccaatatccaggtcagtgcctctgaccggtttgctgccaccaacttcggacgggaaaagttcatcaaattgctagatcagctccacaatagcctgcgcatcgatctgtctaagtacagagagaattttcctgcctctaacacggaaaggctccaagacctcaagagcactgtggatctgctgacttccatcactttttttagaatgaaggtactggagctgcagtctccacctaaggcctccatggtagtaaaagattgtgtaagggcgtgtctggactctacttataagtacatcttcgacaactgtcatgaactctattcccaattgaccgaccccagcaagaaacaggatattccccgtgaggaccagggaccaaccaccaagaatctggatttctggccgcagctgatcacacttatggtcacaattatcgacgaggataagactgcctacaccccagtcctgaatcagtttccgcaggagctgaatatgggcaagatctcagctgagattatgtggaccctttttgccctagatatgaagtacgctctagaggagcacgaaaatcagaggctgtgtaagtcgacggattacatgaaccttcattttaaggtaaagtggttctataacgagtacgttagagagctgcccgctttcaaagatgccgtccctgaatatagcctgtggttcgagccattcgttatgcagtggctggacgaaaatgaagatgtgtctatggaattcttacatggggctctaggacgggacaaaaaggacggcttccaacagacgtcagaacatgccctctttagttgtagcgtggtagacgtcttcgcccaactgaatcagagtttcgagatcatcaagaaactggagtgccccaatcccgaagctctgagccacttgatgcgcaggtttgccaagactattaataaggtgctcttgcagtatgcggcaatcgtcagctccgactttagctcgcactgcgataaggaaaatgtgccctgcatccttatgaacaatattcaacagttacgcgtgcagctggagaagatgtttgaaagcatgggtggaaaggaactggattctgaggccagtactattttaaaagagttacaggtcaagctgtccggtgtgctggacgagctgtcagttacctacggcgaatcatttcaagttatcatcgaggagtgtatcaagcagatgagctttgagttaaatcaaatgcgtgccaatgggaatacgacaagcaataagaactccgccgctatggacgccgagatcgttttaagatccctcatggatttcctcgataaaacattgagcctgagcgctaagatctgtgaaaaaactgtgttaaagcgtgtgctcaaggaactgtggaaacttgtgttgaataaaatcgagaaacaaatcgtattgcctccattgactgaccagacagggccacagatgatatttatcgcggctaaagatttgggccaactctctaaactgaaagagcatatgatccgcgaagacgctcgcggtctgacacctcgccaatgtgctatcatggaggtggtgctcgctacaattaagcagtatttccatgccggagggaacggattaaagaaaaatttcctcgagaaatcgcctgacttgcagtccctacggtacgccctcagtttgtacactcagactacagatgcgctcattaagaagttcatagatacacagacctcacaaagtcggtcaagcaaggacgccgtgggccagattagtgtgcatgtcgacattactgctactccaggaactggagatcacaaggtgacagtgaaagtgatagctattaacgatctcaattggcagactaccgccatgtttagaccgtttgtggaggtatgcatcctgggccctaatctgggcgacaaaaaacgaaaacaggggacaaagactaagagcaatacatggtcccccaagtataacgaaacattccaatttattctgggaaaggagaataggcccggagcctatgaactgcacttgagcgtaaaggattactgcttcgccagggaagataggatcatagggatgacggtgatccagttgcaaaacattgccgaaaagggtagctacggcgcatggtaccctttgctcaaaaacatttccatggatgagaccggcctgaccattctgaggatcctctcgcagagaacatccgacgacgtcgccaaggagtttgttcgtcttaagagcgagaccagaagcacggaagagtctgccta

SEQ ID NO: 36934 - DNA, 6930 bp, Artificial Sequence
  derived and/or modified sequence
atggtggctaattttttcaagagcttgattttaccttacattcataagctttgcaaaggaatgtttacaaagaaattgggaaatacaaacaaaaacaaagagtatcgtcagcagaaaaaggatcaagacttccccactgctggccagaccaaatcccccaaattttcttacacttttaaaagcactgtaaagaagattgcaaagtgttcatccactcacaacttatccactgaggaagacgaggccagtaaagagttttccctctcaccaacattcagttaccgagtagctattgccaatggcctacaaaagaatgctaaagtaaccaacagtgataatgaggatctgcttcaagagctctcttcaatcgagagttcctactcagaatcattaaatgaactaaggagtagcacagaaaaccaggcacaatcaacacacacaatgccagttagacgcaacagaaagagttcaagcagccttgcaccctctgagggcagctctgacggggagcgtactctacatggcttaaaactgggagctttacgaaaactgagaaaatggaaaaagagtcaagaatgtgtctcctcagactcagagttaagcaccatgaaaaaatcctggggaataagaagtaagtctttggacagaactgtccgaaacccaaagacaaatgccctggagccagggttcagttcctctggctgcattagccaaacacatgatgtcatggaaatgatctttaaggaacttcagggaataagtcagattgaaacagaactttctgaactacgagggcacgtcaatgctctcaagcactccatcgatgagatctccagcagtgtggaggttgtacaaagtgaaattgagcagttgcgcacagggtttgtccagtctcggagggaaactagagacatccatgattatattaagcacttaggtcatatgggtagcaaggcaagcctgagatttttaaatgtgactgaagaaagatttgaatatgttgaaagcgtggtgtaccaaattctaatagataaaatgggtttttcagatgcaccaaatgctattaaaattgaatttgctcagaggataggacaccagagagactgcccaaatgcaaagcctcgacccatacttgtgtactttgaaacccctcaacaaagggattctgtcttaaaaaagtcatataaactcaaaggaacaggcattggaatctcaacagatattctaactcatgacatcagagaaagaaaagagaaagggataccatcctcccagacatatgagagcatggctataaagttgtctactccagagccaaaaatcaagaagaacaattggcagtcacctgatgacagtgatgaagatcttgaatctgacctcaatagaaacagttacgctgtgctttccaagtcagagcttctaacaaagggaagtacttccaagccaagctcaaaatcacacagtgctagatccaagaataaaactgctaatagcagcagaatttcaaataaatcagattatgataaaatctcctcacagttgccagaatcagatatcttggaaaagcaaaccacaacccattatgcagatgcaacacctctctggcactcacagagtgattttttcactgctaaacttagtcgttctgaatcagatttttccaaattgtgtcagtcttactcagaagatttttcagaaaatcagtttttcactagaactaatggaagctctctcctgtcatcttcggaccgggagctatggcagaggaaacaggaaggaacagcgaccctgtatgacagtcccaaggaccagcatttgaatggaggtgttcagggtatccaagggcagactgaaactgaaaacacagaaactgtggatagtggaatgagtaatggcatggtgtgtgcatctggagaccggagtcattacagtgattctcagctctctttacatgaggatctttctccatggaaggaatggaatcaaggagctgatttaggcttggattcatccacccaggaaggttttgattatgaaacaaacagtctttttgaccaacagcttgatgtttacaataaagacctagaatacttgggaaagtgccacagtgatcttcaagatgactcagagagctacgacttaactcaagatgacaattcttctccatgccctggcttggataatgaaccacaaggccagtgggttggccaatatgattcttatcagggagctaattctaatgagctataccaaaatcaaaaccagttgtccatgatgtatcgaagtcaaagtgaattgcaaagtgatgattcagaggatgccccacccaaatcatggcatagtcgattaagcattgacctttctgataagactttcagcttcccaaaatttggatctacactgcagagggctaaatcagccttggaagtagtatggaacaaaagcacacagagtctgagtgggtatgaggacagtggctcttcattaatggggagatttcggacattatctcaatcaactgcaaatgagtcaagtaccacacttgactctgatgtctacacggagccctattactataaagcagaggatgaggaagattatactgaaccagtggctgacaatgaaacagattatgttgaagtcatggaacaagtccttgctaaactagaaaacaggactagtattactgaaacagatgaacaaatgcaagcatatgatcacctttcatatgaaacaccttatgaaaccccacaagatgagggttatgatggtccagcagatgatatggttagtgaagaggggttagaacccttaaatgaaacatcagctgagatggaaataagagaagatgaaaaccaaaacattcctgaacagccagtggagatcacaaagccaaagagaattcgtccttctttcaaagaagcagctttaagggcctataaaaagcaaatggcagagttggaagagaagatcttggctggagatagcagttctgtggatgaaaaggctcgaatagtaagtggcaatgatttggatgcttccaaattttctgcactccaggtgtgtggtggggctggaggtggactttatggtattgacagcatgccggatcttcgcagaaaaaaaactttgcctattgtccgagatgtggccatgaccctggctgcccggaaatctggactctccctggctatggtgattaggacatccctaaataatgaggaactgaaaatgcacgtcttcaagaagaccttgcaggcactgatctaccctatgtcttctaccatcccacacaattttgaggtctggacggctaccacacccacctactgttatgagtgtgaagggctcctgtggggcattgcaaggcaaggcatgaagtgtctggagtgtggagtgaaatgccacgaaaagtgtcaggacctgctaaacgctgactgcttgcagagagcagcagaaaagagttctaaacatggtgccgaagacaagactcagaccattattacagcaatgaaagaaagaatgaagatcagggagaaaaaccggccagaagtatttgaagtaatccaggaaatgtttcagatttctaaagaagattttgtgcagtttacaaaggcggccaaacagagtgtactggatgggacatctaagtggtctgcaaaaataaccattacagtggtttctgcacagggtctacaggcaaaagataaaacagggtctagtgatccatatgttacagttcaagttggaaagaacaaaagaagaacaaaaaccatttttggaaatttgaatccagtatgggatgagaagttttattttgagtgtcataactccacagatcgaatcaaagtcagagtatgggatgaagatgatgatattaaatccagagtcaagcaacatttcaaaaaggagtcagatgattttctgggacaaacaattgtagaagtgaggaccttgagtggagaaatggatgtctggtacaacttagagaaaaggacagataagtcagctgtatctggggccatacgattgaaaatcaatgtggagataaaaggagaagagaaggttgctccatatcatattcaatatacatgtttacatgagaatctgttccattacttgactgaagtgaaatctaatggtggagtgaaaatcccagaagtcaaaggggatgaagcctggaaggttttctttgatgatgcttcccaagaaatagttgatgaatttgctatgcgttatggaattgaatccatttatcaagctatgacgcacttttcatgtctgtcttctaaatacatgtgccccggtgtccctgccgtcatgagcaccttgctggctaatataaatgctttttatgctcacacaacagtttcaacaaacatacaggtttctgcctcagatcgatttgctgctaccaactttggtagggaaaaattcataaaactactggaccagttacataactctttgaggattgatctgtcaaagtatagggaaaactttcctgcaagcaatactgaaagactgcaagacctgaaatcaactgttgacctgttaacaagtatcaccttttttaggatgaaggttctggagctgcaaagccccccaaaagcgagcatggtggtgaaggactgtgtaagggcttgcctggattctacatacaagtatatttttgacaactgccatgaactctactcccagctaacagacccgagtaagaaacaggatattcctcgtgaagatcagggaccaaccaccaagaatttggatttttggccccaacttattacactgatggttactattattgatgaggataaaactgcctacacacctgtcctgaatcagtttcctcaagagctgaacatgggaaaaataagtgccgaaattatgtggactctttttgctctggatatgaaatatgcattagaagaacatgaaaatcagcggttatgcaagagcaccgattatatgaatttgcatttcaaagttaaatggttttataatgaatatgtgcgtgaacttcctgccttcaaggatgctgttcctgaatactccttgtggtttgaaccttttgtcatgcaatggctagatgaaaacgaagatgtgtcaatggaattccttcatggagcactgggaagagacaaaaaagatggattccagcagacatctgagcatgctctcttttcttgctccgtggttgatgtctttgctcagctgaatcagagctttgaaattattaagaaactggaatgccctaatcctgaagcattatctcacttaatgagaagatttgcaaagactatcaataaagtgctgctccagtatgctgcaattgtatcaagtgatttcagttcacattgtgataaggaaaatgtgccctgtatcttgatgaacaatattcaacaattgcgggtccagctggaaaaaatgtttgaatccatgggagggaaggagctagattctgaagctagtactattctaaaagaacttcaggttaagctcagtggggtcctggatgagctcagcgtcacttatggtgaaagtttccaggttataattgaagagtgtataaaacagatgagtttcgaactaaatcaaatgagagcaaatggaaacaccacatctaataagaacagtgcagcaatggatgcagagattgtgttaagatctcttatggattttttggacaaaacattaagtctctcagcaaaaatctgtgagaaaacagtcctaaagcgagttttaaaagagttatggaagctagttctcaacaaaatagaaaaacaaattgttcttcctcctctgacagatcaaacaggaccccagatgattttcattgcagctaaagatcttggacaattatccaaactgaaggagcacatgattcgagaggatgccaggggtctgacgccaagacaatgcgctataatggaggtagtcctggctaccatcaagcaatactttcatgcaggaggaaatggcctgaaaaagaatttcttggagaaaagcccagatcttcagtctctgagatatgctctcagtctttatacccaaactactgatgccttgataaagaaattcatagatactcaaacctcacagagtcgttcctccaaagatgccgtgggtcagatatctgttcatgtggacatcactgccaccccaggaacgggagatcataaagtcactgtaaaagtgattgctattaatgacctaaactggcagaccacagcaatgttccgcccctttgtggaagtttgtatactgggacccaaccttggagacaagaagagaaaacaaggcacaaaaacaaaaagcaacacatggtcaccaaagtacaatgaaacatttcagttcattctcggaaaggaaaatcgaccaggggcttatgaacttcatctctcagttaaggattactgctttgccagagaagatcgaattatcggaatgacagtcattcagctacagaacatagcagaaaagggaagctatggggcatggtatcctcttctgaaaaatatctctatggatgaaactggtttgactatccttagaatactctctcagaggaccagtgatgatgtggctaaagaatttgtaagacttaaatctgaaacaagatctactgaagagagtgcttgaaacaaacactgcaagctaaatacataactataattgtttgactactgcatgcatgtgcaaatacatgggaatgtttagttcactacatttcaatgtttgccagtactcatgtacgatgtctacaaggtatgtaaaaaacctgctgaacttttataccaattctggtctttgggaaatcagtgttccatgaagtgccaaaattatgatgtaaagtgaaatatcaagaacaccttttaacatgtttattttgtttctttacccatttcacattcattaaacataatt

SEQ ID NO: 36935 - DNA, 8134 bp, Artificial Sequence
  derived and/or modified sequence
atggtggctaattttttcaagagcttgattttaccttacattcataagctttgcaaaggaatgtttacaaagaaattgggaaatacaaacaaaaacaaagagtatcgtcagcagaaaaaggatcaagacttccccactgctggccagaccaaatcccccaaattttcttacacttttaaaagcactgtaaagaagattgcaaagtgttcatccactcacaacttatccactgaggaagacgaggccagtaaagagttttccctctcaccaacattcagttaccgagtagctattgccaatggcctacaaaagaatgctaaagtaaccaacagtgataatgaggatctgcttcaagagctctcttcaatcgagagttcctactcagaatcattaaatgaactaaggagtagcacagaaaaccaggcacaatcaacacacacaatgccagttagacgcaacagaaagagttcaagcagccttgcaccctctgagggcagctctgacggggagcgtactctacatggcttaaaactgggagctttacgaaaactgagaaaatggaaaaagagtcaagaatgtgtctcctcagactcagagttaagcaccatgaaaaaatcctggggaataagaagtaagtctttggacagaactgtccgaaacccaaagacaaatgccctggagccagggttcagttcctctggctgcattagccaaacacatgatgtcatggaaatgatctttaaggaacttcagggaataagtcagattgaaacagaactttctgaactacgagggcacgtcaatgctctcaagcactccatcgatgagatctccagcagtgtggaggttgtacaaagtgaaattgagcagttgcgcacagggtttgtccagtctcggagggaaactagagacatccatgattatattaagcacttaggtcatatgggtagcaaggcaagcctgagatttttaaatgtgactgaagaaagatttgaatatgttgaaagcgtggtgtaccaaattctaatagataaaatgggtttttcagatgcaccaaatgctattaaaattgaatttgctcagaggataggacaccagagagactgcccaaatgcaaagcctcgacccatacttgtgtactttgaaacccctcaacaaagggattctgtcttaaaaaagtcatataaactcaaaggaacaggcattggaatctcaacagatattctaactcatgacatcagagaaagaaaagagaaagggataccatcctcccagacatatgagagcatggctataaagttgtctactccagagccaaaaatcaagaagaacaattggcagtcacctgatgacagtgatgaagatcttgaatctgacctcaatagaaacagttacgctgtgctttccaagtcagagcttctaacaaagggaagtacttccaagccaagctcaaaatcacacagtgctagatccaagaataaaactgctaatagcagcagaatttcaaataaatcagattatgataaaatctcctcacagttgccagaatcagatatcttggaaaagcaaaccacaacccattatgcagatgcaacacctctctggcactcacagagtgattttttcactgctaaacttagtcgttctgaatcagatttttccaaattgtgtcagtcttactcagaagatttttcagaaaatcagtttttcactagaactaatggaagctctctcctgtcatcttcggaccgggagctatggcagaggaaacaggaaggaacagcgaccctgtatgacagtcccaaggaccagcatttgaatggaggtgttcagggtatccaagggcagactgaaactgaaaacacagaaactgtggatagtggaatgagtaatggcatggtgtgtgcatctggagaccggagtcattacagtgattctcagctctctttacatgaggatctttctccatggaaggaatggaatcaaggagctgatttaggcttggattcatccacccaggaaggttttgattatgaaacaaacagtctttttgaccaacagcttgatgtttacaataaagacctagaatacttgggaaagtgccacagtgatcttcaagatgactcagagagctacgacttaactcaagatgacaattcttctccatgccctggcttggataatgaaccacaaggccagtgggttggccaatatgattcttatcagggagctaattctaatgagctataccaaaatcaaaaccagttgtccatgatgtatcgaagtcaaagtgaattgcaaagtgatgattcagaggatgccccacccaaatcatggcatagtcgattaagcattgacctttctgataagactttcagcttcccaaaatttggatctacactgcagagggctaaatcagccttggaagtagtatggaacaaaagcacacagagtctgagtgggtatgaggacagtggctcttcattaatggggagatttcggacattatctcaatcaactgcaaatgagtcaagtaccacacttgactctgatgtctacacggagccctattactataaagcagaggatgaggaagattatactgaaccagtggctgacaatgaaacagattatgttgaagtcatggaacaagtccttgctaaactagaaaacaggactagtattactgaaacagatgaacaaatgcaagcatatgatcacctttcatatgaaacaccttatgaaaccccacaagatgagggttatgatggtccagcagatgatatggttagtgaagaggggttagaacccttaaatgaaacatcagctgagatggaaataagagaagatgaaaaccaaaacattcctgaacagccagtggagatcacaaagccaaagagaattcgtccttctttcaaagaagcagctttaagggcctataaaaagcaaatggcagagttggaagagaagatcttggctggagatagcagttctgtggatgaaaaggctcgaatagtaagtggcaatgatttggatgcttccaaattttctgcactccaggtgtgtggtggggctggaggtggactttatggtattgacagcatgccggatcttcgcagaaaaaaaactttgcctattgtccgagatgtgaccctggctgcccggaaatctggactctccctggctatggtgattaggacatccctaaataatgaggaactgaaaatgcacgtcttcaagaagaccttgcaggcactgatctaccctatgtcttctaccatcccacacaattttgaggtctggacggctaccacacccacctactgttatgagtgtgaagggctcctgtggggcattgcaaggcaaggcatgaagtgtctggagtgtggagtgaaatgccacgaaaagtgtcaggacctgctaaacgctgactgcttgcagagagcagcagaaaagagttctaaacatggtgccgaagacaagactcagaccattattacagcaatgaaagaaagaatgaagatcagggagaaaaaccggccagaagtatttgaagtaatccaggaaatgtttcagatttctaaagaagattttgtgcagtttacaaaggcggccaaacagagtgtactggatgggacatctaagtggtctgcaaaaataaccattacagtggtttctgcacagggtctacaggcaaaagataaaacagggtctagtgatccatatgttacagttcaagttggaaagaacaaaagaagaacaaaaaccatttttggaaatttgaatccagtatgggatgagaagttttattttgagtgtcataactccacagatcgaatcaaagtcagagtatgggatgaagatgatgatattaaatccagagtcaagcaacatttcaaaaaggagtcagatgattttctgggacaaacaattgtagaagtgaggaccttgagtggagaaatggatgtctggtacaacttagagaaaaggacagataagtcagctgtatctggggccatacgattgaaaatcaatgtggagataaaaggagaagagaaggttgctccatatcatattcaatatacatgtttacatgagaatctgttccattacttgactgaagtgaaatctaatggtggagtgaaaatcccagaagtcaaaggggatgaagcctggaaggttttctttgatgatgcttcccaagaaatagttgatgaatttgctatgcgttatggaattgaatccatttatcaagctatgacgcacttttcatgtctgtcttctaaatacatgtgccccggtgtccctgccgtcatgagcaccttgctggctaatataaatgctttttatgctcacacaacagtttcaacaaacatacaggtttctgcctcagatcgatttgctgctaccaactttggtagggaaaaattcataaaactactggaccagttacataactctttgaggattgatctgtcaaagtatagggaaaactttcctgcaagcaatactgaaagactgcaagacctgaaatcaactgttgacctgttaacaagtatcaccttttttaggatgaaggttctggagctgcaaagccccccaaaagcgagcatggtggtgaaggactgtgtaagggcttgcctggattctacatacaagtatatttttgacaactgccatgaactctactcccagctaacagacccgagtaagaaacaggatattcctcgtgaagatcagggaccaaccaccaagaatttggatttttggccccaacttattacactgatggttactattattgatgaggataaaactgcctacacacctgtcctgaatcagtttcctcaagagctgaacatgggaaaaataagtgccgaaattatgtggactctttttgctctggatatgaaatatgcattagaagaacatgaaaatcagcggttatgcaagagcaccgattatatgaatttgcatttcaaagttaaatggttttataatgaatatgtgcgtgaacttcctgccttcaaggatgctgttcctgaatactccttgtggtttgaaccttttgtcatgcaatggctagatgaaaacgaagatgtgtcaatggaattccttcatggagcactgggaagagacaaaaaagatggattccagcagacatctgagcatgctctcttttcttgctccgtggttgatgtctttgctcagctgaatcagagctttgaaattattaagaaactggaatgccctaatcctgaagcattatctcacttaatgagaagatttgcaaagactatcaataaagtgctgctccagtatgctgcaattgtatcaagtgatttcagttcacattgtgataaggaaaatgtgccctgtatcttgatgaacaatattcaacaattgcgggtccagctggaaaaaatgtttgaatccatgggagggaaggagctagattctgaagctagtactattctaaaagaacttcaggttaagctcagtggggtcctggatgagctcagcgtcacttatggtgaaagtttccaggttataattgaagagtgtataaaacagatgagtttcgaactaaatcaaatgagagcaaatggaaacaccacatctaataagaacagtgcagcaatggatgcagagattgtgttaagatctcttatggattttttggacaaaacattaagtctctcagcaaaaatctgtgagaaaacagtcctaaagcgagttttaaaagagttatggaagctagttctcaacaaaatagaaaaacaaattgttcttcctcctctgacagatcaaacaggaccccagatgattttcattgcagctaaagatcttggacaattatccaaactgaaggagcacatgattcgagaggatgccaggggtctgacgccaagacaatgcgctataatggaggtagtcctggctaccatcaagcaatactttcatgcaggaggaaatggcctgaaaaagaatttcttggagaaaagcccagatcttcagtctctgagatatgctctcagtctttatacccaaactactgatgccttgataaagaaattcatagatactcaaacctcacagagtcgttcctccaaagatgccgtgggtcagatatctgttcatgtggacatcactgccaccccaggaacgggagatcataaagtcactgtaaaagtgattgctattaatgacctaaactggcagaccacagcaatgttccgcccctttgtggaagtttgtatactgggacccaaccttggagacaagaagagaaaacaaggcacaaaaacaaaaagcaacacatggtcaccaaagtacaatgaaacatttcagttcattctcggaaaggaaaatcgaccaggggcttatgaacttcatctctcagttaaggattactgctttgccagagaagatcgaattatcggaatgacagtcattcagctacagaacatagcagaaaagggaagctatggggcatggtatcctcttctgaaaaatatctctatggatgaaactggtttgactatccttagaatactctctcagaggaccagtgatgatgtggctaaagaatttgtaagacttaaatctgaaacaagatctactgaagagagtgcttgaaacaaacactgcaagctaaatacataactataattgtttgactactgcatgcatgtgcaaatacatgggaatgtttagttcactacatttcaatgtttgccagtactcatgtacgatgtctacaaggtatgtaaaaaacctgctgaacttttataccaattctggtctttgggaaatcagtgttccatgaagtgccaaaattatgatgtaaagtgaaatatcaagaacaccttttaacatgtttattttgtttctttacccatttcacattcattaaacataatttttaaaaactagtcttttgagtttgcccatcagttgtctttgttaaatgagattatattgcccatagatcagaaaacatttattactcaatttccattttatttacttacctcattatagatgtcttacaaatacccttttctaccataactagaaatgcagtcacttctagaaagcatttgtaattttatagtcgcagatattgtgatttttgcatacacattaaaatagaaaaggtgggaaatattttctgctgaccagtttccaacctttctgaaatatcactgtgaagaaatgctgttaaagcaaacttacataaagcaatgctagagtttgttaacaatgtttgatatatattgacaaaactttgttctctaaaactgccaagatcacatcacatttgtaaaaatggtaagttaatgcatttgtcatatagtgttatgtcttggctttaccatatttcattctttaaaaagtcattaatggtttagaaatgggatggaaagtttactgaaaatacctgtaagtaactatattgttaatatcttccctctgacagttatgactctataatcagttcaatgctttatttttaaaaatattcaatgattagtattgaatgcagcattactatatattgtactgatgccaaaagtcatgttttcatccacttagtgaaaaaatagtaaaattaagtcggaagaaattgcttaaaattttgtaatttgtatttataagccccaaatgcatcaaatgcagtaggagaacaatgtaatacagcttggtacctaaaaatatagctaagttggtttttgaatataaaacagtttatgaatatgtgcattttctgtattgttatgatttgactttttagagtctatgccaaaatatatggctgtaaaacagtactttgtaattataacttatggtcataactgttagtggactacttacagaagcagaaacaagagcctgttatgattgtgctttgtgaacaagctgatctaatacgttaagtacagaagtgcttagtatcatgactgtcagaaccattctgcaactgagtatgaaatcacagaccagtgaggtgagctaattcatgttaaactgttaggccactgctttgttaatgactcctctaaatgcatagtgtgatgcgatcctctggcatatgctttaataaatggatgtatattgagcacatgcagca

SEQ ID NO: 36936 - DNA, 8140 bp, Artificial Sequence
  derived and/or modified sequence
atggtggctaattttttcaagagcttgattttaccttacattcataagctttgcaaaggaatgtttacaaagaaattgggaaatacaaacaaaaacaaagagtatcgtcagcagaaaaaggatcaagacttccccactgctggccagaccaaatcccccaaattttcttacacttttaaaagcactgtaaagaagattgcaaagtgttcatccactcacaacttatccactgaggaagacgaggccagtaaagagttttccctctcaccaacattcagttaccgagtagctattgccaatggcctacaaaagaatgctaaagtaaccaacagtgataatgaggatctgcttcaagagctctcttcaatcgagagttcctactcagaatcattaaatgaactaaggagtagcacagaaaaccaggcacaatcaacacacacaatgccagttagacgcaacagaaagagttcaagcagccttgcaccctctgagggcagctctgacggggagcgtactctacatggcttaaaactgggagctttacgaaaactgagaaaatggaaaaagagtcaagaatgtgtctcctcagactcagagttaagcaccatgaaaaaatcctggggaataagaagtaagtctttggacagaactgtccgaaacccaaagacaaatgccctggagccagggttcagttcctctggctgcattagccaaacacatgatgtcatggaaatgatctttaaggaacttcagggaataagtcagattgaaacagaactttctgaactacgagggcacgtcaatgctctcaagcactccatcgatgagatctccagcagtgtggaggttgtacaaagtgaaattgagcagttgcgcacagggtttgtccagtctcggagggaaactagagacatccatgattatattaagcacttaggtcatatgggtagcaaggcaagcctgagatttttaaatgtgactgaagaaagatttgaatatgttgaaagcgtggtgtaccaaattctaatagataaaatgggtttttcagatgcaccaaatgctattaaaattgaatttgctcagaggataggacaccagagagactgcccaaatgcaaagcctcgacccatacttgtgtactttgaaacccctcaacaaagggattctgtcttaaaaaagtcatataaactcaaaggaacaggcattggaatctcaacagatattctaactcatgacatcagagaaagaaaagagaaagggataccatcctcccagacatatgagagcatggctataaagttgtctactccagagccaaaaatcaagaagaacaattggcagtcacctgatgacagtgatgaagatcttgaatctgacctcaatagaaacagttacgctgtgctttccaagtcagagcttctaacaaagggaagtacttccaagccaagctcaaaatcacacagtgctagatccaagaataaaactgctaatagcagcagaatttcaaataaatcagattatgataaaatctcctcacagttgccagaatcagatatcttggaaaagcaaaccacaacccattatgcagatgcaacacctctctggcactcacagagtgattttttcactgctaaacttagtcgttctgaatcagatttttccaaattgtgtcagtcttactcagaagatttttcagaaaatcagtttttcactagaactaatggaagctctctcctgtcatcttcggaccgggagctatggcagaggaaacaggaaggaacagcgaccctgtatgacagtcccaaggaccagcatttgaatggaggtgttcagggtatccaagggcagactgaaactgaaaacacagaaactgtggatagtggaatgagtaatggcatggtgtgtgcatctggagaccggagtcattacagtgattctcagctctctttacatgaggatctttctccatggaaggaatggaatcaaggagctgatttaggcttggattcatccacccaggaaggttttgattatgaaacaaacagtctttttgaccaacagcttgatgtttacaataaagacctagaatacttgggaaagtgccacagtgatcttcaagatgactcagagagctacgacttaactcaagatgacaattcttctccatgccctggcttggataatgaaccacaaggccagtgggttggccaatatgattcttatcagggagctaattctaatgagctataccaaaatcaaaaccagttgtccatgatgtatcgaagtcaaagtgaattgcaaagtgatgattcagaggatgccccacccaaatcatggcatagtcgattaagcattgacctttctgataagactttcagcttcccaaaatttggatctacactgcagagggctaaatcagccttggaagtagtatggaacaaaagcacacagagtctgagtgggtatgaggacagtggctcttcattaatggggagatttcggacattatctcaatcaactgcaaatgagtcaagtaccacacttgactctgatgtctacacggagccctattactataaagcagaggatgaggaagattatactgaaccagtggctgacaatgaaacagattatgttgaagtcatggaacaagtccttgctaaactagaaaacaggactagtattactgaaacagatgaacaaatgcaagcatatgatcacctttcatatgaaacaccttatgaaaccccacaagatgagggttatgatggtccagcagatgatatggttagtgaagaggggttagaacccttaaatgaaacatcagctgagatggaaataagagaagatgaaaaccaaaacattcctgaacagccagtggagatcacaaagccaaagagaattcgtccttctttcaaagaagcagctttaagggcctataaaaagcaaatggcagagttggaagagaagatcttggctggagtttccttggatgtagatctagaggctcgaatagtaagtggcaatgatttggatgcttccaaattttctgcactccaggtgtgtggtggggctggaggtggactttatggtattgacagcatgccggatcttcgcagaaaaaaaactttgcctattgtccgagatgtgcttctgaccctggctgcccggaaatctggactctccctggctatggtgattaggacatccctaaataatgaggaactgaaaatgcacgtcttcaagaagaccttgcaggcactgatctaccctatgtcttctaccatcccacacaattttgaggtctggacggctaccacacccacctactgttatgagtgtgaagggctcctgtggggcattgcaaggcaaggcatgaagtgtctggagtgtggagtgaaatgccacgaaaagtgtcaggacctgctaaacgctgactgcttgcagagagcagcagaaaagagttctaaacatggtgccgaagacaagactcagaccattattacagcaatgaaagaaagaatgaagatcagggagaaaaaccggccagaagtatttgaagtaatccaggaaatgtttcagatttctaaagaagattttgtgcagtttacaaaggcggccaaacagagtgtactggatgggacatctaagtggtctgcaaaaataaccattacagtggtttctgcacagggtctacaggcaaaagataaaacagggtctagtgatccatatgttacagttcaagttggaaagaacaaaagaagaacaaaaaccatttttggaaatttgaatccagtatgggatgagaagttttattttgagtgtcataactccacagatcgaatcaaagtcagagtatgggatgaagatgatgatattaaatccagagtcaagcaacatttcaaaaaggagtcagatgattttctgggacaaacaattgtagaagtgaggaccttgagtggagaaatggatgtctggtacaacttagagaaaaggacagataagtcagctgtatctggggccatacgattgaaaatcaatgtggagataaaaggagaagagaaggttgctccatatcatattcaatatacatgtttacatgagaatctgttccattacttgactgaagtgaaatctaatggtggagtgaaaatcccagaagtcaaaggggatgaagcctggaaggttttctttgatgatgcttcccaagaaatagttgatgaatttgctatgcgttatggaattgaatccatttatcaagctatgacgcacttttcatgtctgtcttctaaatacatgtgccccggtgtccctgccgtcatgagcaccttgctggctaatataaatgctttttatgctcacacaacagtttcaacaaacatacaggtttctgcctcagatcgatttgctgctaccaactttggtagggaaaaattcataaaactactggaccagttacataactctttgaggattgatctgtcaaagtatagggaaaactttcctgcaagcaatactgaaagactgcaagacctgaaatcaactgttgacctgttaacaagtatcaccttttttaggatgaaggttctggagctgcaaagccccccaaaagcgagcatggtggtgaaggactgtgtaagggcttgcctggattctacatacaagtatatttttgacaactgccatgaactctactcccagctaacagacccgagtaagaaacaggatattcctcgtgaagatcagggaccaaccaccaagaatttggatttttggccccaacttattacactgatggttactattattgatgaggataaaactgcctacacacctgtcctgaatcagtttcctcaagagctgaacatgggaaaaataagtgccgaaattatgtggactctttttgctctggatatgaaatatgcattagaagaacatgaaaatcagcggttatgcaagagcaccgattatatgaatttgcatttcaaagttaaatggttttataatgaatatgtgcgtgaacttcctgccttcaaggatgctgttcctgaatactccttgtggtttgaaccttttgtcatgcaatggctagatgaaaacgaagatgtgtcaatggaattccttcatggagcactgggaagagacaaaaaagatggattccagcagacatctgagcatgctctcttttcttgctccgtggttgatgtctttgctcagctgaatcagagctttgaaattattaagaaactggaatgccctaatcctgaagcattatctcacttaatgagaagatttgcaaagactatcaataaagtgctgctccagtatgctgcaattgtatcaagtgatttcagttcacattgtgataaggaaaatgtgccctgtatcttgatgaacaatattcaacaattgcgggtccagctggaaaaaatgtttgaatccatgggagggaaggagctagattctgaagctagtactattctaaaagaacttcaggttaagctcagtggggtcctggatgagctcagcgtcacttatggtgaaagtttccaggttataattgaagagtgtataaaacagatgagtttcgaactaaatcaaatgagagcaaatggaaacaccacatctaataagaacagtgcagcaatggatgcagagattgtgttaagatctcttatggattttttggacaaaacattaagtctctcagcaaaaatctgtgagaaaacagtcctaaagcgagttttaaaagagttatggaagctagttctcaacaaaatagaaaaacaaattgttcttcctcctctgacagatcaaacaggaccccagatgattttcattgcagctaaagatcttggacaattatccaaactgaaggagcacatgattcgagaggatgccaggggtctgacgccaagacaatgcgctataatggaggtagtcctggctaccatcaagcaatactttcatgcaggaggaaatggcctgaaaaagaatttcttggagaaaagcccagatcttcagtctctgagatatgctctcagtctttatacccaaactactgatgccttgataaagaaattcatagatactcaaacctcacagagtcgttcctccaaagatgccgtgggtcagatatctgttcatgtggacatcactgccaccccaggaacgggagatcataaagtcactgtaaaagtgattgctattaatgacctaaactggcagaccacagcaatgttccgcccctttgtggaagtttgtatactgggacccaaccttggagacaagaagagaaaacaaggcacaaaaacaaaaagcaacacatggtcaccaaagtacaatgaaacatttcagttcattctcggaaaggaaaatcgaccaggggcttatgaacttcatctctcagttaaggattactgctttgccagagaagatcgaattatcggaatgacagtcattcagctacagaacatagcagaaaagggaagctatggggcatggtatcctcttctgaaaaatatctctatggatgaaactggtttgactatccttagaatactctctcagaggaccagtgatgatgtggctaaagaatttgtaagacttaaatctgaaacaagatctactgaagagagtgcttgaaacaaacactgcaagctaaatacataactataattgtttgactactgcatgcatgtgcaaatacatgggaatgtttagttcactacatttcaatgtttgccagtactcatgtacgatgtctacaaggtatgtaaaaaacctgctgaacttttataccaattctggtctttgggaaatcagtgttccatgaagtgccaaaattatgatgtaaagtgaaatatcaagaacaccttttaacatgtttattttgtttctttacccatttcacattcattaaacataatttttaaaaactagtcttttgagtttgcccatcagttgtctttgttaaatgagattatattgcccatagatcagaaaacatttattactcaatttccattttatttacttacctcattatagatgtcttacaaatacccttttctaccataactagaaatgcagtcacttctagaaagcatttgtaattttatagtcgcagatattgtgatttttgcatacacattaaaatagaaaaggtgggaaatattttctgctgaccagtttccaacctttctgaaatatcactgtgaagaaatgctgttaaagcaaacttacataaagcaatgctagagtttgttaacaatgtttgatatatattgacaaaactttgttctctaaaactgccaagatcacatcacatttgtaaaaatggtaagttaatgcatttgtcatatagtgttatgtcttggctttaccatatttcattctttaaaaagtcattaatggtttagaaatgggatggaaagtttactgaaaatacctgtaagtaactatattgttaatatcttccctctgacagttatgactctataatcagttcaatgctttatttttaaaaatattcaatgattagtattgaatgcagcattactatatattgtactgatgccaaaagtcatgttttcatccacttagtgaaaaaatagtaaaattaagtcggaagaaattgcttaaaattttgtaatttgtatttataagccccaaatgcatcaaatgcagtaggagaacaatgtaatacagcttggtacctaaaaatatagctaagttggtttttgaatataaaacagtttatgaatatgtgcattttctgtattgttatgatttgactttttagagtctatgccaaaatatatggctgtaaaacagtactttgtaattataacttatggtcataactgttagtggactacttacagaagcagaaacaagagcctgttatgattgtgctttgtgaacaagctgatctaatacgttaagtacagaagtgcttagtatcatgactgtcagaaccattctgcaactgagtatgaaatcacagaccagtgaggtgagctaattcatgttaaactgttaggccactgctttgttaatgactcctctaaatgcatagtgtgatgcgatcctctggcatatgctttaataaatggatgtatattgagcacatgcagca

SEQ ID NO: 36937 - protein, 2856 aa, Artificial Sequence
  derived and/or modified sequence
MEEKQQIILANQDGGTVAGAAPTFFVILKQPGNGKTDQGILVTNQDACALASSVSSPVKSKGKICLPADCTVGGITVTLDNNSMWNEFYHRSTEMILTKQGRRMFPYCRYWITGLDSNLKYILVMDISPVDNHRYKWNGRWWEPSGKAEPHVLGRVFIHPESPSTGHYWMHQPVSFYKLKLTNNTLDQEGHIILHSMHRYLPRLHLVPAEKAVEVIQLNGPGVHTFTFPQTEFFAVTAYQNIQITQLKIDYNPFAKGFRDDGLNNKPQRDGKQKNSSDQEGNNISSSSGHRVRLTEGQGSEIQPGDLDPLSRGHETSGKGLEKTSLNIKRDFLGFMDTDSALSEVPQLKQEISECLIASSFEDDSRVASPLDQNGSFNVVIKEEPLDDYDYELGECPEGVTVKQEETDEETDVYSNSDDDPILEKQLKRHNKVDNPEADHLSSKWLPSSPSGVAKAKMFKLDTGKMPVVYLEPCAVTRSTVKISELPDNMLSTSRKDKSSMLAELEYLPTYIENSNETAFCLGKESENGLRKHSPDLRVVQKYPLLKEPQWKYPDISDSISTERILDDSKDSVGDSLSGKEDLGRKRTTMLKIATAAKVVNANQNASPNVPGKRGRPRKLKLCKAGRPPKNTGKSLISTKNTPVSPGSTFPDVKPDLEDVDGVLFVSFESKEALDIHAVDGTTEESSSLQASTTNDSGYRARISQLEKELIEDLKTLRHKQVIHPGLQEVGLKLNSVDPTMSIDLKYLGVQLPLAPATSFPFWNLTGTNPASPDAGFPFVSRTGKTNDFTKIKGWRGKFHSASASRNEGGNSESSLKNRSAFCSDKLDEYLENEGKLMETSMGFSSNAPTSPVVYQLPTKSTSYVRTLDSVLKKQSTISPSTSYSLKPHSVPPVSRKAKSQNRQATFSGRTKSSYKSILPYPVSPKQKYSHVILGDKVTKNSSGIISENQANNFVVPTLDENIFPKQISLRQAQQQQQQQQGSRPPGLSKSQVKLMDLEDCALWEGKPRTYITEERADVSLTTLLTAQASLKTKPIHTIIRKRAPPCNNDFCRLGCVCSSLALEKRQPAHCRRPDCMFGCTCLKRKVVLVKGGSKTKHFQRKAAHRDPVFYDTLGEEAREEEEGIREEEEQLKEKKKRKKLEYTICETEPEQPVRHYPLWVKVEGEVDPEPVYIPTPSVIEPMKPLLLPQPEVLSPTVKGKLLTGIKSPRSYTPKPNPVIREEDKDPVYLYFESMMTCARVRVYERKKEDQRQPSSSSSPSPSFQQQTSCHSSPENHNNAKEPDSEQQPLKQLTCDLEDDSDKLQEKSWKSSCNEGESSSTSYMHQRSPGGPTKLIEIISDCNWEEDRNKILSILSQHINSNMPQSLKVGSFIIELASQRKSRGEKNPPVYSSRVKISMPSCQDQDDMAEKSGSETPDGPLSPGKMEDISPVQTDALDSVRERLHGGKGLPFYAGLSPAGKLVAYKRKPSSSTSGLIQVASNAKVAASRKPRTLLPSTSNSKMASSSGTATNRPGKNLKAFVPAKRPIENAAQIPVATPQVSPNTVKRAGPRLLLIPVQQGSPTLRPVSNTQLQGHRMVLQPVRSPSGMNLFRHPNGQIVQLLPLHQLRGSNTQPNLQPVMFRNPGSVMGIRLPAPSKPSETPPSSTSSSAFSVMNPVIQAVGSSSAVNVITQAPSLLSSGASFVSQAGTLTLRISPPEPQSFASKTGSETKITYSSGGQPVGTASLIPLQSGSFALLQLPGQKPVPSSILQHVASLQMKRESQNPDQKDETNSIKREQETKKVLQSEGEAVDPEANVIKQNSGAATSEETLNDSLEDRGDHLDEECLPEEGCATVKPSEHSCITGSHTDQDYKDVNEEYGARNRKSSKEKVAVLEVRTISEKASNKTVQNLSKVQHQKLGDVKVEQQKGFDNPEENSSEFPVTFKEESKFELSGSKVMEQQSNLQPEAKEKECGDSLEKDRERWRKHLKGPLTRKCVGASQECKKEADEQLIKETKTCQENSDVFQQEQGISDLLGKSGITEDARVLKTECDSWSRISNPSAFSIVPRRAAKSSRGNGHFQGHLLLPGEQIQPKQEKKGGRSSADFTVLDLEEDDEDDNEKTDDSIDEIVDVVSDYQSEEVDDVEKNNCVEYIEDDEEHVDIETVEELSEEINVAHLKTTAAHTQSFKQPSCTHISADEKAAERSRKAPPIPLKLKPDYWSDKLQKEAEAFAYYRRTHTANERRRRGEMRDLFEKLKITLGLLHSSKVSKSLILTRAFSEIQGLTDQADKLIGQKNLLTRKRNILIRKVSSLSGKTEEVVLKKLEYIYAKQQALEAQKRKKKMGSDEFDISPRISKQQEGSSASSVDLGQMFINNRRGKPLILSRKKDQATENTSPLNTPHTSANLVMTPQGQLLTLKGPLFSGPVVAVSPDLLESDLKPQVAGSAVALPENDDLFMMPRIVNVTSLATEGGLVDMGGSKYPHEVPDSKPSDHLKDTVRNEDNSLEDKGRISSRGNRDGRVTLGPTQVFLANKDSGYPQIVDVSNMQKAQEFLPKKISGDMRGIQYKWKESESRGERVKSKDSSFHKLKMKDLKDSSIEMELRKVTSAIEEAALDSSELLTNMEDEDDTDETLTSLLNEIAFLNQQLNDDSVGLAELPSSMDTEFPGDARRAFISKVPPGSRATFQVEHLGTGLKELPDVQGESDSISPLLLHLEDDDFSENEKQLAEPASEPDVLKIVIDSEIKDSLLSNKKAIDGGKNTSGLPAEPESVSSPPTLHMKTGLENSNSTDTLWRPMPKLAPLGLKVANPSSDADGQSLKVMPCLAPIAAKVGSVGHKMNLTGNDQEGRESKVMPTLAPVVAKLGNSGASPSSAGK

SEQ ID NO: 36938 - DNA, 8571 bp, Artificial Sequence
  derived and/or modified sequence
atggaagaaaagcaacagattattttagcgaatcaagacgggggcaccgtagccggtgctgcccccactttcttcgttattttgaagcagcccggcaatggaaagaccgaccagggcatacttgtcaccaatcaggatgcttgcgctcttgcctcctccgtgagtagcccagttaaatctaagggcaaaatctgcttgcctgccgattgcaccgttggaggaatcaccgtgaccttggacaacaactcgatgtggaacgagttttaccaccgatctacagaaatgatcctcactaagcaggggcggcgtatgttcccatattgccggtactggatcactgggctggacagcaacttgaagtatatattggtgatggacattagtcctgtggataatcaccggtataaatggaatggtcgctggtgggagccctctggaaaggctgaaccccacgtactggggcgggtgtttattcaccctgagtctccctccaccgggcattattggatgcaccagccggtttccttttacaagctgaaactgaccaacaatacacttgaccaggaggggcatatcatccttcattctatgcataggtatcttccaaggctgcatctggtgccggctgagaaagccgtggaggtgattcaactaaacggccccggcgtccacaccttcacatttcctcagactgaattcttcgccgtgaccgcctaccagaacatacagatcacccagctgaagatagactataacccttttgctaaaggctttcgcgacgacggcttgaacaacaagcctcagagggacggaaagcagaaaaactcgtcggaccaggaaggcaataatatatcatcctcgtcaggccatcgagttaggctgaccgaagggcagggaagtgaaatccaacctggcgacttggacccactcagtagagggcatgagaccagcggtaagggactggagaagacatctctcaacatcaaacgcgattttttgggttttatggacacggacagcgcattaagcgaggttcctcagctgaaacaggagatctctgaatgtctgattgcttcttccttcgaggatgatagtagagtggcctcgcccctggatcagaacggctcattcaacgtggttatcaaggaagagccactggacgattacgattatgaactgggagaatgtcctgagggagtaacagtgaaacaggaggagacggacgaagaaacagatgtgtattctaattctgatgatgatccgattctggaaaaacaactgaagcgccacaacaaggtggacaatcccgaggccgaccacttgagctctaagtggctgcctagctcgcccagcggcgtggcaaaagcaaagatgttcaaacttgatactggaaaaatgcccgtagtctaccttgagccatgtgccgtaacacggagcacagtgaaaatatctgagctgcctgataacatgctttcgaccagccgaaaagacaaatcctccatgctagccgaactggaatatttaccgacctacatcgagaactctaacgagaccgcattttgtctcgggaaggagtcagaaaatggactgaggaaacatagcccagacctgcgcgttgttcagaagtatcccctcctgaaggaaccccagtggaagtatccggatatttcggacagcatatccaccgaacggatcctggatgactctaaggatagtgttggcgactcattatcgggaaaagaagatttaggccgcaagagaaccaccatgcttaaaatcgccactgctgccaaggtggtcaacgccaaccagaacgcctcgcccaatgtacccgggaaacgcgggcggcctcgaaagcttaaactgtgcaaggctggcagaccgcccaaaaataccggaaaaagtctgataagcacaaaaaatactcccgtatctcccggttccacattcccagacgtcaagccggatctggaggatgttgacggcgttctcttcgtatccttcgagtctaaggaggcactggacatacacgctgtggacggcacaaccgaggaatccagctcattgcaagcaagcacaacgaacgactccgggtatagggctaggattagtcaactcgagaaagaactgatcgaggacctcaaaacattaagacataagcaggttatccaccccggactccaggaggtgggcctgaagttgaactcagtggatcccaccatgtcgattgatctcaagtatttgggagtgcagctgcccttagcacctgccacctcatttcccttctggaacctgaccgggaccaatccggcaagccctgacgcaggtttcccatttgtgtccagaaccgggaagacaaatgactttaccaagataaagggatggaggggcaaatttcattctgccagtgcatcacggaatgagggtggaaattcagagtcctctctcaaaaataggagtgccttttgctcggacaaattggatgagtatctggaaaacgaaggtaaattaatggagacaagtatgggattctcttctaacgctccaacaagccctgttgtgtaccagctgccgactaaatctacctcctatgtgcgtacgcttgacagcgtgcttaaaaagcagagcacaatctcccctagcacttcatacagcttaaagccacactcggttcctcctgtgagccggaaagcaaaatctcagaatcgccaagctactttctccggccggactaaatctagctataaatccattctcccatatcccgtatctccaaagcaaaaatactctcatgtgatactcggcgacaaggtaaccaaaaactcttcaggaatcatttctgaaaatcaggctaataacttcgttgtgccgacactggacgaaaacatcttcccaaaacagatttctttgcgccaggcacagcaacagcaacagcaacagcagggtagtcgcccacctggactgagcaagagccaggtaaaattaatggatctggaagattgtgctctgtgggaaggcaaaccgagaacttatattaccgaggagcgagccgacgtgtccctgactaccctccttaccgcgcaggctagcctcaaaacaaagcccattcacactatcatccggaagcgtgctccaccctgtaataacgacttctgccgtctcgggtgcgtctgctcctccctcgccttggagaagcgccagccggcccactgtagacggcctgattgcatgttcggttgcacatgcctaaagaggaaggtggtcctggtgaagggaggcagcaaaaccaagcacttccagcgcaaggccgctcaccgcgatcccgtgttctatgatactcttggcgaggaggcacgcgaggaagaagaaggcatccgggaggaagaggagcaactaaaagagaagaagaaacgtaagaaactagagtatacgatttgcgaaacagaaccagagcaacccgtacggcattaccccctatgggtgaaggtggagggtgaggtggatcccgaaccagtttacatccccacgcccagcgtaattgaaccgatgaaaccgctactattgcctcagccggaagtgctttcccccacggtcaagggtaagctgctgacagggatcaaatcaccgcgatcttacacacccaaacctaatcctgtgattagagaggaagacaaggaccctgtttacctgtattttgaaagcatgatgacctgcgcaagagtgcgggtctacgaaagaaagaaggaggatcagcggcagccgagtagtagtagctctccctcaccttctttccagcaacaaacgtcatgtcactcatcccccgaaaatcacaacaacgcaaaggaacctgacagcgagcagcagccgttgaagcagttgacatgtgatctagaagatgatagtgacaagctgcaggaaaagagctggaaatcatcctgcaatgaaggagaatccagctccacaagctatatgcaccagcgcagtcctggcggtccaacgaaactgattgagatcatttctgattgcaattgggaagaagatcggaacaagattttgtccattctctctcagcacataaattcaaacatgcctcagagccttaaggtcggatcctttatcattgagctcgcctctcagagaaagtcaagaggtgagaagaacccccctgtttattcctcaagggtgaaaatcagcatgccatcatgccaggaccaagatgatatggccgagaaatccgggagtgaaaccccagacgggccactctccccgggcaagatggaagacatttcgcctgtgcagactgatgccctcgatagcgtccgagaacgtctgcacggagggaaaggtctgcctttctacgctggcctgtctccagcggggaaactcgtggcatataagcgcaagcccagctcatccacttctggcctgatccaggtggcttctaacgccaaagtcgcagccagccggaaaccccgcactcttttaccatccacaagtaactccaagatggcttcgagcagcgggaccgctacaaatcggcccggcaagaatctgaaagcttttgtccccgcaaaacgcccaatagaaaacgcagctcagattcccgtggctacacctcaggtttcccctaacactgtgaagagggcggggcctcgcttgcttctgataccggtccaacaaggatcccccacccttcggccagttagcaacacacaactgcaggggcaccgcatggtgctccagcccgtccgctctccctctggcatgaatctgttcaggcaccccaatggccagatagtacagcttttgcctcttcaccagctccggggaagtaatactcaacccaatctccagcccgtcatgttccgcaaccccgggagcgtgatgggcatccgactccccgccccaagcaaaccaagcgagacaccaccctcatcgaccagcagcagtgcgttttctgtgatgaaccccgtcatccaagccgtcggtagctcctccgcggtaaacgtgataactcaggctccttccctgctgagttctggggcctccttcgtgtctcaagctggcacgctgactctcagaatttctcctcctgagcctcagagctttgctagtaaaacaggttccgagactaagattacttacagcagtggggggcagcctgtagggactgcgagccttatacctctccaaagcggctcctttgctctgcttcagttgcctggccagaagcccgtgcccagctccatcctccagcatgtagccagcttgcagatgaagcgagaatctcaaaatcccgaccaaaaggatgagactaattcaataaagcgagagcaagaaactaagaaagtcttacagtctgaaggcgaagcagtcgatccggaggctaatgtaatcaagcagaacagcggagcggcaacgtcggaagagactctgaacgacagccttgaggatcgaggggaccacttggatgaggaatgtcttccagaggagggttgtgctacggtgaagccctcagaacatagttgcataaccggaagtcataccgatcaggactacaaagacgtaaatgaagagtatggtgctagaaacagaaagagctctaaagagaaggtggctgtcctcgaagtgcggactatatccgaaaaagcctctaacaaaacggtgcagaatctgagcaaggtgcagcaccagaagctcggagacgtgaaagtggagcagcagaaaggcttcgataacccagaagagaacagtagcgaattccctgtgacttttaaggaggagtctaaatttgaactcagcggatcaaaggtcatggaacagcagtctaacctgcaacccgaggcaaaggaaaaggaatgcggcgacagtctcgaaaaggaccgggagagatggcggaagcacctaaaaggccctctgactcggaagtgtgtgggggcttctcaggaatgtaaaaaggaggccgacgaacagctgattaaagagacaaaaacatgccaggaaaacagtgatgttttccagcaggagcagggcatcagcgacttactggggaagtcaggaatcaccgaagatgcacgggtgctaaagactgagtgcgactcttggtccaggattagcaatccatccgcgttcagtattgtccctcgaagggccgccaagagttcccgcggcaacggacacttccagggtcacttgctactgcctggtgaacagattcagccaaaacaggaaaaaaagggcgggcgctctagtgctgattttacagtcttggatctcgaggaggacgatgaggacgataacgaaaagaccgatgattctatcgacgaaattgttgacgtcgttagcgattatcaaagcgaagaagtggatgacgtggaaaaaaataactgcgtggagtatattgaagatgatgaggagcatgttgatattgagacggtggaagagctctcagaggagataaacgtggcacacctgaagaccacagccgcacatactcaaagtttcaaacagcctagctgtacacacatttcagccgatgaaaaagccgctgaacggtctcgcaaggcaccgcctatcccccttaagttgaagcctgattactggtccgataagcttcagaaggaagcggaggctttcgcgtactaccgccgcacccacacagccaatgagcgccgtcgacggggggagatgagggacctctttgaaaagctcaagatcactctggggctcctgcatagcagcaaggtctccaagtcccttattctgactcgtgcatttagcgagattcagggacttaccgatcaggccgataaactgatcgggcagaaaaacctgctgacaaggaagcggaatattctgatacggaaagtctcaagcctaagcggcaaaactgaagaggtggtcctcaagaagcttgaatacatctacgctaaacaacaggcattggaggcccagaaaagaaaaaagaagatgggaagtgatgaattcgacatcagcccgcggatctccaaacaacaggagggaagttccgcttcttccgttgatttaggccagatgtttatcaataacagacgtggaaaacctctgattctgagcaggaagaaagatcaagctaccgaaaatacgagtcccctcaacacccctcacacctcagccaacctcgtaatgacacctcaagggcagttgctaaccttgaaggggcccttattcagcgggcctgtggtagcggtgtcacccgatctgctggaaagtgatctcaaacctcaggtggctggatcagcggtcgctcttccagagaacgacgatctctttatgatgcctcgcattgtcaacgtcacctccttagcaaccgaagggggcctcgtcgatatgggcggttccaaatacccacatgaggtacccgatagtaaaccctctgatcacctcaaagatactgtccggaacgaagacaattctctcgaagataaaggccgcatatcctcaagaggcaaccgggatggacgggtgactctggggccgactcaggtgtttttagccaataaggactccggatacccgcagatcgtcgacgtgtccaacatgcagaaagcacaagaatttctccccaaaaagatcagtggtgatatgaggggaattcaatacaagtggaaggagagtgaaagcagaggcgaacgcgtgaaaagcaaagattcgtccttccataaacttaagatgaaagaccttaaagactcctccatcgagatggaactgaggaaggtgacatccgcaatcgaagaggctgctctggattcttccgaattactaactaacatggaggacgaagacgatacagatgaaaccttaacaagcctgctgaacgagatcgcatttttaaatcagcagctcaacgatgattcagtgggtctagctgagctgccaagtagcatggacaccgaattcccaggagacgctaggcgcgcctttattagtaaggtgccacctggtagtcgggcaaccttccaggtagaacacttgggcactggactgaaggaacttcccgatgtacagggagagtccgactctatctcccctttgttactacacctggaggatgacgatttttccgagaatgaaaagcagctggctgagcctgctagtgagccagacgtgttgaaaatcgtcattgattccgagataaaagactctctcttaagtaacaagaaggcaatcgacggcggcaagaatacttccggccttcctgctgaacctgagtctgtgtcatccccgcctactcttcacatgaagacgggcctggaaaatagtaatagcaccgacactctgtggcggcctatgccaaaactggctccacttgggttaaaggtggccaatcctagctccgacgcagatggacagtcactgaaagtgatgccatgcttggcacctattgctgccaaggtcggaagcgtcggacataaaatgaacctcactggtaatgatcaggaaggaagagagagcaaagttatgcctactctggcacctgtggtagcaaaattgggaaacagcggagccagtccctcaagcgctggcaagtag

SEQ ID NO: 36939 - DNA, 8571 bp, Artificial Sequence
  derived and/or modified sequence
atggaggagaagcagcagatcatcctggccaaccaggacggcggcaccgtggccggggccgcccccaccttctttgtgatcctgaagcagcctggaaatggcaagacagaccagggcatcctggtgaccaaccaggatgcctgtgccctggccagctctgtgagcagccctgtgaagagcaagggcaagatctgcctgcctgctgactgcaccgtgggcggcatcaccgtgaccctggacaacaacagcatgtggaatgagttctaccacaggagcacagagatgatcctgaccaagcagggccgcaggatgttcccctactgccgctactggatcaccggcctggacagcaacctgaagtacatcctggtgatggacatcagccctgtggacaaccaccgctacaagtggaatggccgctggtgggagcccagcggcaaggccgagccccacgtgctgggccgggtcttcatccaccctgagagccccagcacaggccactactggatgcaccagcctgtgtccttctacaagctgaagctgaccaacaacaccctggaccaggagggccacatcatcctgcacagcatgcaccgctacctgccccggctgcacctggtgcctgctgagaaggctgtggaggtgatccagctgaatggacctggggtgcacaccttcaccttcccccagacagagttctttgctgtgacagcctaccagaacatccagatcacccagctgaagattgactacaacccctttgccaagggcttcagagatgatggcctgaacaacaagccccagagagatggcaagcagaagaacagcagtgaccaggagggcaacaacatcagcagcagcagcggccaccgggtgcggctgacagagggccagggcagcgagatccagcccggggacctggaccccctgagccggggccacgagaccagcggcaagggcctggagaagaccagcctgaacatcaagagggacttcctgggcttcatggacacagacagcgccctgtctgaggtgccccagctgaagcaggagatcagcgagtgcctgattgccagcagctttgaagatgacagccgggtggccagccccctggaccagaatggcagcttcaacgtggtgatcaaggaggagcccctggatgattatgactatgagctgggagaatgtcctgagggcgtgacagtgaagcaggaggagacagatgaggagacagatgtgtacagcaacagtgatgatgaccccatcctggagaagcagctgaagaggcacaacaaggtggacaaccctgaggccgaccacctgagcagcaagtggctgcccagcagccccagcggcgtggccaaggccaagatgttcaagctggacaccgggaagatgcctgtggtgtacctggagccctgtgctgtgaccaggagcacagtgaagatcagcgagctgcctgacaacatgctgagcaccagcaggaaggacaagagctccatgctggccgagctggagtacctgcccacctacatcgagaacagcaatgaaacagccttctgcctgggcaaggagagtgaaaatggcctgaggaagcacagcccagacctgcgggtggtgcagaagtaccccctgctgaaggagccccagtggaagtacccagacatcagtgacagcatcagcacagagcgcatcctggatgacagcaaggacagcgtgggggacagcctgagcggcaaggaggacctgggcaggaagaggaccaccatgctgaagatcgccacagctgccaaggtggtgaatgccaaccagaatgccagccccaacgtgcctgggaagaggggccggcccaggaagctgaagctgtgcaaggccggccggccccccaagaacacaggcaagagcctcatcagcaccaagaacacccctgtgtccccaggcagcaccttcccagatgtgaagccagacctggaggatgtggatggagtgctgtttgtgtcctttgagagcaaggaggccctggacatccatgctgtggatggcaccacagaggagagcagcagcctgcaggccagcaccaccaatgattctggctaccgggcccgcatcagccagctggagaaggagctgattgaggacctgaagaccctgcggcacaagcaggtgatccaccctggcctgcaggaggtgggcctgaagctgaacagcgtggaccccaccatgagcattgacctgaagtacctgggcgtgcagctgcccctggccccagccaccagcttccccttctggaacctgaccggcaccaacccagccagcccagatgctggcttcccctttgtgtccaggacaggcaagaccaatgacttcaccaagatcaagggctggaggggcaagttccacagcgccagcgccagcagaaatgaaggaggcaacagcgagagcagcctgaagaacagaagtgccttctgcagcgacaagctggatgagtacctggagaatgaaggcaagctgatggagacctccatgggcttcagcagcaatgcccccaccagccctgtggtgtaccagctgcccaccaagagcaccagctatgtgaggaccctggacagcgtgctgaagaagcagagcaccatcagccccagcaccagctacagcctgaagccccacagcgtgccccctgtgtccaggaaggccaagagccagaaccggcaggccaccttcagcggccgcaccaagagcagctacaagagcatcctgccctaccctgtgagccccaagcagaagtacagccacgtgatcctgggggacaaggtgaccaagaacagcagcggcatcatcagcgagaaccaggccaacaactttgtggtgcccaccctggatgagaacatcttccccaagcagatcagcctgcggcaggcccagcagcagcagcagcagcagcagggcagcaggcctcctggcctgagcaagagccaggtgaagctgatggacctggaggactgtgccctgtgggagggcaagcccaggacctacatcacagaggagcgggcagatgtgtccctgaccaccctgctgacagcccaggccagcctgaagaccaagcccatccacaccatcatcaggaagagggccccaccctgcaacaatgacttctgccgcctgggctgtgtgtgcagcagcctggccctggagaagaggcagcctgcccactgccggcggccagactgcatgtttggctgcacctgcctgaagaggaaggtggtgctggtgaagggcggcagcaagaccaagcacttccagaggaaggccgcccaccgggaccccgtcttctatgacaccctgggggaggaggcccgggaggaggaggagggcatccgggaggaggaggagcagctgaaggagaagaagaagaggaagaagctggagtacaccatctgtgaaacagagcctgagcagcctgtgcgccactaccccctgtgggtgaaggtggagggggaggtggaccctgagcctgtgtacatccccacccccagcgtcatcgagcccatgaagcccctgctgctgccccagcctgaggtgctgagccccaccgtgaagggcaagctgctgaccggcatcaagagccccaggagctacacccccaagcccaaccctgtgatccgggaggaggacaaggaccctgtgtacctgtactttgagagcatgatgacctgtgcccgggtgcgggtgtatgaaaggaagaaggaggaccagaggcagcccagcagcagcagcagccccagccccagcttccagcagcagaccagctgccacagcagccctgagaaccacaacaatgccaaggagccagattctgagcagcagcccctgaagcagctgacctgtgacctggaggatgacagcgacaagctgcaggagaagtcctggaagagcagctgcaatgaaggagagagcagcagcaccagctacatgcaccagaggagccctgggggccccaccaagctgattgagatcatcagtgactgcaactgggaggaggacaggaacaagatcctgagcatcctgagccagcacatcaacagcaacatgccccagagcctgaaggtgggcagcttcatcatcgagctggccagccagaggaagagcagaggagagaagaacccccctgtgtacagcagccgggtgaagatctccatgcccagctgccaggaccaggatgacatggccgagaagagcggcagcgagaccccagatggccccctgagccctgggaagatggaggacatcagccctgtgcagacagatgccctggacagcgtgcgggagcggctgcatggaggcaagggcctgcccttctacgccggcctgagccctgctgggaagctggtggcctacaagaggaagcccagcagcagcaccagcggcctcatccaggtggccagcaatgccaaggtggccgccagcaggaagcccaggaccctgctgcccagcaccagcaacagcaagatggccagcagcagcggcacagccaccaacagacctgggaagaacctgaaggcctttgtgcctgccaagaggcccattgaaaatgctgcccagatccctgtggccaccccccaggtgagccccaacacagtgaagagagctggcccccggctgctgctgatccctgtgcagcagggcagccccaccctgcggcctgtgagcaacacccagctgcagggccacaggatggtgctgcagcctgtgcgcagccccagcggcatgaacctcttccgccaccccaacggccagatcgtgcagctgctgcccctgcaccagctgcggggcagcaacacccagcccaacctgcagcctgtgatgttcagaaatcctggctctgtgatgggcatccggctgcctgcccccagcaagcccagcgagaccccacccagcagcaccagcagcagcgccttctctgtgatgaaccctgtgatccaggccgtgggcagcagcagcgctgtgaatgtcatcacccaggcccccagcctgctgagcagcggggccagctttgtgtcccaggccggcaccctgaccctgcgcatcagccccccagagccccagagctttgccagcaagacaggcagcgagaccaagatcacctacagcagcggcggccagcctgtgggcacagccagcctcatccccctgcagagcggcagctttgccctgctgcagctgcccggccagaagcctgtgcccagcagcatcctgcagcacgtggccagcctgcagatgaagcgggagagccagaacccagaccagaaggatgagaccaacagcatcaagcgggagcaggagaccaagaaggtgctgcagagcgagggggaggccgtggaccctgaggccaacgtcatcaagcagaacagcggggccgccaccagcgaggagaccctgaatgacagcctggaggacagaggagaccacctggatgaggagtgcctgcctgaggagggctgtgccaccgtgaagcccagcgagcacagctgcatcaccggcagccacacagaccaggactacaaggatgtgaatgaggagtatggagccaggaacaggaagagcagcaaggagaaggtggccgtgctggaggtgaggaccatcagcgagaaggccagcaacaagacagtgcagaacctgagcaaggtgcagcaccagaagctgggagatgtgaaggtggagcagcagaagggctttgacaaccctgaggagaacagcagcgagttccctgtgaccttcaaggaggagagcaagtttgagctgagcggcagcaaggtgatggagcagcagagcaacctgcagcctgaggccaaggagaaggaatgtggggacagcctggagaaggaccgggagcgctggaggaagcacctgaagggccccctgaccaggaaatgtgtgggcgccagccaggagtgcaagaaggaggctgatgagcagctgatcaaggagaccaagacctgccaggagaacagtgatgtgttccagcaggagcagggcatcagtgacctgctgggcaagagcggcatcacagaagatgcccgggtgctgaagacagaatgtgacagctggagccgcatcagcaaccccagcgccttcagcatcgtgcccaggagagctgccaagagcagcagaggaaatggccacttccagggccacctgctgctgcccggggagcagatccagcccaagcaggagaagaagggcggccgcagcagcgctgacttcaccgtgctggacctggaggaggatgatgaagatgacaatgagaagacagatgacagcattgatgagatcgtggatgtggtgtctgactaccagagcgaggaggtggatgatgtggagaagaacaactgtgtggagtacattgaagatgatgaggagcacgtggacattgaaacagtggaggagctgtctgaggagatcaacgtggcccacctgaagaccacagctgcccacacccagagcttcaagcagcccagctgcacccacatctctgcagatgagaaggctgctgagaggagcaggaaggccccacccatccccctgaagctgaagccagactactggagcgacaagctgcagaaggaggccgaggcctttgcctactacagaaggacccacacagccaatgaaagaagaagaagaggagagatgagggacctgtttgagaagctgaagatcaccctgggcctgctgcacagcagcaaggtgtccaagagcctcatcctgacccgggccttcagcgagatccagggcctgacagaccaggccgacaagctgattggccagaagaacctgctgaccaggaagaggaacatcctgatcaggaaggtgagcagcctgagcggcaagacagaggaggtggtgctgaagaagctggagtacatctatgccaagcagcaggccctggaggcccagaagaggaagaagaagatgggcagtgatgaatttgacatcagcccccgcatcagcaagcagcaggagggcagcagcgccagctctgtggacctgggccagatgttcatcaacaacagaagaggcaagcccctcatcctgagcaggaagaaggaccaggccacagagaacaccagccccctgaacaccccccacaccagcgccaacctggtgatgaccccccagggccagctgctgaccctgaagggccccctcttcagcggccctgtggtggccgtgtccccagacctgctggagagtgacctgaagccccaggtggccggcagcgctgtggccctgcctgaaaatgatgacctcttcatgatgccccgcatcgtgaatgtgaccagcctggccacagagggcggcctggtggacatgggcggcagcaagtacccccatgaggtgcctgacagcaagcccagcgaccacctgaaggacacagtgagaaatgaagacaacagcctggaggacaagggccgcatcagcagccggggcaacagagatggccgggtgaccctgggccccacccaggtgttcctggccaacaaggacagcggctacccccagatcgtggatgtgagcaacatgcagaaggcccaggagttcctgcccaagaagatcagcggggacatgaggggcatccagtacaagtggaaggagagcgagagcagaggagagcgggtgaagagcaaggacagcagcttccacaagctgaagatgaaggacctgaaggacagcagcattgagatggagctgaggaaggtgaccagcgccatcgaggaggccgccctggacagcagcgagctgctgaccaacatggaggatgaagatgacacagatgagaccctgaccagcctgctgaatgaaattgccttcctgaaccagcagctgaatgatgacagcgtgggcctggccgagctgcccagctccatggacacagagttccctggagatgcccggcgggccttcatcagcaaggtgcccccaggcagccgggccaccttccaggtggagcacctgggcaccggcctgaaggagctgcctgatgtgcagggcgagagtgacagcatcagccccctgctgctgcacctggaggatgatgacttctctgaaaatgagaagcagctggccgagcccgccagcgagccagatgtgctgaagatcgtgattgattctgagatcaaggacagcctgctgagcaacaagaaggccattgatggcggcaagaacaccagcggcctgcctgctgagcctgagagcgtgagcagcccccccaccctgcacatgaagacaggcctggagaacagcaacagcacagacaccctgtggaggcccatgcccaagctggcccccctgggcctgaaggtggccaaccccagcagtgatgctgatggccagagcctgaaggtgatgccctgcctggcccccatcgccgccaaggtgggctctgtgggccacaagatgaacctgactggaaatgaccaggagggccgggagagcaaggtgatgcccaccctggcccctgtggtggccaagctgggcaacagcggggccagccccagcagcgctgggaagtag

SEQ ID NO: 36940 - DNA, 11411 bp, Artificial Sequence
  derived and/or modified sequence
gcgcgcgcgcaggctcttcagctggagcggacacacggtgtgcgaaccgaacagaataacccgcccccagcgggatgtgaaggactccgggtgaggccggccacgccccgcacggatgggaaggccattgtgactatgtggtgattacagttgtcttactactgagtttcctactgaaatcatggaggagaaacagcagattatattggctaatcaagatggtggaacagtggcaggagcagcacctaccttctttgtcatcttaaagcagccaggaaatggcaaaactgatcaaggaattttggttactaatcaggatgcctgtgctttggctagtagtgtgtcatcaccagtaaaatctaaagggaagatttgccttccagctgattgtactgtgggtggaatcactgttaccctcgataacaatagtatgtggaatgagttctatcatcgaagcacagagatgattctgaccaagcaaggaagacgcatgtttccttactgtcgttattggataacaggtttagattcaaatttgaagtatattcttgtcatggatatatctcctgtggataaccatcgttataagtggaatggtcgttggtgggaacctagtgggaaggctgaacctcatgttttggggagggttttcattcatccagaatctccttccacaggtcattattggatgcatcaaccagtatctttctataaactcaaacttaccaacaatacactggaccaagaagggcatatcatcttgcactctatgcatcgttacctgccgaggcttcatttggtgcctgcagaaaaggctgtggaggtgatacaattaaatggccctggtgtccacacttttaccttcccacagactgaattctttgcagtaacagcttatcagaacattcagattactcagctgaaaatagattacaatccatttgccaaaggctttcgggatgatgggctgaataataagccccagagagatggaaaacaaaagaacagctctgaccaagaagggaataatatttccagttcttctggtcatcgggtccgtcttacagaaggtcaggggtcagagatacaaccaggtgatttggatcctttgtcaaggggtcatgaaacatcaggcaagggtttggagaagacttcccttaatataaaacgagactttcttggtttcatggatactgattcagcacttagtgaagttcctcaattgaagcaagagatttctgaatgtcttattgccagcagttttgaagatgactcccgtgtagcctcaccgttagaccagaacggaagcttcaatgttgttattaaagaggaacctctagatgattatgactacgaacttggtgagtgcccagaaggggtcactgtgaaacaggaagagacagatgaagagacggatgtatactcaaacagtgatgatgatcctatactagagaaacagctaaagaggcacaataaagttgacaacccagaagctgaccatctatcttctaaatggcttccaagcagcccatcaggtgttgctaaagctaaaatgttcaaattagacactggaaagatgccagtagtctatctggagccctgtgctgtcaccagaagcacagttaagatttctgaactccccgataacatgctttccacatctcgaaaggataaatcttctatgttggcagaattggaatatttgcctacatacattgaaaattccaatgagactgccttctgcttaggcaaggaatcagaaaatggtcttagaaaacattcaccagatctcagagtggtacaaaaatatcccttactgaaagagcctcagtggaaatatcctgatatatctgacagcattagcacagaaagaatactcgacgattcaaaggattcagttggagactcactttcaggaaaagaggacttgggcagaaagagaacaactatgcttaagattgcaacagccgcaaaggtagtgaatgctaatcagaatgcctctccaaatgtccctggaaaaagaggaaggccacgaaaattgaaactctgtaaggcaggacgaccacctaagaacacaggaaagtctttaatttctacaaagaatacacctgtaagccctgggagtacctttccagatgtgaagcctgatctggaagatgtggatggtgttctctttgtttcctttgaatcaaaggaagctctagacattcatgcagttgatgggacaacagaagaatcttctagtctccaggcatcaaccacaaatgactcaggttacagagcaagaatttcccagttggaaaaggaattgatagaagatttgaagactttgcggcacaagcaggtgatacatcctggtcttcaagaagtgggcttaaaattgaattcagtggatccaacaatgagcattgatcttaaatacttgggagtacagttacctttggctccagctactagctttcctttttggaaccttacaggaaccaaccctgcctctcctgatgcgggatttccctttgtttctaggacagggaaaaccaatgatttcactaagatcaagggatggaggggaaaatttcatagtgcttctgcatctaggaatgaaggtggaaattcagaaagttcactgaaaaatcgttctgctttctgtagtgataagctagatgaatacttggaaaatgaaggcaagctgatggaaacaagcatgggtttttcttctaatgctcccacatctcctgtggtgtaccagcttcccactaagagtaccagttatgtacgaacacttgatagtgtactaaagaagcaatctactatttccccttctacctcttattctttgaaacctcattctgtaccccctgtctctcgaaaggcaaagtctcaaaacagacaggcaactttcagtggccgaactaaatcatcttataaatccattttaccataccctgtttcaccaaagcagaaatactctcatgtgattctaggagataaggttaccaagaattcttcaggcatcatctcagaaaatcaggcgaataactttgttgtgccaactttggatgaaaatatatttccaaagcagattagtttgcggcaggcacagcagcagcagcaacagcaacagggaagtcgccctccaggcttgtctaaatctcaggtgaagctaatggacctggaagactgtgcactttgggaaggaaaaccaaggacatacatcacagaagagcgagcagatgtatccttaacaactctacttacagctcaagcatccctcaaaactaaacctatccacacaatcataaggaaacgagcccctccctgcaacaatgacttctgtcgactgggttgtgtatgttccagtctagctttggagaagcgccaacctgctcactgccgccgaccagactgcatgtttggttgtacttgtttgaaaagaaaagttgtacttgttaaaggaggatccaaaactaagcattttcagaggaaggctgctcatcgagatccagtattttatgatactctgggagaggaggcaagggaggaggaagaaggaatcagggaggaggaggaacaattgaaagagaaaaagaagagaaagaagctagaatacactatatgtgagacagagcctgaacagcctgttcgacattacccattatgggtaaaagtagaaggtgaagtagatccagaaccagtttatatccccacgccttctgtcattgagcctatgaaaccattgttattgcctcagccagaagttttatctcctactgtgaagggcaaactgctcactggaattaaatctccacggtcatatactcccaaacccaatcctgtgattcgggaagaggacaaagatccagtctacttgtactttgaaagtatgatgacttgtgctcgagttcgagtatatgagcgaaaaaaagaggaccagagacaaccatcttcctcctcctccccatctccatcatttcagcagcaaacttcatgtcattctagccctgagaaccataataatgcaaaggaacctgattctgaacagcagcccttaaaacaactcacctgtgacttggaggatgattctgataaattacaagaaaagagctggaagtcttcctgcaatgaaggagaatcctcttctacttcttatatgcatcagaggtcacctggtggtcccaccaaactgattgagatcatctcagactgcaactgggaggaagatcggaacaagattttgagcatcttatcccagcacatcaatagcaacatgccacaatcacttaaggtgggcagcttcatcattgagttggcttctcagcgaaagagccggggtgagaagaaccctcctgtttattcttctcgtgtgaaaatctctatgccatcatgtcaagaccaagatgatatggctgagaaatctggatcagagactcctgatggtccattgtcccctgggaaaatggaggatatctctcctgtgcagacagatgccctggattcagtgagggagagattacatggaggcaaaggtctgcctttttatgcagggctttctcctgcagggaagcttgtggcctataaacgtaaacccagttcaagtacatctgggcttatccaggtagcatccaatgccaaggtggctgcatccaggaaaccacgtaccctgttgccttcaacatccaattccaaaatggcatcctcctctggcactgcaacaaatcgccctgggaagaatctgaaggcgtttgtcccagcaaaacggccaattgaaaatgctgctcaaattccagtggctactccacaggtctctcctaacacagtgaaacgtgctggacctcgattgttgttgattccagtgcagcagggttctcctactcttagacctgtctcaaacacacaacttcagggacatcggatggtcttgcagcctgttaggagtccaagtggaatgaacttattcaggcaccctaatgggcagattgtccagcttctacctttgcatcagcttcgaggctctaatacccagcccaacttacagcctgtcatgtttcggaacccagggtctgtgatgggaatccggttacctgctccttccaaaccctctgagactccgccatcttccacttcgtcctctgctttctctgtcatgaatcctgtaattcaagctgttgggtcttcttcagcagtgaatgttatcactcaggcaccatcattgctttcctctggagctagttttgtgtctcaggctggtacattgaccctgaggatttctcctcctgaaccacaaagctttgcaagtaaaacaggctctgaaaccaaaataacttatagctcaggaggacagcctgttggtacagccagtcttattcctctccagtctggtagttttgccttgttacagctcccaggacaaaagcctgttcctagctccattcttcagcatgttgcttcccttcagatgaagagagaatctcagaatccagaccagaaagatgaaacaaactcaataaaaagagagcaagaaacgaagaaggttctacagtcagaaggagaggctgtagaccctgaggctaatgtaataaaacaaaactcaggagctgctacctcagaagaaactctgaatgattccttggaagataggggtgatcatttggatgaagaatgccttccagaagaaggttgtgcaactgtcaaaccatctgagcattcctgtatcactgggtcacatacagatcaagattataaagatgttaatgaagaatatggggctaggaatcgtaagagttccaaagaaaaagtggctgttctggaagttaggaccatttctgaaaaagccagtaataagacagtccaaaatttaagtaaagtacagcatcaaaaacttggtgatgtgaaggtggaacagcagaaaggatttgacaatccagaagaaaactcaagtgaatttccagtcacctttaaggaagaaagtaaatttgaattgtcaggaagcaaagttatggagcagcaatctaatctacagccagaggccaaagagaaggaatgtggagactctctggagaaagacagggaaagatggagaaaacatctgaagggccccttaaccaggaaatgtgttggagcttcacaggaatgtaagaaagaggcagacgagcagttaattaaagaaacaaagacatgtcaggaaaattcagatgtgtttcagcaagaacaaggcatctctgacttacttggaaaaagtggaattactgaagatgccagagttttgaaaactgaatgtgattcttggagtaggatttctaatccttcagccttctccattgttcctaggagagctgcaaaaagcagcagagggaatggacattttcagggtcacttactgctacctggagaacagatacaaccaaagcaagagaagaagggtgggagaagcagtgctgacttcactgttttggatttggaagaagatgatgaagatgataatgagaaaactgatgattctattgatgaaattgtggatgttgtttctgactaccagagtgaggaggttgatgatgtagaaaagaataactgtgtagaatacattgaggatgatgaggagcacgtggacattgagactgtagaagagctctcagaggaaattaatgttgctcacctgaagaccacagcggcccacacacagtcattcaaacagccgtcctgtactcacatctctgcagatgaaaaagcagctgaaaggagtcgaaaggctccaccaattcctctaaaactgaagcctgattactggagtgacaaactacagaaagaagcagaagcgtttgcttattatcgccggacacacactgccaatgagcggcggcggcgtggtgaaatgagggatctctttgagaaattaaagatcacattgggattacttcattcttccaaggtttccaaaagtctcattcttactcgagccttcagtgaaattcagggactaacagatcaggcagacaaattgataggacagaaaaatctcctgactcgaaaacggaatattctgatacggaaagtatcgtctctttcaggtaagacagaagaagtggtcctgaagaagctagagtatatttatgcaaaacagcaagcactagaggcacaaaaaagaaaaaagaagatgggatcagatgagtttgacatatctcccagaattagcaaacagcaggaaggatcttctgcatcatctgtagatcttggacagatgtttataaataacaggagggggaaacctttgattctttccagaaaaaaagaccaggccacagaaaatacctcacccttgaacactccacacacctctgccaaccttgtgatgactccgcaagggcaattgctcaccctaaaaggtcccctattctcaggaccagtggtagctgtttctcctgatctcttagaatctgatcttaagcctcaagttgccggtagtgctgtggctctaccagaaaatgacgacttatttatgatgccacgaattgttaatgtgacatcattggccacagagggaggtttggtagatatgggtggcagcaaatatcctcatgaagttcctgatagcaagccatctgaccatctgaaagacaccgtcaggaatgaagataattccttagaggataagggtagaatctcttccagaggaaacagagatggcagagtgacgttgggtccaacgcaggtttttctggcaaacaaagattctggttatccacaaatagttgacgtttccaatatgcagaaagcacaagagttcttacctaaaaagatttctggtgatatgagagggattcagtataaatggaaagagagtgaatcaagaggggagagagtgaagtcaaaggattcttcatttcataaattaaagatgaaagatctcaaggactcaagcatagagatggaactgaggaaagtaacatcagctatagaggaagcagctcttgattccagtgaactgctgactaacatggaagatgaggatgatactgatgagacactgacttcactgctcaatgaaattgcctttcttaatcaacaactaaatgatgactctgttggcctggctgaactacccagctctatggatacagagttcccaggggatgctcggcgggcttttattagtaaggttcctcctggaagcagagcaactttccaggttgagcacttgggaactggtttgaaagagttgcctgatgttcaaggggagagtgactctatcagtcccctcctcttgcacttggaagacgatgacttttctgagaatgaaaaacaacttgcagaaccagcctctgagccagatgtccttaagattgttattgactctgaaataaaggattccctcctttccaacaagaaagctattgatggagggaagaatacttctggcctccctgcagagcccgaaagtgtgtcctcaccccccaccctacacatgaagactggcttggagaacagcaacagcacagacactttgtggaggcctatgccaaagttggcccctctaggtttaaaagtagctaatccttccagtgatgcagatggtcagagtctcaaggtgatgccttgtttggcacctatagctgccaaagttgggtcagttggacacaaaatgaacttaacagggaatgaccaggaaggccgggaaagcaaggtgatgcctacattggcacctgttgtggctaaattgggcaactcgggggcctcaccaagttctgcagggaaatgaacttacttgtccttaagcagaagccaggctgtgaggggaaatagatctcacctcctttctctgcaggcatctgtttgtttgtgtcttagaacttggatccttgacttcaatgatgcagtggataatgatgggagaaagggggtagggtgctgaccctggtataagaagtactctgaaattctgatcatgttaaaatgtgttacctcacttgtggtgctgggtcccctcatcctctctaagaagatgtgatccattactgaacatgaggtgcccctcttacccaaggaatttataacatgactctggctccacagtggtttctagttcttcccccacaagcgaaagagctgtttgcaactttggagttgctgtagactgaactgtagcttgtagctgttgaattaagtccaaaatctaaggaatgcgatggacttgtgcaaagggatccagaagagacactttttagttgatgtttcaagaatagggagagagaggatgggtaccatggaataccaaagtgaaggactttgtgtcattcagtaaaattttcttttttcatatcctaagtagctcccattccctcaccttttcaatcagaattaacaaattcaagccttcagtaaagtagggatgcttttaacttttattattaattattttgagatcttaaaaaaatagtagttctcccttattatttttgtgggcattgaaaagctcatttcacagtaccagagatttttactgggagtatatattttggaggtaggcatagagggagccctaccccttccacaaattacgttactcaagagacagctaaaataaaatgcattatctccccagaccagagacagtggccaaaataaaaaatcatggggctggaaatttcccaaatcaaaccagcctcctggtgcttgaaggtttcattcactattacctgcacaggatgtaaagaaaagtcacagtaggcactctttaccagggaaataaggcagtatttgaatcacaagatatattttttatctgcaaccatggatccaatgatctgtagagctttttcactcattaactgtcaggatatgaaggactgacagtctgtaaagatatttatatttttgtatagttgttttcatagatttctcaaaggctgaagttttcaacctagaagatgagatttgtattgagtatagaaatgatgtttcctatctagtttgtaaataatcatggtgcacttgaggggtctcttggaaactcctagggggtcaagaatcactattctgaaactgtatagactgggatttagctgctgcattttgcctttcttaaataattatattttggaatgtaacccctgttctgtcttcattgacaggatttgcttgtgttgttaaaacactaacacaagagcttccagtgcctgggccgtgcctaggtgatgctatttcttctatatctcctgtcttctttatcccaaatcccactcagcatatcttcagacctaggttgtaagaccaactttggattggatctagccagtgaattattatttccatggttggttccctttctgttaactctggtaatcaacagattgaaaacggtggaagaacttctgaaaattgcagtgggagcaaattcttgttggttttgtgctgcttgcctttctagatctgctcatcagcacttaaccttccctcctctaaaggttactaaagaagcctgaagtaggtaaagagtgctcctcagcttcttatccttccactctttacccagcagatttcattcaatgccttagccaaggagtccagcacctgtctcccctgctaataattgtccttagagatgctagtactttaatccaggtatagcagtttcccgttattttcttgcttgtcgttcccctacatttcctcctgatttcccaagactctctttgtggcttttgagggtcagccaaggagcaggcaagtgagtgaacaatcctcaggaaaagaaggaccattttagcttaacacttccttttttttttttttttttttaagaagaatataggtaaacaggtaatgattcttgattggagataccatttgactcttgatgagagttgtacgaagatggaaatgagggatgattccaggcgttttagggggaaggctgcagataccattctaacccccaagatactgtgttctcaagacctcttagaactaggtgttgtcagggataatttgaggagggcttagtcttcagaacaatcctgcagtcttgacagaaatctaaaatctccaaaaactcctaccctttaaccttaccctagggggaactgatctatgaatattacatgtgtgattatgaaaggtgaagttgagtgagaggagttgaggaacgtggaagacagtgagctctcaccctaacactataagaagcatgatctcaatagaccaataattcacctttttatacatctgtaaataaatggaatgtttttaagaatataattatgtcagatttagcattttcttttatatattaaatatatatatctttccttttctgctttcgaaaagtgactatttttttagaaatctaagaacagaagtttggtgattgaaaggtagaatatataaacctgaaataaagcagttaaaacaattaaagc

SEQ ID NO: 36941 - DNA, 8571 bp, Artificial Sequence
  derived and/or modified sequence
atggaggagaagcagcagatcatcctggccaaccaggacggcggcacagttgcaggggccgccccaacattttttgtgatcctgaagcagcccggaaatggcaagaccgaccagggcatactcgtgaccaatcaggatgcttgcgcactcgcctcatctgtgagcagccctgtaaagtctaaggggaagatctgtctgcctgccgattgcactgtaggcggcatcactgtcactctagacaacaattcgatgtggaatgagttttatcatcggtccacagagatgatattgacaaaacagggaaggcgaatgttcccttattgccgatattggatcaccggtctggattccaatttaaaatatatcctcgtaatggacattagccctgttgataatcaccggtacaaatggaatgggcgatggtgggagccatccggtaaggccgagccgcacgtgctaggcagggtctttatccatcctgaatcaccctctactggtcactattggatgcaccagcctgttagcttttataagttaaaactcacaaataatacattggatcaagaggggcacatcatcttgcatagcatgcatcggtacctgccacggctgcacctcgtccccgcagagaaagccgttgaagtcatccagcttaacggacccggcgtgcacaccttcacatttccgcagaccgagtttttcgctgtcactgcataccaaaatatacagattacccagctcaagatagactataacccatttgccaaaggctttagagacgatggcctcaataataagccccagagggatggcaagcagaagaactcttcagatcaggagggtaataacatctccagctcaagtgggcacagagtccggcttaccgaaggccagggaagcgaaatccagccaggcgacttagaccccttatctcggggccatgagactagtgggaaaggcctcgagaaaacctctctaaatataaaacgcgacttcctcggatttatggacacagattcggctttgtccgaggtcccacagcttaagcaagaaatctcagaatgtctgatcgcctcatcattcgaggatgatagtagagttgccagtcccctggatcagaatggcagcttcaatgttgtgattaaggaagaaccccttgacgactacgactatgagctgggggagtgtccggagggggtgacggtcaaacaagaggagaccgacgaggaaaccgatgtgtacagtaacagtgacgatgacccgatcctggagaagcaactaaagaggcacaataaggtggataaccccgaggcagatcatttaagctctaaatggttaccgagcagtccgagcggggtggccaaagctaaaatgttcaagctcgataccgggaagatgccagtggtttacttggagccctgcgccgtgacccgctctactgtgaaaatatcagaactccctgacaacatgctatcaacctccaggaaggataagtcttcaatgcttgctgagctagaatacctaccgacctacattgagaattccaatgagaccgctttctgtttgggaaaagaatcagagaacggcctacggaaacactcccctgatctcagagtcgtacaaaagtatccgctgctgaaggaaccgcagtggaaatatcctgatatctctgactcgatttctaccgagaggatcttagatgattcgaaggacagcgtaggcgatagcctcagtggtaaggaagatctgggccgtaaacgaaccaccatgctgaagatcgccactgccgccaaagtagtgaacgcgaaccagaacgcctcccccaacgtgccgggaaagaggggcagacctcgcaaactgaaactgtgtaaggccggccgcccccccaagaatacgggcaaaagcctcatttcgaccaagaacactcccgtaagtccaggtagcactttccccgatgtcaagccagatcttgaggatgtggatggcgtcttgtttgtgagttttgaatcaaaagaagccctggacattcacgcagttgatggaaccacggaagaatcatcctccctgcaggcatccaccacgaatgactctggctatcgagcgaggatcagccaacttgaaaaagaattgatagaggatctgaaaaccttacgtcataaacaggtcattcaccccggactgcaagaggtagggctgaagctgaacagcgtggaccctactatgagcatagatcttaagtatctgggcgtgcaattacctctggcccctgctacatcttttcccttctggaatttgacgggcactaatccagcttcccccgatgcggggtttcctttcgtgagccgcactggcaagactaacgacttcacaaagatcaagggctggcggggaaaattccattctgcttccgcctctaggaatgaagggggcaactccgaatcctccctcaaaaatcggtctgccttttgttctgataagttggatgaatacctggagaacgagggtaagctgatggagaccagcatgggctttagctccaatgcacctacgagccctgtggtctaccagctgcccacaaagagtacatcttacgtgagaacgctcgactctgtgttgaagaagcaatccaccatctctcccagtacctcatattccctgaagcctcactccgtaccaccggtgtctcgcaaggcgaagtcccaaaatagacaagcgacgttctcaggaagaacgaagtctagttacaaatccattttaccttaccccgtgtcaccgaaacagaaatacagccacgtgatactgggagacaaagtgacaaaaaatagttctgggattatttctgagaatcaggctaacaatttcgttgtgcccacacttgatgagaacatcttccccaaacagatctccttgcggcaggctcagcagcagcagcagcagcagcagggatcacgacctcctggcctctcaaagagccaagtaaagttaatggatttggaagattgcgccctctgggaaggtaaaccaagaacttacataactgaggagagagccgatgttagcctgactactttgttgactgcgcaggcttcattaaagaccaaacctatccacaccatcatcaggaagagggcacccccctgcaacaacgacttttgtcgactgggatgtgtatgctcctcactggccctggagaagagacagcctgcacactgcaggcgccccgattgcatgttcgggtgcacatgtctgaaacggaaggttgtcctcgtcaagggcggcagcaagactaagcacttccagcggaaggcagcccaccgcgatcccgtgttctacgatactcttggggaggaggcacgggaggaggaggaaggcattcgggaggaggaggagcagctgaaggagaagaagaagaggaagaaattggagtatactatttgcgagaccgaacctgagcaacctgtgaggcattacccactgtgggtgaaagtggaaggggaggttgatccggaacctgtgtatattccgactccatcagtgatcgagccaatgaaaccactgctccttccgcagcctgaggtgctgagccctacagtgaagggtaagctcttgacaggcattaaatctccacgttcttataccccgaagcccaaccctgtgatcagggaggaggacaaagatcctgtgtacctgtatttcgaatctatgatgacttgcgctcgcgtgagagtctacgaacggaaaaaggaggatcaacggcagccttctagctcctcttcaccgagcccctcttttcagcagcaaacaagctgccatagctcaccagagaatcacaataatgcgaaggaaccagacagtgagcaacaaccactgaagcagctcacctgcgatctggaagatgactcagacaagctgcaggagaaatcttggaagagttcctgcaacgagggtgagtcctcaagcacctcgtatatgcaccagcgcagtcccgggggtccgaccaaactcatcgagatcatttccgactgcaattgggaggaggatcgcaataagatactatctattctaagccagcatatcaattcaaacatgcctcagtctctaaaggttgggtccttcatcatcgagctggcatcccaacgaaaatccaggggagaaaagaatcctccagtctactcctctcgtgtcaagatatcgatgccgagctgccaggaccaagacgatatggcggagaaatccggtagcgagacgcctgacggacccctatcgccagggaaaatggaggatatctcacccgtccagacggacgcactcgactccgtcagggaaagactccatgggggcaagggactccccttctacgccggcctttccccggcaggtaagctcgttgcatacaaaagaaagccatcaagttcaactagcggattaattcaggtggccagtaatgctaaagttgctgcatctaggaaaccccgtacactgcttccctctacgtccaactcaaagatggcgagttccagcggaaccgccactaatcggcctgggaagaacctcaaggcattcgtgcccgccaaacgcccaatcgaaaatgccgctcagatccccgtagccactcctcaggtttctcccaacaccgtgaaaagggcaggcccaagacttctgttaatcccagtccagcagggatcccccaccctgagacctgtctccaacacccaacttcagggccacagaatggtgctccagccggttcgctctccatcgggcatgaacctcttccgccatcccaatggtcagatcgttcaattgctgcctcttcatcagctgcggggctccaacacccaacccaatctgcagcctgtgatgttccgaaatcctggcagcgtgatgggcatcaggctgcctgcacctagcaaaccctcagagacccccccttcatcgaccagcagtagtgctttttcagtgatgaaccctgtgatccaggccgtaggtagtagctctgcagtgaatgtgatcacccaggcgccatccctgctgtcgagcggcgccagcttcgtttctcaggctggcactctcaccttgaggattagccctccagagcctcagagcttcgcatccaaaaccggctccgaaactaaaattacttactccagtggaggccagccagtcggaacagccagtttgattccgctacagagtggaagtttcgccctgttacaactccccggacagaagcctgtcccctcaagcatcctgcagcacgttgccagtttgcaaatgaaacgagagtctcagaatccagatcagaaggatgaaaccaactctatcaagagggaacaggaaaccaagaaagtgctccaatcggagggcgaagccgtggaccctgaggctaacgtaatcaaacagaacagtggcgctgcgaccagcgaagaaaccctgaacgatagtctcgaagacaggggagaccaccttgacgaggagtgccttccggaggaaggctgcgccaccgtaaagcccagtgagcactcctgtattaccggaagccacacggaccaggattataaggacgtaaacgaagaatacggcgcaaggaatcgcaaaagctcaaaggaaaaggtagcggtcctggaagtgagaaccatcagtgagaaagcttccaataagacagtccagaatctgtccaaagtccagcaccagaagttgggtgacgtcaaagtggagcagcaaaagggattcgataaccctgaagagaatagctccgaattccccgtaactttcaaggaagaatccaaatttgaactttctggcagcaaggtgatggaacaacaatctaatttacagccagaagccaaagagaaagaatgtggcgactcgctggaaaaggatagagaaaggtggaggaaacacctcaaagggcctctcacacggaagtgcgtcggggcttcccaggaatgcaagaaagaagccgatgagcagctgataaaggagacaaagacgtgtcaagaaaactccgatgtcttccagcaagagcaaggaattagcgacctgctcggaaagtctggcatcacagaagacgctagggtgttgaagacagagtgtgactcttggagtcggattagtaatccttcagccttcagcatcgtaccgcggagagccgccaaaagctcccggggcaatggacattttcagggccacctccttctcccaggcgagcaaatccagccaaagcaggagaagaaagggggaagatccagtgctgactttaccgtcctcgacctagaggaggatgacgaagatgataacgaaaagacagacgattccattgacgagattgtggatgtagtttcagactaccagtcagaagaagtggacgatgtggagaagaataactgtgtggaatatattgaggacgatgaggagcatgtagatatagagactgtggaggagctcagcgaagaaataaacgtcgcacaccttaaaaccaccgcagcccacacacagtcatttaagcagccatcgtgcacccacataagtgcagacgagaaggccgccgagaggtcacgcaaagcccctcctatccccctcaaactcaaacccgattactggagcgataagcttcagaaagaggccgaggccttcgcctattaccgccgcacccacaccgcgaacgaacgacggagacgaggggaaatgagggatctattcgaaaaattgaagatcactctagggcttctgcacagctctaaggtgtccaagtcactaatcttgacccgcgctttcagtgaaatacaggggctcaccgaccaagccgataagcttattgggcagaagaacctgttgacgaggaaacgaaatattttgatccgcaaagtgtcttcattgtccggcaagacggaagaagtagtgctaaaaaagctcgagtacatctatgctaagcagcaagcactcgaagctcagaagcgtaaaaagaaaatgggatccgatgaatttgatatctcccccaggatatctaaacagcaggaagggagcagtgcgtcctccgtggacctcggtcagatgttcataaacaaccgaaggggaaaaccgttaatcctgtcccggaaaaaagatcaggccacagagaatacttcccccctgaacaccccgcacacgtcagccaatctggttatgactcctcagggtcagctgctcacccttaaagggccgctgttctcaggacctgttgttgctgtgtccccagacttattagagtctgacttgaagccacaggtcgccggatccgccgtcgctctgccagaaaatgacgatctgttcatgatgccccgaattgtcaacgtgacatcactcgctaccgagggagggttggttgatatggggggcagtaagtatccccatgaggtcccagattccaagccgagcgaccatctgaaggataccgtaaggaatgaggacaattcactggaggataagggccgaatatctagccgggggaatcgagatggtcgcgtcaccctggggcctacccaggtgttcctagctaataaggacagtggctacccccagattgtggatgtgtccaatatgcagaaggcacaggagttcctccctaagaaaatttctggagacatgcgagggattcagtataagtggaaagaaagtgagagcaggggtgagcgggtgaagtccaaggacagcagttttcataagttgaagatgaaggacttgaaagactccagcatcgaaatggagcttagaaaagtgacttcagccattgaggaagctgccctcgatagcagcgagttactcaccaatatggaggatgaggatgacacagacgagaccttaacatctctcctcaacgaaatagcatttctgaaccagcagctgaatgatgactcagtgggcctagccgagttgccctcatcaatggatactgagtttcccggtgatgctagacgcgccttcatatccaaggtgcctcccggctccagagctacgttccaagtcgagcacctgggcaccgggctgaaggaacttcctgatgtgcagggagagtccgatagcatttcgcctttgctgctgcatttagaggatgacgatttctcagagaacgagaaacagttagccgagcccgcaagcgaacccgacgtactgaagatagtgattgactcagaaatcaaggattccttattgtctaataagaaagcaatcgacggcggcaagaacacatccgggctccccgcagagccagagtccgtgtccagccctccaaccttacatatgaaaaccgggctcgagaattcaaacagtactgataccctctggagacctatgcctaagctcgcccccctcgggttaaaagtggccaacccaagctcagatgccgacggacagtctctaaaagtaatgccatgtctcgcccccatagccgccaaggtggggagtgtgggacataagatgaatctgacagggaacgaccaggaaggcagggagtcaaaagtgatgccaaccctcgcgcctgtggtggccaagctggggaattccggcgcttctcctagctccgccggcaaatag

SEQ ID NO: 36942 - DNA, 8570 bp, Artificial Sequence
  derived and/or modified sequence
atggaggagaagcagcaaatcatcttagccaatcaggacggcggtaccgtggccggtgcggctcccaccttcttcgtgatactcaagcagcctggcaatggaaaaactgatcaggggatcctggtgacaaaccaagatgcctgtgccctggcctccagcgttagttcccctgtcaagtcaaaggggaagatctgtctgccagccgactgcactgtcgggggtataacagttacactggacaataattctatgtggaacgaattttaccaccgctctacagagatgatcttaacaaagcagggacgaagaatgttcccttattgcagatactggatcaccggactggattctaatctgaagtacattctcgttatggacattagtcccgtagataatcatcgatacaaatggaatggcagatggtgggaaccatcagggaaagcagaaccccacgtcctcggtcgagtgtttattcacccagagtcgccaagcacaggccactactggatgcaccaacctgtctccttctacaagctgaagcttacaaataataccctggaccaggaggggcacatcatcctccactccatgcatcgttacctcccgaggttgcatctggttccggcagaaaaagctgtggaagtgatccagctcaatggcccaggagtgcacacattcactttcccccagacagaatttttcgccgtaactgcctaccaaaacatacagattactcaactgaaaatcgattacaatccatttgctaagggctttcgcgatgatggtcttaataacaagccccagagagacgggaagcaaaaaaactcatctgatcaggagggaaataatatcagttctagcagcgggcatagggtccgtctgacagagggccagggatctgagatccaaccaggggatctggaccctttgagtcgagggcatgagacctccgggaaagggttggaaaagacaagcctgaatataaagagagacttccttggtttcatggacaccgatagcgccttgtctgaagtgccacagctgaaacaggaaatttccgaatgtctgatcgcaagttccttcgaggacgactccagggtggccagtcccctggaccagaacggctccttcaacgtagtgattaaagaagaaccccttgacgattatgactacgaactgggggagtgcccagagggggtcacagtaaagcaggaggagacagatgaagagactgatgtgtatagtaactccgatgatgaccccatcctggagaagcaactgaaacgccacaacaaagtggataacccagaggccgaccacttgagctcaaagtggctgccatcttctccgagtggggtggctaaggccaagatgtttaagttagacacaggcaagatgcccgtggtttacctggagccatgcgccgtgaccaggagcacggtcaagattagtgaactacctgacaatatgctaagcacatctcgaaaggataaatctagcatgttggctgaactggagtacttgcccacctatatcgagaattcaaacgaaacagctttctgcctcggcaaggagagcgaaaatgggcttaggaagcacagcccagatttgcgcgttgttcagaagtacccattactgaaggagcctcagtggaaataccctgacatttcggattccatctctacagaacgaatactggacgattccaaagattctgttggtgactctctaagcggaaaagaggacctcggccgaaaaaggacaaccatgcttaaaatcgccactgcagcaaaggtcgtgaatgcgaatcaaaatgcatcccctaatgtgcctggaaaacgtggtagaccccgaaagctcaagttgtgtaaagccggtcgtcctcccaaaaataccgggaaaagcctcattagtacgaaaaacacccctgtgagtccgggatctacctttccagatgtcaagccggacctcgaggatgttgacggcgtattatttgtgtcttttgaatctaaggaagccctggatatacacgctgtagatggaactacagaggaatcttcctccctgcaggcttctaccaccaacgactctggctatagagctcgaatatctcagttggagaaagaactgattgaagacttgaaaacattgaggcacaagcaggtgatccaccctggcttgcaagaggtggggctgaagttgaactccgtggatccaacaatgtcaatcgaccttaaatacttgggcgtgcaattgccgcttgcccctgccactagctttcccttctggaacctcactggaacaaatcctgccagccccgacgcgggtttccctttcgtgtcacgtaccggtaaaactaatgacttcaccaaaatcaagggatggcgcggaaagttccacagcgcaagtgccagcagaaatgaaggcggaaacagtgagagcagtctcaagaacaggagtgccttttgcagcgacaagctggacgaatatttagagaatgaaggaaagctcatggaaacatctatggggttctcttccaacgcaccaacgtctccggtagtttatcagctgcctaccaagagtacctcctacgtcagaacgctggattcagttcttaagaagcagtcaacaatctcaccctccacttcttactctctgaagcctcacagcgtacctcctgtttcccgaaaggccaagtcacagaacagacaggcgacgttcagcggcaggaccaagagttcatataaatccatcctgccatatcccgtttcccctaaacagaagtactctcacgttatattaggggacaaggtcacaaagaactctagcgggatcatctcggagaaccaagccaataattttgtagttccaacacttgacgaaaatatcttccccaaacagattagcctccgacaagcccagcagcagcagcaacagcagcaggggtccaggccacctggactgagtaagagccaggttaagttaatggatttagaagattgcgccctttgggagggtaagcctcgaacctatatcactgaggaacgagccgatgtgagccttacaactttgctgacagcccaagcttccttgaagactaagcctatccataccattatccgaaaacgggctcctccatgcaacaacgacttctgccggcttggttgtgtatgttctagcctggctttagaaaagcgacagccagcccactgtcgtagacctgattgtatgtttggctgcacttgtctgaagagaaaggtggtgctcgtgaaaggaggttctaaaacaaagcactttcaacgtaaagccgcacacagagatccggtgttctacgacaccctaggcgaggaggcccgagaagaagaagaaggtattcgagaagaggaggagcagctgaaagagaagaagaaacgtaagaagttggagtatacgatttgcgagaccgagccagagcagccggtgagacactatccactgtgggtaaaagtggagggggaggtggaccctgagcctgtttatattcccacacctagcgtaattgaaccaatgaaacctttactgttaccccaacctgaagttctgtcacccacagtgaagggtaagctgctgaccggtattaagtcccctagatcttatactccgaaaccaaaccccgtaatccgggaagaggacaaggaccccgtgtacctgtactttgagagcatgatgacttgcgccagagtccgggtttacgagaggaagaaggaagaccaaagacagccttcatcgtccagtagcccgtcacctagctttcagcagcaaacttcctgccacagcagccccgagaaccacaataatgccaaagagcctgattccgaacagcagcctctcaaacagctgacctgtgatctagaggacgacagcgataagctgcaggagaaatcatggaaaagttcttgtaacgagggggaatcatcgagtacctcatatatgcatcagcgctcccctgggggaccaacaaagctgatagagatcatctcagattgtaattgggaggaagatcgtaacaaaatcctgagtatcctctcacagcatatcaatagcaatatgccacagtccttaaaagttggtagttttatcatcgagctggcttcccagcggaagagcaggggggaaaagaatcctcccgtgtactccagccgtgtgaaaatttctatgccgagttgtcaagaccaggacgacatggctgaaaagagtggctcagagaccccggatggcccattaagtccaggcaagatggaagatattagcccagtacagacagatgccctggactctgtgagagagcgattgcacggaggaaagggcctgcctttctatgccggtctgagtccagccggaaaattagtagcatacaaacggaagcccagcagttcgacttccggtcttattcaggtagcctctaacgcgaaagtcgccgcttcacgtaaacctcgcacactgctgcctagtaccagtaattccaaaatggccagctcttcgggtacagcgactaaccgccctggaaagaacctaaaagccttcgtacctgctaaacggccaattgagaatgctgctcagatcccagtggctacaccccaggtgagtcctaacacagtcaagcgcgctggccctaggttgctgttgattcccgtgcagcaaggctccccaacgctaaggccggtttctaatacccaactgcaggggcaccggatggtgctgcaacctgttaggagcccctcagggatgaacctatttcgtcaccccaatggccagatcgtgcagcttctgcccctgcatcagcttagaggttcaaacacccagccaaacttgcagcccgtgatgtttaggaatccaggaagcgtcatgggaatacgcctgcctgccccaagtaaacccagcgaaactccgccatcatccacctctagcagcgcattctctgttatgaatccagtgattcaggctgtgggctcgtcctccgcggtgaacgtgatcactcaggccccttccctgctgagctctggcgcttcctttgtttcccaggcaggtacgttgactttgcgaattagtccacctgagccacagtcattcgcatcgaagactggttctgaaaccaagatcacttattccagtggtgggcagccggtgggcactgctagccttatcccactgcagagtgggagctttgctttgctccagctcccgggtcaaaagcctgttcctagcagcatccttcagcatgtggccagcctgcagatgaagagagaatcacagaaccccgatcaaaaggatgaaacaaactctattaagagggagcaggaaacaaagaaggttctgcaatccgagggcgaagcagtcgacccagaagccaacgtcatcaagcagaactccggtgctgctacttcagaggagacactgaacgacagcttggaagatcggggtgatcacctagatgaggaatgcctccctgaagagggatgtgccactgtcaagccttcggagcactcttgtatcacaggtagccatacagatcaagattacaaggacgtgaatgaagagtacggtgccaggaatagaaaatcgtccaaggaaaaggtggctgtcctcgaggtacgcaccatttcagagaaggcttctaataaaacagtccagaacctcagtaaagtccagcatcagaagctcggggacgtgaaggttgaacagcagaaagggttcgataacccagaggaaaacagtagtgaattcccagtcactttcaaggaggaatctaagtttgagctatcaggcagtaaggtaatggaacagcaatccaacctgcaacccgaggccaaagagaaagagtgtggcgactcgttggagaaagacagagaacgctggcggaaacatttgaaagggcctcttacgagaaagtgcgtgggggctagccaagagtgtaaaaaggaggctgacgagcagctcatcaaggaaaccaagacttgccaggagaatagtgacgttttccagcaggagcagggcatctctgatcttctcggaaaatccggtataaccgaagacgccagagttctaaagaccgagtgcgactcctggagtagaatatctaatccctccgctttcagcattgtgcctcgcagggcggcaaaatcgtctaggggaaacgggcatttccaaggtcatctactgctgcccggagagcagatccagcctaagcaggaaaaaaagggaggacgttctagcgctgacttcacagtactggatttggaggaggacgatgaggacgacaacgaaaagactgacgactccatagatgaaatcgttgatgttgtcagcgattatcagtcagaagaggtcgacgatgtagagaagaacaattgcgtggaatacatagaggatgacgaagaacatgtagatatcgaaaccgtggaggaattgtctgaagaaataaatgtcgcacatctcaagacaaccgctgctcacacccagagttttaagcagccgtcctgcacacacatttcagcagacgagaaggcagccgaacgaagccgaaaggcaccccctattccactgaaactgaagcctgattactggagtgataaactccagaaagaagcagaggctttcgcatattatcgcaggacacacactgctaatgagagacgaagacgcggagaaatgagagacctctttgaaaaattgaagatcacattaggactattgcattcttccaaggtctcaaagtctctgattttgactcgagcattctccgagatccagggcctcacggaccaggctgataagctgataggccaaaaaaacctgcttacacgaaagcggaatatcctgattcgaaaggtttcatccctcagcggcaagaccgaagaagtcgttctgaagaagctggaatacatttatgcaaagcagcaagctttggaggcacagaaacgaaaaaagaagatgggctccgacgaatttgatatcagcccgcgaatctcgaagcagcaggagggcagcagtgccagctccgtggacctggggcagatgtttattaataatagacgaggtaagcctttgattctttctcgaaaaaaggatcaggcgactgaaaataccagcccgctgaacacgccgcacacttccgccaaccttgttatgaccccgcagggacagctgctcactctgaagggacccctgtttagtgggcctgtagtggccgtgtcacctgacttacttgagtctgacctcaagccccaggttgctgggtctgcagtggctctgcctgagaatgatgatctgttcatgatgccacgaatagtgaatgtgacatcgctcgctactgagggcggactcgtggacatgggtggtagcaagtacccccacgaggtccccgattccaaaccaagcgatcacctcaaggataccgtcaggaacgaggataattctctggaggacaagggaagaattagcagccgcggtaatcgtgacgggagggtcaccctgggaccaacccaagtgttcctggcaaacaaggatagtgggtaccctcagatcgtcgatgtgtcgaacatgcagaaagcccaggagttcctgccaaagaagatttccggcgacatgaggggaatccagtacaagtggaaggagtccgagtcgcgcggtgagcgagtcaagtccaaagacagcagcttccacaaactgaaaatgaaggacctaaaagattcctcgatcgaaatggagcttagaaaggtgactagcgctatcgaggaggccgcacttgattcctcagaactgctcacaaacatggaggacgaagatgacactgacgagaccctgaccagtcttctaaatgagatcgcctttcttaatcagcaactcaatgatgattctgtcggcctggcagaacttcctagttctatggatacagagtttcctggcgacgccagaagagcgtttatctctaaagttccacctggctcccgcgctacattccaggtggagcacctaggcaccggcctgaaagaacttcccgacgtccagggagagtctgattctatctccccactacttctccatctagaggatgatgatttctctgaaaatgaaaagcagctcgcagagccagcctctgaacccgacgttcttaagatcgtgattgactcagaaatcaaagatagcttgctctctaataagaaggccatcgacggcggaaagaacaccagcgggttgcctgccgagccagagtccgtgagtagcccacccacactacatatgaaaaccggcctggagaactccaactcaactgatacattatggcggccaatgccaaagctggccccattgggcctgaaagtagcaaaccccagttccgatgcagacgggcaaagtcttaaggtcatgccttgccttgctcctattgccgcaaaggtaggtagcgtgggccataagatgaacctgaccggcaacgaccaggaggggagagagagcaaagtcatgcctaccctggcccctgtggtggcaaagttagggaattcaggagctagcccttccagtgccggaaaata

SEQ ID NO: 36943 - DNA, 8571 bp, Artificial Sequence
  derived and/or modified sequence
atggaggagaagcagcagatcatcctggccaaccaggacggcggcaccgtggccggcgccgcccccaccttcttcgtgatcctgaagcagcccggcaacggcaagaccgaccagggcatcctggtgaccaaccaggacgcctgcgccctggccagcagcgtgagcagccccgtgaagagcaagggcaagatctgcctgcccgccgactgcaccgtgggcggcatcaccgtgaccctggacaacaacagcatgtggaacgagttctaccacagaagcaccgagatgatcctgaccaagcagggcagaagaatgttcccctactgcagatactggatcaccggcctggacagcaacctgaagtacatcctggtgatggacatcagccccgtggacaaccacagatacaagtggaacggcagatggtgggagcccagcggcaaggccgagccccacgtgctgggcagagtgttcatccaccccgagagccccagcaccggccactactggatgcaccagcccgtgagcttctacaagctgaagctgaccaacaacaccctggaccaggagggccacatcatcctgcacagcatgcacagatacctgcccagactgcacctggtgcccgccgagaaggccgtggaggtgatccagctgaacggccccggcgtgcacaccttcaccttcccccagaccgagttcttcgccgtgaccgcctaccagaacatccagatcacccagctgaagatcgactacaaccccttcgccaagggcttcagagacgacggcctgaacaacaagccccagagagacggcaagcagaagaacagcagcgaccaggagggcaacaacatcagcagcagcagcggccacagagtgagactgaccgagggccagggcagcgagatccagcccggcgacctggaccccctgagcagaggccacgagaccagcggcaagggcctggagaagaccagcctgaacatcaagagagacttcctgggcttcatggacaccgacagcgccctgagcgaggtgccccagctgaagcaggagatcagcgagtgcctgatcgccagcagcttcgaggacgacagcagagtggccagccccctggaccagaacggcagcttcaacgtggtgatcaaggaggagcccctggacgactacgactacgagctgggcgagtgccccgagggcgtgaccgtgaagcaggaggagaccgacgaggagaccgacgtgtacagcaacagcgacgacgaccccatcctggagaagcagctgaagagacacaacaaggtggacaaccccgaggccgaccacctgagcagcaagtggctgcccagcagccccagcggcgtggccaaggccaagatgttcaagctggacaccggcaagatgcccgtggtgtacctggagccctgcgccgtgaccagaagcaccgtgaagatcagcgagctgcccgacaacatgctgagcaccagcagaaaggacaagagcagcatgctggccgagctggagtacctgcccacctacatcgagaacagcaacgagaccgccttctgcctgggcaaggagagcgagaacggcctgagaaagcacagccccgacctgagagtggtgcagaagtaccccctgctgaaggagccccagtggaagtaccccgacatcagcgacagcatcagcaccgagagaatcctggacgacagcaaggacagcgtgggcgacagcctgagcggcaaggaggacctgggcagaaagagaaccaccatgctgaagatcgccaccgccgccaaggtggtgaacgccaaccagaacgccagccccaacgtgcccggcaagagaggcagacccagaaagctgaagctgtgcaaggccggcagaccccccaagaacaccggcaagagcctgatcagcaccaagaacacccccgtgagccccggcagcaccttccccgacgtgaagcccgacctggaggacgtggacggcgtgctgttcgtgagcttcgagagcaaggaggccctggacatccacgccgtggacggcaccaccgaggagagcagcagcctgcaggccagcaccaccaacgacagcggctacagagccagaatcagccagctggagaaggagctgatcgaggacctgaagaccctgagacacaagcaggtgatccaccccggcctgcaggaggtgggcctgaagctgaacagcgtggaccccaccatgagcatcgacctgaagtacctgggcgtgcagctgcccctggcccccgccaccagcttccccttctggaacctgaccggcaccaaccccgccagccccgacgccggcttccccttcgtgagcagaaccggcaagaccaacgacttcaccaagatcaagggctggagaggcaagttccacagcgccagcgccagcagaaacgagggcggcaacagcgagagcagcctgaagaacagaagcgccttctgcagcgacaagctggacgagtacctggagaacgagggcaagctgatggagaccagcatgggcttcagcagcaacgcccccaccagccccgtggtgtaccagctgcccaccaagagcaccagctacgtgagaaccctggacagcgtgctgaagaagcagagcaccatcagccccagcaccagctacagcctgaagccccacagcgtgccccccgtgagcagaaaggccaagagccagaacagacaggccaccttcagcggcagaaccaagagcagctacaagagcatcctgccctaccccgtgagccccaagcagaagtacagccacgtgatcctgggcgacaaggtgaccaagaacagcagcggcatcatcagcgagaaccaggccaacaacttcgtggtgcccaccctggacgagaacatcttccccaagcagatcagcctgagacaggcccagcagcagcagcagcagcagcagggcagcagaccccccggcctgagcaagagccaggtgaagctgatggacctggaggactgcgccctgtgggagggcaagcccagaacctacatcaccgaggagagagccgacgtgagcctgaccaccctgctgaccgcccaggccagcctgaagaccaagcccatccacaccatcatcagaaagagagcccccccctgcaacaacgacttctgcagactgggctgcgtgtgcagcagcctggccctggagaagagacagcccgcccactgcagaagacccgactgcatgttcggctgcacctgcctgaagagaaaggtggtgctggtgaagggcggcagcaagaccaagcacttccagagaaaggccgcccacagagaccccgtgttctacgacaccctgggcgaggaggccagagaggaggaggagggcatcagagaggaggaggagcagctgaaggagaagaagaagagaaagaagctggagtacaccatctgcgagaccgagcccgagcagcccgtgagacactaccccctgtgggtgaaggtggagggcgaggtggaccccgagcccgtgtacatccccacccccagcgtgatcgagcccatgaagcccctgctgctgccccagcccgaggtgctgagccccaccgtgaagggcaagctgctgaccggcatcaagagccccagaagctacacccccaagcccaaccccgtgatcagagaggaggacaaggaccccgtgtacctgtacttcgagagcatgatgacctgcgccagagtgagagtgtacgagagaaagaaggaggaccagagacagcccagcagcagcagcagccccagccccagcttccagcagcagaccagctgccacagcagccccgagaaccacaacaacgccaaggagcccgacagcgagcagcagcccctgaagcagctgacctgcgacctggaggacgacagcgacaagctgcaggagaagagctggaagagcagctgcaacgagggcgagagcagcagcaccagctacatgcaccagagaagccccggcggccccaccaagctgatcgagatcatcagcgactgcaactgggaggaggacagaaacaagatcctgagcatcctgagccagcacatcaacagcaacatgccccagagcctgaaggtgggcagcttcatcatcgagctggccagccagagaaagagcagaggcgagaagaacccccccgtgtacagcagcagagtgaagatcagcatgcccagctgccaggaccaggacgacatggccgagaagagcggcagcgagacccccgacggccccctgagccccggcaagatggaggacatcagccccgtgcagaccgacgccctggacagcgtgagagagagactgcacggcggcaagggcctgcccttctacgccggcctgagccccgccggcaagctggtggcctacaagagaaagcccagcagcagcaccagcggcctgatccaggtggccagcaacgccaaggtggccgccagcagaaagcccagaaccctgctgcccagcaccagcaacagcaagatggccagcagcagcggcaccgccaccaacagacccggcaagaacctgaaggccttcgtgcccgccaagagacccatcgagaacgccgcccagatccccgtggccaccccccaggtgagccccaacaccgtgaagagagccggccccagactgctgctgatccccgtgcagcagggcagccccaccctgagacccgtgagcaacacccagctgcagggccacagaatggtgctgcagcccgtgagaagccccagcggcatgaacctgttcagacaccccaacggccagatcgtgcagctgctgcccctgcaccagctgagaggcagcaacacccagcccaacctgcagcccgtgatgttcagaaaccccggcagcgtgatgggcatcagactgcccgcccccagcaagcccagcgagaccccccccagcagcaccagcagcagcgccttcagcgtgatgaaccccgtgatccaggccgtgggcagcagcagcgccgtgaacgtgatcacccaggcccccagcctgctgagcagcggcgccagcttcgtgagccaggccggcaccctgaccctgagaatcagcccccccgagccccagagcttcgccagcaagaccggcagcgagaccaagatcacctacagcagcggcggccagcccgtgggcaccgccagcctgatccccctgcagagcggcagcttcgccctgctgcagctgcccggccagaagcccgtgcccagcagcatcctgcagcacgtggccagcctgcagatgaagagagagagccagaaccccgaccagaaggacgagaccaacagcatcaagagagagcaggagaccaagaaggtgctgcagagcgagggcgaggccgtggaccccgaggccaacgtgatcaagcagaacagcggcgccgccaccagcgaggagaccctgaacgacagcctggaggacagaggcgaccacctggacgaggagtgcctgcccgaggagggctgcgccaccgtgaagcccagcgagcacagctgcatcaccggcagccacaccgaccaggactacaaggacgtgaacgaggagtacggcgccagaaacagaaagagcagcaaggagaaggtggccgtgctggaggtgagaaccatcagcgagaaggccagcaacaagaccgtgcagaacctgagcaaggtgcagcaccagaagctgggcgacgtgaaggtggagcagcagaagggcttcgacaaccccgaggagaacagcagcgagttccccgtgaccttcaaggaggagagcaagttcgagctgagcggcagcaaggtgatggagcagcagagcaacctgcagcccgaggccaaggagaaggagtgcggcgacagcctggagaaggacagagagagatggagaaagcacctgaagggccccctgaccagaaagtgcgtgggcgccagccaggagtgcaagaaggaggccgacgagcagctgatcaaggagaccaagacctgccaggagaacagcgacgtgttccagcaggagcagggcatcagcgacctgctgggcaagagcggcatcaccgaggacgccagagtgctgaagaccgagtgcgacagctggagcagaatcagcaaccccagcgccttcagcatcgtgcccagaagagccgccaagagcagcagaggcaacggccacttccagggccacctgctgctgcccggcgagcagatccagcccaagcaggagaagaagggcggcagaagcagcgccgacttcaccgtgctggacctggaggaggacgacgaggacgacaacgagaagaccgacgacagcatcgacgagatcgtggacgtggtgagcgactaccagagcgaggaggtggacgacgtggagaagaacaactgcgtggagtacatcgaggacgacgaggagcacgtggacatcgagaccgtggaggagctgagcgaggagatcaacgtggcccacctgaagaccaccgccgcccacacccagagcttcaagcagcccagctgcacccacatcagcgccgacgagaaggccgccgagagaagcagaaaggccccccccatccccctgaagctgaagcccgactactggagcgacaagctgcagaaggaggccgaggccttcgcctactacagaagaacccacaccgccaacgagagaagaagaagaggcgagatgagagacctgttcgagaagctgaagatcaccctgggcctgctgcacagcagcaaggtgagcaagagcctgatcctgaccagagccttcagcgagatccagggcctgaccgaccaggccgacaagctgatcggccagaagaacctgctgaccagaaagagaaacatcctgatcagaaaggtgagcagcctgagcggcaagaccgaggaggtggtgctgaagaagctggagtacatctacgccaagcagcaggccctggaggcccagaagagaaagaagaagatgggcagcgacgagttcgacatcagccccagaatcagcaagcagcaggagggcagcagcgccagcagcgtggacctgggccagatgttcatcaacaacagaagaggcaagcccctgatcctgagcagaaagaaggaccaggccaccgagaacaccagccccctgaacaccccccacaccagcgccaacctggtgatgaccccccagggccagctgctgaccctgaagggccccctgttcagcggccccgtggtggccgtgagccccgacctgctggagagcgacctgaagccccaggtggccggcagcgccgtggccctgcccgagaacgacgacctgttcatgatgcccagaatcgtgaacgtgaccagcctggccaccgagggcggcctggtggacatgggcggcagcaagtacccccacgaggtgcccgacagcaagcccagcgaccacctgaaggacaccgtgagaaacgaggacaacagcctggaggacaagggcagaatcagcagcagaggcaacagagacggcagagtgaccctgggccccacccaggtgttcctggccaacaaggacagcggctacccccagatcgtggacgtgagcaacatgcagaaggcccaggagttcctgcccaagaagatcagcggcgacatgagaggcatccagtacaagtggaaggagagcgagagcagaggcgagagagtgaagagcaaggacagcagcttccacaagctgaagatgaaggacctgaaggacagcagcatcgagatggagctgagaaaggtgaccagcgccatcgaggaggccgccctggacagcagcgagctgctgaccaacatggaggacgaggacgacaccgacgagaccctgaccagcctgctgaacgagatcgccttcctgaaccagcagctgaacgacgacagcgtgggcctggccgagctgcccagcagcatggacaccgagttccccggcgacgccagaagagccttcatcagcaaggtgccccccggcagcagagccaccttccaggtggagcacctgggcaccggcctgaaggagctgcccgacgtgcagggcgagagcgacagcatcagccccctgctgctgcacctggaggacgacgacttcagcgagaacgagaagcagctggccgagcccgccagcgagcccgacgtgctgaagatcgtgatcgacagcgagatcaaggacagcctgctgagcaacaagaaggccatcgacggcggcaagaacaccagcggcctgcccgccgagcccgagagcgtgagcagcccccccaccctgcacatgaagaccggcctggagaacagcaacagcaccgacaccctgtggagacccatgcccaagctggcccccctgggcctgaaggtggccaaccccagcagcgacgccgacggccagagcctgaaggtgatgccctgcctggcccccatcgccgccaaggtgggcagcgtgggccacaagatgaacctgaccggcaacgaccaggagggcagagagagcaaggtgatgcccaccctggcccccgtggtggccaagctgggcaacagcggcgccagccccagcagcgccggcaagtag

SEQ ID NO: 36944 - protein, 1133 aa, Artificial Sequence
  derived and/or modified sequence
MAPKTKKGCKVTLPEKPVKLASHTRDTTGVSQMFPSSKARTKSLLGDDVFSTMAGLEEADAEVSGISEADPQALLQAMKDLDGMDADILGLKKSNSAPSKKAAKDPGKGELPNHPKPAGGAIPTKKSLPSPSSSGHQNRRFSSEDLEDPLRGLLSYDEGGITKQPPVTQSKTASDKSPSTVRDQGPSIPLTPGDTPIRKKEELLFDDGDDIMATLGFGDSPKAEKRQIGDQEGPRPARSTLDELLGRGMATKLLARPGTGEHREFKLDKKYQRPQDSEDMWGDEDFTFGAYQPTVVSSEGRQSRRQSVRFFADSGADPKGEPGSKQSPPMASSPIQPRKGGADWLGLKDEDLDLFPASPTREAHRESSVPVTPSVPPPASQHSTPAGLPPSRAKPPTEGAGSPAKASQASKLRASKEEKEDWLSHALSRKKSQGLAREQHAGTSEGLHLAGTAGHPPSGSQPLTSTQGLEHAAAGGSSGTTARERPCVRPGVSGSPVTQNHAASALPTGSPKRGTAPGDLSATEPATCFPSTQKPTEPSVPVQPLLPESLARSLLPSTEYQKQLLAAQVQLQCSPAELQAELLHSQARLAELEAQVRKLELERAQHELLLGSLQQQHQADLELIESAHRSRIKVLETSYQQREERLRRENEELSARYLSQCQEAEQARAELTAQHQRRLAAIAQEKDQEMERLRELQRASILDMRRDHEEQLQRLKLLKDREVDAATSATSHTRSLNSIIHQMEKFSSSLHELSSRVEASHLTTSQERELGIRQRDEQLRALQERLGQQQRDMEEERSRQQEVIGKMEARLNEQSRLLEQERWRVTAEQSKAESMQRALEEQRKVTAQQMAMERAELERAKSALLEEQKSVMLKCGEERRRLAAEWAEFSAQQKLSKERAEREAERALQVDTQREGTLISLAKEQAELKIRASELRAEEKQLAAERAALEQERQELRLEKERINATALRVKLRAEEVESMSKVASEKYEEGERALREAQQVQAEQQARLQAVQQQQERLRKQEQHMHQEHLSLAQQRLQLDRARQDLPSSLVGLFPRAQGPAASSQSALMPPAPTTRWCSQPPTGLDPSPLHLHARLALLRHMAEQDRDFLENEQFFLETLKKGSYNLTSHSA

SEQ ID NO: 36945 - protein, 830 aa, Artificial Sequence
  derived and/or modified sequence
MAPKTKKGCKVTLPEKPVKLASHTRDTTGVSQMFPSSKARTKSLLGDDVFSTMAGLEEADAEVSGISEADPQALLQAMKDLDGMDADILGLKKSNSAPSKKAAKDPGKGELPNHPKPAGGAIPTKKSLPSPSSSGHQNRRFSSEDLEDPLRGLLSYDEGGITKQPPVTQSKTASDKSPSTVRDQGPSIPLTPGDTPIRKKEELLFDDGDDIMATLGFGDSPKAEKRQIGDQEGPRPARSTLDELLGRGMATKLLARPGTGEHREFKLDKKYQRPQDSEDMWGDEDFTFGAYQPTVVSSEGRQSRRQSVSRFFADSGADPKGEPGSKQSPPMASSPIQPRKGGADWLGLKDEDLDLFPASPTREAHRESSVPVTPSVPPPASQHSTPAGLPPSRAKPPTEGAGSPAKASQASKLRASKEEKEDWLSHALSRKKSQGLAREQHAGTSEGLHLAGTAGHPPSGSQPLTSTQGLEHAAAGGSSGTTARERPCVRPGVSGSPVTQNHAASALPTGSPKRGTAPGDLSATEPATCFPSTQKPTEPSVPVQPLLPESLARSLLPSTEYQKQLLAAQVQLQCSPAELQAELLHSQARLAELEAQVRKLELERAQHELLLGSLQQQHQADLELIESAHRSRIKVLETSYQQREERLRRENEELSARYLSQCQEAEQARAELTAQHQRRLAAIAQEKDQEMERLRELQRASILDMRRDHEEQLQRLKLLKDREVDAATSATSHTRSLNSIIHQMEKFSSSLHELSSRVEASHLTTSQERELGIRQRDEQLRALQERLGQQQRDMGRDEEGSLCAAHLPKAQLSGYAVEATRNQSQLQRFL

SEQ ID NO: 36946 - protein, 1134 aa, Artificial Sequence
  derived and/or modified sequence
MAPKTKKGCKVTLPEKPVKLASHTRDTTGVSQMFPSSKARTKSLLGDDVFSTMAGLEEADAEVSGISEADPQALLQAMKDLDGMDADILGLKKSNSAPSKKAAKDPGKGELPNHPKPAGGAIPTKKSLPSPSSSGHQNRRFSSEDLEDPLRGLLSYDEGGITKQPPVTQSKTASDKSPSTVRDQGPSIPLTPGDTPIRKKEELLFDDGDDIMATLGFGDSPKAEKRQIGDQEGPRPARSTLDELLGRGMATKLLARPGTGEHREFKLDKKYQRPQDSEDMWGDEDFTFGAYQPTVVSSEGRQSRRQSVSRFFADSGADPKGEPGSKQSPPMASSPIQPRKGGADWLGLKDEDLDLFPASPTREAHRESSVPVTPSVPPPASQHSTPAGLPPSRAKPPTEGAGSPAKASQASKLRASKEEKEDWLSHALSRKKSQGLAREQHAGTSEGLHLAGTAGHPPSGSQPLTSTQGLEHAAAGGSSGTTARERPCVRPGVSGSPVTQNHAASALPTGSPKRGTAPGDLSATEPATCFPSTQKPTEPSVPVQPLLPESLARSLLPSTEYQKQLLAAQVQLQCSPAELQAELLHSQARLAELEAQVRKLELERAQHELLLGSLQQQHQADLELIESAHRSRIKVLETSYQQREERLRRENEELSARYLSQCQEAEQARAELTAQHQRRLAAIAQEKDQEMERLRELQRASILDMRRDHEEQLQRLKLLKDREVDAATSATSHTRSLNSIIHQMEKFSSSLHELSSRVEASHLTTSQERELGIRQRDEQLRALQERLGQQQRDMEEERSRQQEVIGKMEARLNEQSRLLEQERWRVTAEQSKAESMQRALEEQRKVTAQQMAMERAELERAKSALLEEQKSVMLKCGEERRRLAAEWAEFSAQQKLSKERAEREAERALQVDTQREGTLISLAKEQAELKIRASELRAEEKQLAAERAALEQERQELRLEKERINATALRVKLRAEEVESMSKVASEKYEEGERALREAQQVQAEQQARLQAVQQQQERLRKQEQHMHQEHLSLAQQRLQLDRARQDLPSSLVGLFPRAQGPAASSQSALMPPAPTTRWCSQPPTGLDPSPLHLHARLALLRHMAEQDRDFLENEQFFLETLKKGSYNLTSHSA

SEQ ID NO: 36947 - protein, 1147 aa, Artificial Sequence
  derived and/or modified sequence
APKTKKGCKGSIDDFLGDLLGDDMTLPEKPVKLASHTRDTTGVSQMFPSSKARTKSLLGDDVFSTMAGLEEADAEVSGISEADPQALLQAMKDLDGMDADILGLKKSNSAPSKKAAKDPGKGELPNHPKPAGGAIPTKKSLPSPSSSGHQNRRFSSEDLEDPLRGLLSYDEGGITKQPPVTQSKTASDKSPSTVRDQGPSIPLTPGDTPIRKKEELLFDDGDDIMATLGFGDSPKAEKRQIGDQEGPRPARSTLDELLGRGMATKLLARPGTGEHREFKLDKKYQRPQDSEDMWGDEDFTFGAYQPTVVSSEGRQSRRQSVSRFFADSGADPKGEPGSKQSPPMASSPIQPRKGGADWLGLKDEDLDLFPASPTREAHRESSVPVTPSVPPPASQHSTPAGLPPSRAKPPTEGAGSPAKASQASKLRASKEEKEDWLSHALSRKKSQGLAREQHAGTSEGLHLAGTAGHPPSGSQPLTSTQGLEHAAAGGSSGTTARERPCVRPGVSGSPVTQNHAASALPTGSPKRGTAPGDLSATEPATCFPSTQKPTEPSVPVQPLLPESLARSLLPSTEYQKQLLAAQVQLQCSPAELQAELLHSQARLAELEAQVRKLELERAQHELLLGSLQQQHQADLELIESAHRSRIKVLETSYQQREERLRRENEELSARYLSQCQEAEQARAELTAQHQRRLAAIAQEKDQEMERLRELQRASILDMRRDHEEQLQRLKLLKDREVDAATSATSHTRSLNSIIHQMEKFSSSLHELSSRVEASHLTTSQERELGIRQRDEQLRALQERLGQQQRDMEEERSRQQEVIGKMEARLNEQSRLLEQERWRVTAEQSKAESMQRALEEQRKVTAQQMAMERAELERAKSALLEEQKSVMLKCGEERRRLAAEWAEFSAQQKLSKERAEREAERALQVDTQREGTLISLAKEQAELKIRASELRAEEKQLAAERAALEQERQELRLEKERINATALRVKLRAEEVESMSKVASEKYEEGERALREAQQVQAEQQARLQAVQQQQERLRKQEQHMHQEHLSLAQQRLQLDRARQDLPSSLVGLFPRAQGPAASSQSALMPPAPTTRWCSQPPTGLDPSPLHLHARLALLRHMAEQDRDFLENEQFFLETLKKGSYNLTSHSA

SEQ ID NO: 36948 - DNA, 3402 bp, Artificial Sequence
  derived and/or modified sequence
atggcccccaagaccaagaagggctgcaaggtgaccctgcccgagaagcccgtgaagctggccagccacaccagagacaccaccggcgtgagccagatgttccccagcagcaaggccagaaccaagagcctgctgggcgacgacgtgttcagcaccatggccggcctggaggaggccgacgccgaggtgagcggcatcagcgaggccgacccccaggccctgctgcaggccatgaaggacctggacggcatggacgccgacatcctgggcctgaagaagagcaacagcgcccccagcaagaaggccgccaaggaccccggcaagggcgagctgcccaaccaccccaagcccgccggcggcgccatccccaccaagaagagcctgcccagccccagcagcagcggccaccagaacagaagattcagcagcgaggacctggaggaccccctgagaggcctgctgagctacgacgagggcggcatcaccaagcagccccccgtgacccagagcaagaccgccagcgacaagagccccagcaccgtgagagaccagggccccagcatccccctgacccccggcgacacccccatcagaaagaaggaggagctgctgttcgacgacggcgacgacatcatggccaccctgggcttcggcgacagccccaaggccgagaagagacagatcggcgaccaggagggccccagacccgccagaagcaccctggacgagctgctgggcagaggcatggccaccaagctgctggccagacccggcaccggcgagcacagagagttcaagctggacaagaagtaccagagaccccaggacagcgaggacatgtggggcgacgaggacttcaccttcggcgcctaccagcccaccgtggtgagcagcgagggcagacagagcagaagacagagcgtgagattcttcgccgacagcggcgccgaccccaagggcgagcccggcagcaagcagagcccccccatggccagcagccccatccagcccagaaagggcggcgccgactggctgggcctgaaggacgaggacctggacctgttccccgccagccccaccagagaggcccacagagagagcagcgtgcccgtgacccccagcgtgcccccccccgccagccagcacagcacccccgccggcctgccccccagcagagccaagccccccaccgagggcgccggcagccccgccaaggccagccaggccagcaagctgagagccagcaaggaggagaaggaggactggctgagccacgccctgagcagaaagaagagccagggcctggccagagagcagcacgccggcaccagcgagggcctgcacctggccggcaccgccggccacccccccagcggcagccagcccctgaccagcacccagggcctggagcacgccgccgccggcggcagcagcggcaccaccgccagagagagaccctgcgtgagacccggcgtgagcggcagccccgtgacccagaaccacgccgccagcgccctgcccaccggcagccccaagagaggcaccgcccccggcgacctgagcgccaccgagcccgccacctgcttccccagcacccagaagcccaccgagcccagcgtgcccgtgcagcccctgctgcccgagagcctggccagaagcctgctgcccagcaccgagtaccagaagcagctgctggccgcccaggtgcagctgcagtgcagccccgccgagctgcaggccgagctgctgcacagccaggccagactggccgagctggaggcccaggtgagaaagctggagctggagagagcccagcacgagctgctgctgggcagcctgcagcagcagcaccaggccgacctggagctgatcgagagcgcccacagaagcagaatcaaggtgctggagaccagctaccagcagagagaggagagactgagaagagagaacgaggagctgagcgccagatacctgagccagtgccaggaggccgagcaggccagagccgagctgaccgcccagcaccagagaagactggccgccatcgcccaggagaaggaccaggagatggagagactgagagagctgcagagagccagcatcctggacatgagaagagaccacgaggagcagctgcagagactgaagctgctgaaggacagagaggtggacgccgccaccagcgccaccagccacaccagaagcctgaacagcatcatccaccagatggagaagttcagcagcagcctgcacgagctgagcagcagagtggaggccagccacctgaccaccagccaggagagagagctgggcatcagacagagagacgagcagctgagagccctgcaggagagactgggccagcagcagagagacatggaggaggagagaagcagacagcaggaggtgatcggcaagatggaggccagactgaacgagcagagcagactgctggagcaggagagatggagagtgaccgccgagcagagcaaggccgagagcatgcagagagccctggaggagcagagaaaggtgaccgcccagcagatggccatggagagagccgagctggagagagccaagagcgccctgctggaggagcagaagagcgtgatgctgaagtgcggcgaggagagaagaagactggccgccgagtgggccgagttcagcgcccagcagaagctgagcaaggagagagccgagagagaggccgagagagccctgcaggtggacacccagagagagggcaccctgatcagcctggccaaggagcaggccgagctgaagatcagagccagcgagctgagagccgaggagaagcagctggccgccgagagagccgccctggagcaggagagacaggagctgagactggagaaggagagaatcaacgccaccgccctgagagtgaagctgagagccgaggaggtggagagcatgagcaaggtggccagcgagaagtacgaggagggcgagagagccctgagagaggcccagcaggtgcaggccgagcagcaggccagactgcaggccgtgcagcagcagcaggagagactgagaaagcaggagcagcacatgcaccaggagcacctgagcctggcccagcagagactgcagctggacagagccagacaggacctgcccagcagcctggtgggcctgttccccagagcccagggccccgccgccagcagccagagcgccctgatgccccccgcccccaccaccagatggtgcagccagccccccaccggcctggaccccagccccctgcacctgcacgccagactggccctgctgagacacatggccgagcaggacagagacttcctggagaacgagcagttcttcctggagaccctgaagaagggcagctacaacctgaccagccacagcgcctag

SEQ ID NO: 36949 - DNA, 2493 bp, Artificial Sequence
  derived and/or modified sequence
atggcccccaagaccaagaagggctgcaaggtgaccctgcccgagaagcccgtgaagctggccagccacaccagagacaccaccggcgtgagccagatgttccccagcagcaaggccagaaccaagagcctgctgggcgacgacgtgttcagcaccatggccggcctggaggaggccgacgccgaggtgagcggcatcagcgaggccgacccccaggccctgctgcaggccatgaaggacctggacggcatggacgccgacatcctgggcctgaagaagagcaacagcgcccccagcaagaaggccgccaaggaccccggcaagggcgagctgcccaaccaccccaagcccgccggcggcgccatccccaccaagaagagcctgcccagccccagcagcagcggccaccagaacagaagattcagcagcgaggacctggaggaccccctgagaggcctgctgagctacgacgagggcggcatcaccaagcagccccccgtgacccagagcaagaccgccagcgacaagagccccagcaccgtgagagaccagggccccagcatccccctgacccccggcgacacccccatcagaaagaaggaggagctgctgttcgacgacggcgacgacatcatggccaccctgggcttcggcgacagccccaaggccgagaagagacagatcggcgaccaggagggccccagacccgccagaagcaccctggacgagctgctgggcagaggcatggccaccaagctgctggccagacccggcaccggcgagcacagagagttcaagctggacaagaagtaccagagaccccaggacagcgaggacatgtggggcgacgaggacttcaccttcggcgcctaccagcccaccgtggtgagcagcgagggcagacagagcagaagacagagcgtgagcagattcttcgccgacagcggcgccgaccccaagggcgagcccggcagcaagcagagcccccccatggccagcagccccatccagcccagaaagggcggcgccgactggctgggcctgaaggacgaggacctggacctgttccccgccagccccaccagagaggcccacagagagagcagcgtgcccgtgacccccagcgtgcccccccccgccagccagcacagcacccccgccggcctgccccccagcagagccaagccccccaccgagggcgccggcagccccgccaaggccagccaggccagcaagctgagagccagcaaggaggagaaggaggactggctgagccacgccctgagcagaaagaagagccagggcctggccagagagcagcacgccggcaccagcgagggcctgcacctggccggcaccgccggccacccccccagcggcagccagcccctgaccagcacccagggcctggagcacgccgccgccggcggcagcagcggcaccaccgccagagagagaccctgcgtgagacccggcgtgagcggcagccccgtgacccagaaccacgccgccagcgccctgcccaccggcagccccaagagaggcaccgcccccggcgacctgagcgccaccgagcccgccacctgcttccccagcacccagaagcccaccgagcccagcgtgcccgtgcagcccctgctgcccgagagcctggccagaagcctgctgcccagcaccgagtaccagaagcagctgctggccgcccaggtgcagctgcagtgcagccccgccgagctgcaggccgagctgctgcacagccaggccagactggccgagctggaggcccaggtgagaaagctggagctggagagagcccagcacgagctgctgctgggcagcctgcagcagcagcaccaggccgacctggagctgatcgagagcgcccacagaagcagaatcaaggtgctggagaccagctaccagcagagagaggagagactgagaagagagaacgaggagctgagcgccagatacctgagccagtgccaggaggccgagcaggccagagccgagctgaccgcccagcaccagagaagactggccgccatcgcccaggagaaggaccaggagatggagagactgagagagctgcagagagccagcatcctggacatgagaagagaccacgaggagcagctgcagagactgaagctgctgaaggacagagaggtggacgccgccaccagcgccaccagccacaccagaagcctgaacagcatcatccaccagatggagaagttcagcagcagcctgcacgagctgagcagcagagtggaggccagccacctgaccaccagccaggagagagagctgggcatcagacagagagacgagcagctgagagccctgcaggagagactgggccagcagcagagagacatgggcagagacgaggagggcagcctgtgcgccgcccacctgcccaaggcccagctgagcggctacgccgtggaggccaccagaaaccagagccagctgcagagattcctgtag

SEQ ID NO: 36950 - DNA, 3405 bp, Artificial Sequence
  derived and/or modified sequence
atggcccccaagaccaagaagggctgcaaggtgaccctgcccgagaagcccgtgaagctggccagccacaccagagacaccaccggcgtgagccagatgttccccagcagcaaggccagaaccaagagcctgctgggcgacgacgtgttcagcaccatggccggcctggaggaggccgacgccgaggtgagcggcatcagcgaggccgacccccaggccctgctgcaggccatgaaggacctggacggcatggacgccgacatcctgggcctgaagaagagcaacagcgcccccagcaagaaggccgccaaggaccccggcaagggcgagctgcccaaccaccccaagcccgccggcggcgccatccccaccaagaagagcctgcccagccccagcagcagcggccaccagaacagaagattcagcagcgaggacctggaggaccccctgagaggcctgctgagctacgacgagggcggcatcaccaagcagccccccgtgacccagagcaagaccgccagcgacaagagccccagcaccgtgagagaccagggccccagcatccccctgacccccggcgacacccccatcagaaagaaggaggagctgctgttcgacgacggcgacgacatcatggccaccctgggcttcggcgacagccccaaggccgagaagagacagatcggcgaccaggagggccccagacccgccagaagcaccctggacgagctgctgggcagaggcatggccaccaagctgctggccagacccggcaccggcgagcacagagagttcaagctggacaagaagtaccagagaccccaggacagcgaggacatgtggggcgacgaggacttcaccttcggcgcctaccagcccaccgtggtgagcagcgagggcagacagagcagaagacagagcgtgagcagattcttcgccgacagcggcgccgaccccaagggcgagcccggcagcaagcagagcccccccatggccagcagccccatccagcccagaaagggcggcgccgactggctgggcctgaaggacgaggacctggacctgttccccgccagccccaccagagaggcccacagagagagcagcgtgcccgtgacccccagcgtgcccccccccgccagccagcacagcacccccgccggcctgccccccagcagagccaagccccccaccgagggcgccggcagccccgccaaggccagccaggccagcaagctgagagccagcaaggaggagaaggaggactggctgagccacgccctgagcagaaagaagagccagggcctggccagagagcagcacgccggcaccagcgagggcctgcacctggccggcaccgccggccacccccccagcggcagccagcccctgaccagcacccagggcctggagcacgccgccgccggcggcagcagcggcaccaccgccagagagagaccctgcgtgagacccggcgtgagcggcagccccgtgacccagaaccacgccgccagcgccctgcccaccggcagccccaagagaggcaccgcccccggcgacctgagcgccaccgagcccgccacctgcttccccagcacccagaagcccaccgagcccagcgtgcccgtgcagcccctgctgcccgagagcctggccagaagcctgctgcccagcaccgagtaccagaagcagctgctggccgcccaggtgcagctgcagtgcagccccgccgagctgcaggccgagctgctgcacagccaggccagactggccgagctggaggcccaggtgagaaagctggagctggagagagcccagcacgagctgctgctgggcagcctgcagcagcagcaccaggccgacctggagctgatcgagagcgcccacagaagcagaatcaaggtgctggagaccagctaccagcagagagaggagagactgagaagagagaacgaggagctgagcgccagatacctgagccagtgccaggaggccgagcaggccagagccgagctgaccgcccagcaccagagaagactggccgccatcgcccaggagaaggaccaggagatggagagactgagagagctgcagagagccagcatcctggacatgagaagagaccacgaggagcagctgcagagactgaagctgctgaaggacagagaggtggacgccgccaccagcgccaccagccacaccagaagcctgaacagcatcatccaccagatggagaagttcagcagcagcctgcacgagctgagcagcagagtggaggccagccacctgaccaccagccaggagagagagctgggcatcagacagagagacgagcagctgagagccctgcaggagagactgggccagcagcagagagacatggaggaggagagaagcagacagcaggaggtgatcggcaagatggaggccagactgaacgagcagagcagactgctggagcaggagagatggagagtgaccgccgagcagagcaaggccgagagcatgcagagagccctggaggagcagagaaaggtgaccgcccagcagatggccatggagagagccgagctggagagagccaagagcgccctgctggaggagcagaagagcgtgatgctgaagtgcggcgaggagagaagaagactggccgccgagtgggccgagttcagcgcccagcagaagctgagcaaggagagagccgagagagaggccgagagagccctgcaggtggacacccagagagagggcaccctgatcagcctggccaaggagcaggccgagctgaagatcagagccagcgagctgagagccgaggagaagcagctggccgccgagagagccgccctggagcaggagagacaggagctgagactggagaaggagagaatcaacgccaccgccctgagagtgaagctgagagccgaggaggtggagagcatgagcaaggtggccagcgagaagtacgaggagggcgagagagccctgagagaggcccagcaggtgcaggccgagcagcaggccagactgcaggccgtgcagcagcagcaggagagactgagaaagcaggagcagcacatgcaccaggagcacctgagcctggcccagcagagactgcagctggacagagccagacaggacctgcccagcagcctggtgggcctgttccccagagcccagggccccgccgccagcagccagagcgccctgatgccccccgcccccaccaccagatggtgcagccagccccccaccggcctggaccccagccccctgcacctgcacgccagactggccctgctgagacacatggccgagcaggacagagacttcctggagaacgagcagttcttcctggagaccctgaagaagggcagctacaacctgaccagccacagcgcctag

SEQ ID NO: 36951 - DNA, 3444 bp, Artificial Sequence
  derived and/or modified sequence
gcccccaagaccaagaagggctgcaagggcagcatcgacgacttcctgggcgacctgctgggcgacgacatgaccctgcccgagaagcccgtgaagctggccagccacaccagagacaccaccggcgtgagccagatgttccccagcagcaaggccagaaccaagagcctgctgggcgacgacgtgttcagcaccatggccggcctggaggaggccgacgccgaggtgagcggcatcagcgaggccgacccccaggccctgctgcaggccatgaaggacctggacggcatggacgccgacatcctgggcctgaagaagagcaacagcgcccccagcaagaaggccgccaaggaccccggcaagggcgagctgcccaaccaccccaagcccgccggcggcgccatccccaccaagaagagcctgcccagccccagcagcagcggccaccagaacagaagattcagcagcgaggacctggaggaccccctgagaggcctgctgagctacgacgagggcggcatcaccaagcagccccccgtgacccagagcaagaccgccagcgacaagagccccagcaccgtgagagaccagggccccagcatccccctgacccccggcgacacccccatcagaaagaaggaggagctgctgttcgacgacggcgacgacatcatggccaccctgggcttcggcgacagccccaaggccgagaagagacagatcggcgaccaggagggccccagacccgccagaagcaccctggacgagctgctgggcagaggcatggccaccaagctgctggccagacccggcaccggcgagcacagagagttcaagctggacaagaagtaccagagaccccaggacagcgaggacatgtggggcgacgaggacttcaccttcggcgcctaccagcccaccgtggtgagcagcgagggcagacagagcagaagacagagcgtgagcagattcttcgccgacagcggcgccgaccccaagggcgagcccggcagcaagcagagcccccccatggccagcagccccatccagcccagaaagggcggcgccgactggctgggcctgaaggacgaggacctggacctgttccccgccagccccaccagagaggcccacagagagagcagcgtgcccgtgacccccagcgtgcccccccccgccagccagcacagcacccccgccggcctgccccccagcagagccaagccccccaccgagggcgccggcagccccgccaaggccagccaggccagcaagctgagagccagcaaggaggagaaggaggactggctgagccacgccctgagcagaaagaagagccagggcctggccagagagcagcacgccggcaccagcgagggcctgcacctggccggcaccgccggccacccccccagcggcagccagcccctgaccagcacccagggcctggagcacgccgccgccggcggcagcagcggcaccaccgccagagagagaccctgcgtgagacccggcgtgagcggcagccccgtgacccagaaccacgccgccagcgccctgcccaccggcagccccaagagaggcaccgcccccggcgacctgagcgccaccgagcccgccacctgcttccccagcacccagaagcccaccgagcccagcgtgcccgtgcagcccctgctgcccgagagcctggccagaagcctgctgcccagcaccgagtaccagaagcagctgctggccgcccaggtgcagctgcagtgcagccccgccgagctgcaggccgagctgctgcacagccaggccagactggccgagctggaggcccaggtgagaaagctggagctggagagagcccagcacgagctgctgctgggcagcctgcagcagcagcaccaggccgacctggagctgatcgagagcgcccacagaagcagaatcaaggtgctggagaccagctaccagcagagagaggagagactgagaagagagaacgaggagctgagcgccagatacctgagccagtgccaggaggccgagcaggccagagccgagctgaccgcccagcaccagagaagactggccgccatcgcccaggagaaggaccaggagatggagagactgagagagctgcagagagccagcatcctggacatgagaagagaccacgaggagcagctgcagagactgaagctgctgaaggacagagaggtggacgccgccaccagcgccaccagccacaccagaagcctgaacagcatcatccaccagatggagaagttcagcagcagcctgcacgagctgagcagcagagtggaggccagccacctgaccaccagccaggagagagagctgggcatcagacagagagacgagcagctgagagccctgcaggagagactgggccagcagcagagagacatggaggaggagagaagcagacagcaggaggtgatcggcaagatggaggccagactgaacgagcagagcagactgctggagcaggagagatggagagtgaccgccgagcagagcaaggccgagagcatgcagagagccctggaggagcagagaaaggtgaccgcccagcagatggccatggagagagccgagctggagagagccaagagcgccctgctggaggagcagaagagcgtgatgctgaagtgcggcgaggagagaagaagactggccgccgagtgggccgagttcagcgcccagcagaagctgagcaaggagagagccgagagagaggccgagagagccctgcaggtggacacccagagagagggcaccctgatcagcctggccaaggagcaggccgagctgaagatcagagccagcgagctgagagccgaggagaagcagctggccgccgagagagccgccctggagcaggagagacaggagctgagactggagaaggagagaatcaacgccaccgccctgagagtgaagctgagagccgaggaggtggagagcatgagcaaggtggccagcgagaagtacgaggagggcgagagagccctgagagaggcccagcaggtgcaggccgagcagcaggccagactgcaggccgtgcagcagcagcaggagagactgagaaagcaggagcagcacatgcaccaggagcacctgagcctggcccagcagagactgcagctggacagagccagacaggacctgcccagcagcctggtgggcctgttccccagagcccagggccccgccgccagcagccagagcgccctgatgccccccgcccccaccaccagatggtgcagccagccccccaccggcctggaccccagccccctgcacctgcacgccagactggccctgctgagacacatggccgagcaggacagagacttcctggagaacgagcagttcttcctggagaccctgaagaagggcagctacaacctgaccagccacagcgcctag

SEQ ID NO: 36952 - DNA, 3862 bp, Artificial Sequence
  derived and/or modified sequence
ggctgagggtgccggcagcggctggaagcgggaggccagtcctggccgggctgggcgacccgaatggagccagggccggcgctggtcccagcggccgcacctccgggggcacggcgcgtaacaggaggcttccggggctgagagcgttacaggctgcgctccggggccagataggccgggcgctcagaaggggagtatgagcctgatgtgggcagaatccagatgagctggccagtgctgtgaaggagctgagagcacccccgagagccgtgagatggcaccaaaaaccaagaaaggatgtaaagtgacactacctgagaagcctgttaaactagcttcacataccagagacaccacaggtgtatctcagatgttcccttcttcaaaggcgagaacaaagtccctcctgggtgatgatgtcttcagcaccatggcaggcctggaagaagctgatgctgaggtttcaggtatctcagaggcagacccacaggctctgctccaggccatgaaggacctggacggcatggatgctgatatcttaggtctgaagaaatctaattcagcccctagcaaaaaagctgcaaaggaccctgggaaaggagagctgcccaaccaccccaagcctgcagggggtgccattcccaccaagaagtcacttccgtctcccagcagctctgggcatcagaacaggaggttttcctctgaagacttggaagacccattgagaggacttctctcctatgatgaaggaggaatcaccaagcagccgcctgtgacacagagtaaaacagcttctgacaagagccccagcacagtgagagatcaaggtccctctattcctctaactcctggggacacccccatccgaaaaaaagaagaattgttgtttgatgatggggatgacatcatggccaccttggggtttggagacagccccaaagcagagaagaggcagataggagaccaggaagggcctcgccctgctcgctccacgctggatgagctgctgggtcgaggcatggccaccaaactcctggcccgcccgggcaccggggagcacagggagttcaagctagacaagaagtaccagaggccacaggacagtgaagatatgtggggtgacgaggacttcacctttggagcctatcagcccactgtggtctcctctgagggccggcagtcccgccggcagtctgtcaggttcttcgcagacagtggcgcagaccccaagggagaaccaggctccaaacagagccctccaatggcttccagccccatccagcccaggaagggaggagctgactggttgggcctcaaggacgaggacttggacctgttccctgcctcacccaccagagaggcccatcgggaaagttcagtgcctgtcacgccctcagtgcctcctcctgcgagccagcactccacgccagctgggctgcccccctccagggcaaagccaccaactgaaggtgcagggtcccctgccaaagccagccaggcttccaagctgcgagcctccaaggaggagaaagaggactggctgagccatgccctgtctcggaagaagtcccaaggcctggccagagagcagcatgctgggacctctgagggcctgcatttggcggggacagcgggccatcccccttctggcagccaacctctcaccagcacacaagggcttgagcacgcagctgctggagggagttctggaacaactgcacgagaaagaccgtgtgtcaggcctggtgtctcggggtcccctgtgactcagaaccatgccgcctcagcactccctacaggttccccaaagaggggaacagcccctggagacctctcagccactgagcctgccacgtgtttcccgagcacccagaaacccacagagccttccgtgcccgtccagcccctgctcccagagtccctggcccggagcctgctgccgagcacagaataccagaagcagctcctggcagcacaggtgcaacttcagtgcagccccgctgagctccaggccgagctgctgcatagccaggcccggctggcagagctggaggcccaggtgcggaagctggagctagaacgggcccagcatgagctgctgctggggagtctgcagcagcagcaccaggcagacctggagctcatcgagagtgcacacagaagccgcatcaaggtgctagaaacatcgtaccagcaacgggaggagcggctccggagagagaacgaagagctgtcagctcggtatctgtcgcagtgccaggaggccgaacaggcccgtgctgagcttacggcccagcaccagcggcgcttggcggccatagcgcaggagaaggaccaggaaatggagcggctccgggagctgcagcgggcgtccatcctagacatgcgcagagaccacgaggagcagctgcagcggctaaagctgctgaaggaccgagaggtcgatgcggccaccagtgccacctcccacacgcggtccctgaatagcatcatccaccagatggagaagttctccagcagcctgcacgagttgtcctcccgcgtggaggcctcgcacctcaccacctcccaggagcgggagctggggatccggcagcgtgacgagcagctgcgggcactgcaggagcggctgggccagcagcagcgggacatggaggaggagcggagccggcaacaggaggtcatcgggaagatggaggcacggctgaatgagcagagccggctgctggagcaggaacgctggcgggtgactgccgagcagtccaaggcggagtccatgcagcgcgccctagaggagcaaaggaaggtcacggcccagcagatggccatggaaagggcggagctggaacgggccaagagcgccttgctggaggagcagaagtctgtcatgctcaagtgcggggaggagcggcggcgcctggctgccgagtgggcggagttctccgcgcagcaaaagctgagtaaggagcgggccgagcgcgaggccgagcgggcattgcaggtggacacccagcgggagggcaccctcatcagcctggccaaggagcaggctgagctgaagatcagggccagcgagctccgggccgaggagaagcagctggcagcggagagagcagccctggagcaggagcggcaggagctgcggctggagaaggagaggatcaacgccaccgccctgcgtgtcaagctccgcgccgaggaggtggagagcatgagcaaggtggcctccgagaagtacgaggagggggagcgggcattgcgcgaggcccagcaggtgcaggcagagcagcaggcccggttgcaggcggtgcagcaacagcaggagcggctgcggaagcaggagcagcacatgcaccaggagcatctgagtctggcccagcagaggctgcaactggaccgcgcacgacaggacctgccctctagcctcgtgggtctgttccccagggcccagggccctgcagcctccagccagagtgccctcatgcctcctgctcccaccacccgttggtgcagccagccgccaactggcctggaccccagccccttgcacctccatgccaggctggcactgctgaggcacatggcagagcaggaccgtgacttcttggagaatgaacagttcttcctggagaccctgaagaaagggtcctacaatttgacatctcattcagcctgagtgggaccccagccgattccccaacagagggttcggaccccagaactgtcctgttcctccggctgcctccatggaggcagtgcctggggaggattctgagatgcttgaggcctgatgacagctcttccgtggacagggtgcaagtgcatcctttccaaatgtgccagcccggggcagcccctgcct

SEQ ID NO: 36953 - DNA, 2816 bp, Artificial Sequence
  derived and/or modified sequence
ggcagcggctggaagcgggaggccagtcctggccgggctgggcgacccgaatggagccagggccggcgctggtcccagcggccgcacctccgggggcacggcgcgtaacaggaggcttccggggctgagagcgttacaggctgcgctccggggccagataggccgggcgctcagaaggggagtatgagcctgatgtgggcagaatccagatgagctggccagtgctgtgaaggagctgagagcacccccgagagccgtgagatggcaccaaaaaccaagaaaggatgtaaagtgacactacctgagaagcctgttaaactagcttcacataccagagacaccacaggtgtatctcagatgttcccttcttcaaaggcgagaacaaagtccctcctgggtgatgatgtcttcagcaccatggcaggcctggaagaagctgatgctgaggtttcaggtatctcagaggcagacccacaggctctgctccaggccatgaaggacctggacggcatggatgctgatatcttaggtctgaagaaatctaattcagcccctagcaaaaaagctgcaaaggaccctgggaaaggagagctgcccaaccaccccaagcctgcagggggtgccattcccaccaagaagtcacttccgtctcccagcagctctgggcatcagaacaggaggttttcctctgaagacttggaagacccattgagaggacttctctcctatgatgaaggaggaatcaccaagcagccgcctgtgacacagagtaaaacagcttctgacaagagccccagcacagtgagagatcaaggtccctctattcctctaactcctggggacacccccatccgaaaaaaagaagaattgttgtttgatgatggggatgacatcatggccaccttggggtttggagacagccccaaagcagagaagaggcagataggagaccaggaagggcctcgccctgctcgctccacgctggatgagctgctgggtcgaggcatggccaccaaactcctggcccgcccgggcaccggggagcacagggagttcaagctagacaagaagtaccagaggccacaggacagtgaagatatgtggggtgacgaggacttcacctttggagcctatcagcccactgtggtctcctctgagggccggcagtcccgccggcagtctgtcagtaggttcttcgcagacagtggcgcagaccccaagggagaaccaggctccaaacagagccctccaatggcttccagccccatccagcccaggaagggaggagctgactggttgggcctcaaggacgaggacttggacctgttccctgcctcacccaccagagaggcccatcgggaaagttcagtgcctgtcacgccctcagtgcctcctcctgcgagccagcactccacgccagctgggctgcccccctccagggcaaagccaccaactgaaggtgcagggtcccctgccaaagccagccaggcttccaagctgcgagcctccaaggaggagaaagaggactggctgagccatgccctgtctcggaagaagtcccaaggcctggccagagagcagcatgctgggacctctgagggcctgcatttggcggggacagcgggccatcccccttctggcagccaacctctcaccagcacacaagggcttgagcacgcagctgctggagggagttctggaacaactgcacgagaaagaccgtgtgtcaggcctggtgtctcggggtcccctgtgactcagaaccatgccgcctcagcactccctacaggttccccaaagaggggaacagcccctggagacctctcagccactgagcctgccacgtgtttcccgagcacccagaaacccacagagccttccgtgcccgtccagcccctgctcccagagtccctggcccggagcctgctgccgagcacagaataccagaagcagctcctggcagcacaggtgcaacttcagtgcagccccgctgagctccaggccgagctgctgcatagccaggcccggctggcagagctggaggcccaggtgcggaagctggagctagaacgggcccagcatgagctgctgctggggagtctgcagcagcagcaccaggcagacctggagctcatcgagagtgcacacagaagccgcatcaaggtgctagaaacatcgtaccagcaacgggaggagcggctccggagagagaacgaagagctgtcagctcggtatctgtcgcagtgccaggaggccgaacaggcccgtgctgagcttacggcccagcaccagcggcgcttggcggccatagcgcaggagaaggaccaggaaatggagcggctccgggagctgcagcgggcgtccatcctagacatgcgcagagaccacgaggagcagctgcagcggctaaagctgctgaaggaccgagaggtcgatgcggccaccagtgccacctcccacacgcggtccctgaatagcatcatccaccagatggagaagttctccagcagcctgcacgagttgtcctcccgcgtggaggcctcgcacctcaccacctcccaggagcgggagctggggatccggcagcgtgacgagcagctgcgggcactgcaggagcggctgggccagcagcagcgggacatggggagggacgaggagggaagcctctgtgctgctcacctgcccaaagcccagctcagcgggtacgcagtggaggcgacaaggaaccaatcacaactacagaggtttctctgatcctcctccactcccgctgcttcaacttgactaagcttaaaaaaactgcttttgccatggct

SEQ ID NO: 36954 - DNA, 3865 bp, Artificial Sequence
  derived and/or modified sequence
ggctgagggtgccggcagcggctggaagcgggaggccagtcctggccgggctgggcgacccgaatggagccagggccggcgctggtcccagcggccgcacctccgggggcacggcgcgtaacaggaggcttccggggctgagagcgttacaggctgcgctccggggccagataggccgggcgctcagaaggggagtatgagcctgatgtgggcagaatccagatgagctggccagtgctgtgaaggagctgagagcacccccgagagccgtgagatggcaccaaaaaccaagaaaggatgtaaagtgacactacctgagaagcctgttaaactagcttcacataccagagacaccacaggtgtatctcagatgttcccttcttcaaaggcgagaacaaagtccctcctgggtgatgatgtcttcagcaccatggcaggcctggaagaagctgatgctgaggtttcaggtatctcagaggcagacccacaggctctgctccaggccatgaaggacctggacggcatggatgctgatatcttaggtctgaagaaatctaattcagcccctagcaaaaaagctgcaaaggaccctgggaaaggagagctgcccaaccaccccaagcctgcagggggtgccattcccaccaagaagtcacttccgtctcccagcagctctgggcatcagaacaggaggttttcctctgaagacttggaagacccattgagaggacttctctcctatgatgaaggaggaatcaccaagcagccgcctgtgacacagagtaaaacagcttctgacaagagccccagcacagtgagagatcaaggtccctctattcctctaactcctggggacacccccatccgaaaaaaagaagaattgttgtttgatgatggggatgacatcatggccaccttggggtttggagacagccccaaagcagagaagaggcagataggagaccaggaagggcctcgccctgctcgctccacgctggatgagctgctgggtcgaggcatggccaccaaactcctggcccgcccgggcaccggggagcacagggagttcaagctagacaagaagtaccagaggccacaggacagtgaagatatgtggggtgacgaggacttcacctttggagcctatcagcccactgtggtctcctctgagggccggcagtcccgccggcagtctgtcagtaggttcttcgcagacagtggcgcagaccccaagggagaaccaggctccaaacagagccctccaatggcttccagccccatccagcccaggaagggaggagctgactggttgggcctcaaggacgaggacttggacctgttccctgcctcacccaccagagaggcccatcgggaaagttcagtgcctgtcacgccctcagtgcctcctcctgcgagccagcactccacgccagctgggctgcccccctccagggcaaagccaccaactgaaggtgcagggtcccctgccaaagccagccaggcttccaagctgcgagcctccaaggaggagaaagaggactggctgagccatgccctgtctcggaagaagtcccaaggcctggccagagagcagcatgctgggacctctgagggcctgcatttggcggggacagcgggccatcccccttctggcagccaacctctcaccagcacacaagggcttgagcacgcagctgctggagggagttctggaacaactgcacgagaaagaccgtgtgtcaggcctggtgtctcggggtcccctgtgactcagaaccatgccgcctcagcactccctacaggttccccaaagaggggaacagcccctggagacctctcagccactgagcctgccacgtgtttcccgagcacccagaaacccacagagccttccgtgcccgtccagcccctgctcccagagtccctggcccggagcctgctgccgagcacagaataccagaagcagctcctggcagcacaggtgcaacttcagtgcagccccgctgagctccaggccgagctgctgcatagccaggcccggctggcagagctggaggcccaggtgcggaagctggagctagaacgggcccagcatgagctgctgctggggagtctgcagcagcagcaccaggcagacctggagctcatcgagagtgcacacagaagccgcatcaaggtgctagaaacatcgtaccagcaacgggaggagcggctccggagagagaacgaagagctgtcagctcggtatctgtcgcagtgccaggaggccgaacaggcccgtgctgagcttacggcccagcaccagcggcgcttggcggccatagcgcaggagaaggaccaggaaatggagcggctccgggagctgcagcgggcgtccatcctagacatgcgcagagaccacgaggagcagctgcagcggctaaagctgctgaaggaccgagaggtcgatgcggccaccagtgccacctcccacacgcggtccctgaatagcatcatccaccagatggagaagttctccagcagcctgcacgagttgtcctcccgcgtggaggcctcgcacctcaccacctcccaggagcgggagctggggatccggcagcgtgacgagcagctgcgggcactgcaggagcggctgggccagcagcagcgggacatggaggaggagcggagccggcaacaggaggtcatcgggaagatggaggcacggctgaatgagcagagccggctgctggagcaggaacgctggcgggtgactgccgagcagtccaaggcggagtccatgcagcgcgccctagaggagcaaaggaaggtcacggcccagcagatggccatggaaagggcggagctggaacgggccaagagcgccttgctggaggagcagaagtctgtcatgctcaagtgcggggaggagcggcggcgcctggctgccgagtgggcggagttctccgcgcagcaaaagctgagtaaggagcgggccgagcgcgaggccgagcgggcattgcaggtggacacccagcgggagggcaccctcatcagcctggccaaggagcaggctgagctgaagatcagggccagcgagctccgggccgaggagaagcagctggcagcggagagagcagccctggagcaggagcggcaggagctgcggctggagaaggagaggatcaacgccaccgccctgcgtgtcaagctccgcgccgaggaggtggagagcatgagcaaggtggcctccgagaagtacgaggagggggagcgggcattgcgcgaggcccagcaggtgcaggcagagcagcaggcccggttgcaggcggtgcagcaacagcaggagcggctgcggaagcaggagcagcacatgcaccaggagcatctgagtctggcccagcagaggctgcaactggaccgcgcacgacaggacctgccctctagcctcgtgggtctgttccccagggcccagggccctgcagcctccagccagagtgccctcatgcctcctgctcccaccacccgttggtgcagccagccgccaactggcctggaccccagccccttgcacctccatgccaggctggcactgctgaggcacatggcagagcaggaccgtgacttcttggagaatgaacagttcttcctggagaccctgaagaaagggtcctacaatttgacatctcattcagcctgagtgggaccccagccgattccccaacagagggttcggaccccagaactgtcctgttcctccggctgcctccatggaggcagtgcctggggaggattctgagatgcttgaggcctgatgacagctcttccgtggacagggtgcaagtgcatcctttccaaatgtgccagcccggggcagcccctgcct

SEQ ID NO: 36955 - DNA, 3444 bp, Artificial Sequence
  derived and/or modified sequence
gcaccaaaaaccaagaaaggatgtaaaggctccattgatgattttcttggtgaccttctaggggatgatatgacactacctgagaagcctgttaaactagcttcacataccagagacaccacaggtgtatctcagatgttcccttcttcaaaggcgagaacaaagtccctcctgggtgatgatgtcttcagcaccatggcaggcctggaagaagctgatgctgaggtttcaggtatctcagaggcagacccacaggctctgctccaggccatgaaggacctggacggcatggatgctgatatcttaggtctgaagaaatctaattcagcccctagcaaaaaagctgcaaaggaccctgggaaaggagagctgcccaaccaccccaagcctgcagggggtgccattcccaccaagaagtcacttccgtctcccagcagctctgggcatcagaacaggaggttttcctctgaagacttggaagacccattgagaggacttctctcctatgatgaaggaggaatcaccaagcagccgcctgtgacacagagtaaaacagcttctgacaagagccccagcacagtgagagatcaaggtccctctattcctctaactcctggggacacccccatccgaaaaaaagaagaattgttgtttgatgatggggatgacatcatggccaccttggggtttggagacagccccaaagcagagaagaggcagataggagaccaggaagggcctcgccctgctcgctccacgctggatgagctgctgggtcgaggcatggccaccaaactcctggcccgcccgggcaccggggagcacagggagttcaagctagacaagaagtaccagaggccacaggacagtgaagatatgtggggtgacgaggacttcacctttggagcctatcagcccactgtggtctcctctgagggccggcagtcccgccggcagtctgtcagtaggttcttcgcagacagtggcgcagaccccaagggagaaccaggctccaaacagagccctccaatggcttccagccccatccagcccaggaagggaggagctgactggttgggcctcaaggacgaggacttggacctgttccctgcctcacccaccagagaggcccatcgggaaagttcagtgcctgtcacgccctcagtgcctcctcctgcgagccagcactccacgccagctgggctgcccccctccagggcaaagccaccaactgaaggtgcagggtcccctgccaaagccagccaggcttccaagctgcgagcctccaaggaggagaaagaggactggctgagccatgccctgtctcggaagaagtcccaaggcctggccagagagcagcatgctgggacctctgagggcctgcatttggcggggacagcgggccatcccccttctggcagccaacctctcaccagcacacaagggcttgagcacgcagctgctggagggagttctggaacaactgcacgagaaagaccgtgtgtcaggcctggtgtctcggggtcccctgtgactcagaaccatgccgcctcagcactccctacaggttccccaaagaggggaacagcccctggagacctctcagccactgagcctgccacgtgtttcccgagcacccagaaacccacagagccttccgtgcccgtccagcccctgctcccagagtccctggcccggagcctgctgccgagcacagaataccagaagcagctcctggcagcacaggtgcaacttcagtgcagccccgctgagctccaggccgagctgctgcatagccaggcccggctggcagagctggaggcccaggtgcggaagctggagctagaacgggcccagcatgagctgctgctggggagtctgcagcagcagcaccaggcagacctggagctcatcgagagtgcacacagaagccgcatcaaggtgctagaaacatcgtaccagcaacgggaggagcggctccggagagagaacgaagagctgtcagctcggtatctgtcgcagtgccaggaggccgaacaggcccgtgctgagcttacggcccagcaccagcggcgcttggcggccatagcgcaggagaaggaccaggaaatggagcggctccgggagctgcagcgggcgtccatcctagacatgcgcagagaccacgaggagcagctgcagcggctaaagctgctgaaggaccgagaggtcgatgcggccaccagtgccacctcccacacgcggtccctgaatagcatcatccaccagatggagaagttctccagcagcctgcacgagttgtcctcccgcgtggaggcctcgcacctcaccacctcccaggagcgggagctggggatccggcagcgtgacgagcagctgcgggcactgcaggagcggctgggccagcagcagcgggacatggaggaggagcggagccggcaacaggaggtcatcgggaagatggaggcacggctgaatgagcagagccggctgctggagcaggaacgctggcgggtgactgccgagcagtccaaggcggagtccatgcagcgcgccctagaggagcaaaggaaggtcacggcccagcagatggccatggaaagggcggagctggaacgggccaagagcgccttgctggaggagcagaagtctgtcatgctcaagtgcggggaggagcggcggcgcctggctgccgagtgggcggagttctccgcgcagcaaaagctgagtaaggagcgggccgagcgcgaggccgagcgggcattgcaggtggacacccagcgggagggcaccctcatcagcctggccaaggagcaggctgagctgaagatcagggccagcgagctccgggccgaggagaagcagctggcagcggagagagcagccctggagcaggagcggcaggagctgcggctggagaaggagaggatcaacgccaccgccctgcgtgtcaagctccgcgccgaggaggtggagagcatgagcaaggtggcctccgagaagtacgaggagggggagcgggcattgcgcgaggcccagcaggtgcaggcagagcagcaggcccggttgcaggcggtgcagcaacagcaggagcggctgcggaagcaggagcagcacatgcaccaggagcatctgagtctggcccagcagaggctgcaactggaccgcgcacgacaggacctgccctctagcctcgtgggtctgttccccagggcccagggccctgcagcctccagccagagtgccctcatgcctcctgctcccaccacccgttggtgcagccagccgccaactggcctggaccccagccccttgcacctccatgccaggctggcactgctgaggcacatggcagagcaggaccgtgacttcttggagaatgaacagttcttcctggagaccctgaagaaagggtcctacaatttgacatctcattcagcctga

SEQ ID NO: 36956 - DNA, 3402 bp, Artificial Sequence
  derived and/or modified sequence
atggctcccaaaactaaaaaaggctgtaaagtaaccctgcctgagaagcctgttaagctggctagccacacacgtgacaccaccggcgtctcgcagatgttccctagcagtaaggctagaaccaagtccctgctcggagacgacgtgttctctactatggcagggctggaggaggccgacgccgaagtgagtgggattagtgaagctgatccccaagcactactccaggcaatgaaggatctggacgggatggacgcagacatcctcggcctgaaaaagagcaactcagcaccgtcaaagaaggctgctaaggatcctggtaagggagagctcccaaaccacccgaagcccgctggaggcgcaattcctacgaagaagtcactgcctagcccctcatcttctggccatcagaataggagattttcttctgaggatctggaagatcccctgagaggactgctgagttacgacgagggaggtattactaaacagcccccagtaactcagagcaagacagcctccgataagagcccgtccacagtgagagaccagggcccttccattccacttactccaggcgacacacccatcagaaagaaggaagaactgctctttgacgacggcgacgatattatggccactctcggctttggagactctcccaaggctgaaaagagacagatcggcgaccaggagggcccgcgcccagcacgatctaccctagatgaactcttgggcagaggcatggcaactaaattgctcgctaggccgggtactggggagcaccgtgaattcaaattggacaaaaagtaccagcggccgcaagactctgaagatatgtggggagacgaggattttacgttcggcgcctatcagcccaccgtagtgtcaagcgagggccgccaaagcaggagacaatcagtacggttcttcgctgacagtggggccgatcccaaaggggagcccggttccaagcagagcccacctatggctagctcccccatccagcctaggaaagggggcgctgactggttgggcctgaaggatgaagatcttgacctcttccccgctagtccaactagggaagcccacagagagagctctgttcctgtcactccatccgttcccccaccagctagtcaacattccacaccggccggcctcccccccagtcgggcaaaaccccctacagaaggggcaggttcacctgccaaggcttcacaggcttcgaagctcagagcctccaaagaggagaaggaggactggctgtcccacgcgttgtctaggaaaaagtcacagggcctggcccgggagcagcatgccggcaccagtgagggcctgcacctggccgggacagctggacacccacctagcggaagccagcctctgacctccactcagggactggagcacgcagccgctggaggatcgtctggcacgaccgcacgggagcggccctgcgtccggccgggggtgtctggtagtcctgtgacccaaaaccacgctgcaagcgccctgcctacagggtccccgaaaaggggtactgcacctggggacctcagtgccaccgaacccgcgacctgtttcccttcaacacaaaagccaaccgagccatcagttcctgttcagcccctgttacccgagtcacttgcaagaagcctgctcccatcaacagaatatcaaaaacagctactggcagctcaggtgcaactgcagtgtagccccgcggaactacaggccgaactgctgcacagtcaggcacgccttgcggagctggaagcccaggtgcgtaagctggagctcgaacgggcacagcacgagctgcttctggggtccctgcagcagcagcatcaggccgacttggaactgattgagtccgcgcataggagccgtatcaaggtgctggaaacatcctatcaacagagggaggagagacttcggcgtgaaaatgaagagctctctgcgaggtatctgtcccagtgtcaggaggcagaacaggcccgcgccgagctgacagcccagcaccagaggagactagctgccatagcccaggagaaagaccaggagatggagaggctacgagagctgcagcgcgcgtctattctggatatgcgtagagaccacgaagaacagctgcaacggctgaaactcttgaaggaccgggaggtggacgctgccacttctgcaacaagccacacgcgctccctgaattccatcatccaccagatggagaagttttccagctcactgcacgaactctcatcccgcgtggaggcctctcatctgaccacaagtcaggagcgggagctcggtatccgtcagcgcgatgagcagctgagggctctgcaggagagacttggccagcaacagagggatatggaggaggagaggagcaggcaacaagaagtcatcgggaagatggaggcccggcttaatgaacagtcaagactgctggagcaggaaaggtggcgggtgactgccgagcagtccaaagcggagagtatgcaacgggctctggaagaacagagaaaagtgaccgcccagcagatggcaatggaacgggccgagttagagcgggccaagagcgctctgctcgaagaacaaaagagcgtgatgttgaaatgtggagaagagcggcgacggttggccgccgagtgggccgagttctcagctcagcagaaactgtccaaggaacgggccgagagagaggccgagagggccttacaggttgacactcagagagaaggaactctaatcagcctcgcaaaagagcaagctgaactgaagatccgcgctagtgagctgcgcgccgaggaaaagcagctagccgctgagagagccgcattggagcaggagcgccaagaattgcgccttgagaaagaaagaatcaatgccactgccttacgtgtgaagctccgcgccgaggaggtcgaaagcatgtcaaaggttgcgtccgaaaagtatgaagagggcgaacgcgcgctgcgagaggctcagcaagtgcaggcagaacagcaggcccgccttcaggcagtgcaacagcagcaggagaggctccgcaaacaggagcaacacatgcaccaggagcatctgagcctggcccagcagaggctgcagttggaccgtgccagacaggacctgccttcttcgctggtcggactattccctcgcgctcagggcccagctgccagcagccagagtgcactgatgcctcctgcccccactaccaggtggtgtagccaaccccccacaggcttggacccatcacccctgcacttgcacgcacgcctcgccctcttgcgtcacatggctgaacaggatcgggatttcctggagaatgagcaatttttccttgagacattgaaaaaaggctcttataatcttacgtcacattccgcctag

SEQ ID NO: 36957 - DNA, 2493 bp, Artificial Sequence
  derived and/or modified sequence
atggctccaaaaaccaagaaaggttgcaaggtgacactcccggaaaagcccgtaaagttagcatcccatacacgggacaccaccggggtgtcccaaatgtttccttccagtaaagccagaaccaagagtttattgggggacgatgtgttttctaccatggcggggctggaagaagctgacgccgaggtgtctggcatatcagaagccgacccccaggcgctcctccaggcaatgaaagatctcgacggtatggacgcagatatcttaggacttaaaaagagtaattccgccccttccaaaaaggccgctaaagaccccggcaaaggagagctccctaaccatccaaagcccgctggcggggcaatccctactaaaaagagcctaccaagtccatcttcctccggtcaccagaaccgtagattttccagcgaagatttagaagacccattgagagggctgctcagttacgatgagggaggcattaccaagcagccccccgttacacagagcaagactgcttctgataaatccccatctaccgtccgagatcagggcccctccattccgctaacacccggtgataccccgattagaaaaaaggaagagctgctgtttgacgacggcgatgatattatggcaacactgggctttggcgactcacctaaggccgagaagagacagattggcgaccaggaagggcctaggcccgccaggtctaccctggatgagttgcttggacgcggaatggcgaccaagcttttggctcgccccggcaccggcgaacaccgcgagtttaagttagacaaaaaataccagagaccccaggattcggaagacatgtggggtgatgaggatttcacttttggagcttatcagcctacggtcgttagttctgagggaaggcaatccaggaggcagagcgtatcccgcttctttgcggactctggcgccgaccctaaaggcgaacccggaagcaagcagtccccccctatggcaagcagccctatccagccaaggaaggggggtgccgattggctgggcctcaaggatgaagacttggatttgttccctgctagtcccacacgtgaggctcatagggaaagctctgtgccggtaaccccatcggtgccaccccctgccagtcaacactcgacccctgcagggctgccgccgagccgcgctaaaccacctaccgagggtgctgggagtcccgccaaggctagccaggcgtcaaagttgcgggcttccaaagaggaaaaggaggactggctgagccacgctttaagccgtaagaaaagccagggcctggcaagggagcagcatgcagggacatccgagggactgcatttggccggcacggcaggccatcctccgagcggtagccagcctttgacttctacccagggcctagaacatgctgctgccggagggagttccggaaccactgctcgcgagcgcccctgcgtacgacccggtgtttctgggagccccgtgacacaaaaccatgccgcttccgccctacctacagggtcccccaaacgcggaaccgcccctggagatctcagtgccaccgaaccggccacatgctttccctctacccagaaacccaccgagccttccgttcctgtacagcctctgctccccgaaagtctggctagaagcttgttgccttcaactgaatatcaaaagcagttgctagcagcccaagtccagctccagtgcagcccggccgaactgcaggcggaacttcttcacagtcaagccaggctggctgagctcgaggcccaagtgagaaagttggaactggagagagcccagcatgagctgttacttgggtctctgcaacagcagcaccaggcagatctggagctaatcgaaagcgcccatcggtcccggattaaggtacttgaaacatcttaccagcagcgtgaggagagactgagacgggagaacgaggagctgtccgcacgttacttaagtcagtgccaggaggccgaacaggccagggcggaattgaccgctcagcatcagaggcgacttgctgcaatcgcccaggagaaagatcaggagatggagcgtctgagagagctccagagggcctcaatcttagacatgcggcgtgaccacgaggagcagctgcaaaggctgaaacttttgaaggatagagaagttgacgccgctacttccgcaacaagccacacaagatcactcaacagcattatccatcaaatggaaaagttttcctcatctctgcacgagctgtcctcgcgcgtcgaggcatcacatttgactacttcccaggaacgagaactcggtatcaggcagagagatgaacagttgcgggctctgcaagaacgcctgggccaacaacaacgcgacatggggcgggatgaagagggatctctttgcgcagcgcatctgcctaaggcccagcttagcggatacgcggttgaggcaacccggaatcagtctcagctccagagatttctgtag

SEQ ID NO: 36958 - DNA, 3405 bp, Artificial Sequence
  derived and/or modified sequence
atggcccccaagactaaaaagggatgcaaggtcacccttcccgagaagccggtcaagttggcgtcacacacccgcgacacaacaggagtgtcccagatgtttccctcaagcaaggcaagaacgaagtcactcctcggcgatgacgtgttctccaccatggccggtctggaggaggccgacgccgaggtcagcggcatatccgaggcggatccacaagcgctcttgcaagcaatgaaggacttggatggaatggacgctgacatcctcggcttaaagaagtctaactcggcacctagcaagaaggcggccaaggaccccggcaagggagaactcccaaatcatcccaaaccagctggcggagctatacccacaaagaagagtcttccctccccttcatcatctggacaccagaaccgtagattttcgtccgaggacctagaggatcccctaagagggctgttaagctacgacgaggggggcatcacaaaacaaccccccgttactcagagtaaaacagcaagtgacaagtctccctctaccgtgcgcgatcagggcccgtccatcccactcacccctggggacacgcccatcagaaagaaagaagagttactattcgacgatggggatgacattatggcaactctcggcttcggagattccccaaaggctgaaaaaagacagatcggtgatcaggaggggcctcgacctgctcgtagcactctagacgaattgctgggaaggggcatggctaccaagttgctggcgcgccctggcaccggcgaacaccgcgagtttaagctcgataaaaagtaccaaagaccgcaggactcagaagacatgtggggtgacgaggactttacttttggcgcataccaacccacagtggtgtctagcgaggggcggcagtcgcggcgccagtcggtgtcacgcttttttgcggattcgggggccgatcctaagggggaacccggatctaagcaatccccccccatggcttccagtcctatccagcctagaaaagggggcgccgattggctcggactcaaagacgaagacctggacctattcccagcctcaccaaccagagaagcccatagagagtcatccgtccctgtcactccgagcgtccctcctccagcctcccagcactcaacacctgcagggcttccccccagccgagcgaagcccccaaccgagggggccgggagcccagctaaggccagccaggcttcaaagctgcgggccagcaaggaagagaaagaggattggctgtcgcacgcattatcccgcaagaagtcccaggggctggccagagaacagcatgcaggtacaagcgagggattacacttagccggaaccgctggtcacccaccctctggctcccagcctctgacatcaacgcaaggtttagaacatgccgccgctggcggcagcagtggcacaaccgcgagagagcggccctgtgtccggcctggggtttcaggctcacctgtgactcagaaccacgccgccagcgcattgccaacaggcagtcctaagcggggtaccgccccgggcgacctgagcgccacagagccggccacatgctttccctccacccaaaagccaaccgagccgtctgttccagtgcaacctctgttacccgagagtttagctcgttctttattgccttccaccgagtatcagaagcaactcttggcggcgcaggtccagctgcagtgtagcccagccgagctgcaggctgaactgctgcactctcaggctcgactagccgaacttgaagcacaggtgaggaagctggaactggagcgggctcaacacgaattgttattgggcagcctgcaacaacaacaccaagcagacttagagctgatcgaaagcgctcacaggtctcgcattaaggtgctagagacttcctatcaacagagagaggagagactccggcgggaaaatgaggaattgagcgctcgctatttatctcagtgccaggaagcagagcaggcacgcgcggagctgaccgctcaacaccagcggcggctagccgccatcgctcaggaaaaagatcaagagatggagaggctcagagaactgcaacgggccagcatcctcgacatgaggcgcgaccacgaggagcagctgcagaggctgaagctgctcaaagatagggaagtggatgcagccacttccgccacttcccacacacggagcctgaattcgataatccatcaaatggagaagtttagcagcagccttcacgagctctcttctagagtcgaagcctcccatctaaccacttcacaggaaagagagctggggatccggcaacgagatgagcagcttagggctcttcaggagaggcttggccagcagcagcgcgacatggaggaggagcgctcaagacaacaggaagttataggtaagatggaggccaggctgaatgagcagtcccgcctgctagagcaggagagatggagggtgacagctgaacagtccaaagccgaatccatgcaaagggcgctcgaagagcagcgaaaagtgacagcccagcaaatggccatggagagagccgagctggagagagctaagagcgctctgctggaagagcaaaaatccgtaatgctcaagtgcggtgaagagcggcggagactggcagccgagtgggctgagttcagcgcgcagcaaaagttatctaaagagagggcggagagggaggccgagagggctctgcaggtggacactcagagggagggaaccctgatttctctggctaaggagcaggccgaattaaaaatcagggccagtgagctccgcgcagaggaaaagcagcttgctgccgaacgggccgcccttgagcaggagaggcaagaactgcgtctcgaaaaggaacgtataaacgcaactgctctgagggtcaaactccgtgcggaggaggtcgagtcaatgtcaaaagtggccagtgaaaagtatgaagaaggggaaagagcattacgggaggcccaacaagttcaggccgaacagcaggctagactgcaggcagtccagcagcaacaagagcgtctgcgcaagcaggagcagcatatgcaccaagagcatctgtctctcgcgcagcagagactccagctggatagggccagacaggaccttccatcctcactggtgggactcttccccagagctcagggacctgccgcttcgtcccaatcagccttgatgcctcccgctccgaccactcgctggtgcagccagcctcctacaggtttggatccttcaccactccatttacacgctagacttgccctgctacgccacatggccgaacaagatcgcgatttcctcgagaatgagcaattcttcttagaaaccctaaagaagggctcatataatcttacttcacacagcgcctag

SEQ ID NO: 36959 - DNA, 3444 bp, Artificial Sequence
  derived and/or modified sequence
gccccaaaaacaaaaaaaggttgtaaaggcagcatcgatgactttctgggggatctcctgggcgacgacatgaccttacctgaaaaacccgtcaagctggccagtcatacaagggataccaccggggtgagccaaatgtttcctagcagtaaagcgaggaccaagtctttactcggtgacgacgtgtttagcactatggcaggactagaggaagctgacgccgaggtgtccgggatcagcgaagccgatccgcaggctctgctgcaggctatgaaagacctggatggtatggatgccgatatcctggggctgaagaaatccaactcagctcccagcaagaaagccgccaaggatccagggaagggagaactgcccaatcaccccaaaccagcgggcggagctatccccactaagaaatccctgccctctccgagcagtagcgggcaccaaaaccgccggttctcctcggaggatctggaagatccactgagagggcttctcagctatgacgaaggaggcatcactaaacagcctccggttactcagtctaagacagcatccgacaagtcaccttctacagtcagggatcaggggccttccatccccctgactcctggagacactccgatccgaaaaaaagaagaattactgttcgacgacggcgacgacataatggctactctgggctttggcgattctcctaaggccgaaaaacgccagatcggtgaccaagaggggccccgacccgctcgctctacattggacgagttgctcggcagaggcatggcaacaaagctgctagctcgcccaggcacaggcgaacacagggagttcaagctcgataaaaagtaccaaagaccccaggatagcgaggacatgtggggtgatgaggacttcacctttggcgcataccagccaacagtagtttcctcagagggaaggcagtcccggaggcagagcgtttcgagattcttcgcagactccggagccgatcccaagggtgagcccggctctaagcagagcccccccatggccagctctccaatccagcctaggaaaggtggcgctgattggctgggcttgaaggatgaggacctagatctgttcccagcgtcacctaccagagaagctcaccgggagagtagtgtgcctgtcaccccatcagtgcccccccctgcctcccagcattccacaccggctgggctgcctcccagtcgggccaagcctcccacagagggcgctggtagccccgccaaggcatcgcaagccagcaaactacgggcttccaaggaggagaaggaagactggttatcccacgccttgtctcgaaagaaatcccaaggactcgcgcgcgagcaacatgcaggaacttccgaaggattgcatctcgcaggaaccgccggtcacccgccttcaggttctcaacctctaacctctacccaagggctggagcacgccgcagctggggggagcagcggtactacggcacgcgagcgcccatgtgtgaggccgggggtgtctgggtcacccgtgactcagaatcacgctgcctctgctctgccaaccggttcaccaaagagaggcaccgccccaggcgacctaagcgcaacagagccagccacatgttttccaagcacgcagaaacccacggaacccagcgttccggtgcagccactgctgcctgaatccttagccagatctcttcttcccagcacggagtaccagaaacagttgcttgccgcccaagtccaactgcagtgctctccagcggagctccaggctgagctcctgcattcacaggccagactggccgaactcgaagcccaggtccggaagttagagctggagcgagctcagcatgaactactgttgggatcattgcaacagcagcatcaagccgatctcgagctaattgagtctgcccacaggtcacgcatcaaagtgctggaaacttcgtaccagcagagagaagaaagactccgcagggaaaatgaggaactgtctgctagatacctgtctcagtgccaggaggctgagcaggctcgggcagaactgaccgctcaacaccagagacggctggcagctatcgcccaggagaaggaccaagagatggagcgcctccgcgagttacagagagccagtatcctggatatgcgcagagaccatgaagaacaactacagcgactgaagctcctgaaggacagggaagtggatgccgcaaccagcgccacctctcacacacgctcgctcaatagcatcatccaccagatggagaagttcagctcgtccttacatgaactgagctctagagtggaggcctcacaccttaccacatctcaagagagggagctaggcatcagacagcgggatgagcagcttagagccttgcaagagcggctggggcagcagcagagggatatggaggaagagagatcccgccagcaagaggtcatcggtaaaatggaggctcggctcaacgagcagagtagactgctcgaacaggagaggtggagagttactgcagagcaatctaaggcggaatccatgcagcgcgctctggaggagcagcgcaaggtcaccgcccagcagatggctatggagcgggcggaactggaaagagctaagtctgcgctccttgaggaacagaaatcggtcatgctgaaatgtggagaggaaagacgccggcttgccgccgaatgggctgaatttagcgcccagcagaagctctcaaaggagcgcgctgagcgggaggcagagcgggccctgcaggtagacacacaacgcgagggtaccttgatcagcctggctaaagagcaagccgagttgaaaatccgcgcctccgagctcagagccgaggagaagcaactggctgcggagagggccgcccttgagcaagaacgccaggagctgcgattggagaaggagaggattaatgcaacagcgctgagagttaaactgcgggcagaagaggtggaatcaatgtctaaagtggccagtgagaagtacgaagaaggcgagcgcgcactccgagaggctcaacaggtgcaggcagagcagcaggccaggcttcaagcagtccagcaacagcaggagagactccggaagcaggaacaacatatgcatcaggaacacttgtcactcgcacagcagaggctccagttagacagagccagacaggatttaccatccagtctggtgggcctgtttccccgagcacagggacccgccgcatcctcgcaatctgcactcatgccaccagccccaaccacacggtggtgctctcagcctcctaccggtctggacccatcacccctgcatttgcacgcccggctcgccctgctccggcacatggccgagcaggaccgagattttctcgagaatgagcagttcttcctcgagaccctaaagaagggatcatacaaccttacgtcccacagtgcatag

SEQ ID NO: 36960 - DNA, 3402 bp, Artificial Sequence
  derived and/or modified sequence
atggcccccaagaccaagaagggctgcaaggtgaccctgcctgagaagcctgtgaagctggccagccacacccgggacaccaccggggtgtcccagatgttccccagcagcaaggcccggaccaagagcctgctgggagatgatgtgttcagcaccatggccggcctggaggaggctgatgctgaggtgtctggcatcagcgaggccgacccccaggccctgctgcaggccatgaaggacctggatggcatggatgctgacatcctgggcctgaagaagagcaacagcgcccccagcaagaaggccgccaaggaccccgggaagggggagctgcccaaccaccccaagccagctgggggcgccatccccaccaagaagagcctgcccagccccagcagcagcggccaccagaacagacgcttcagcagcgaggacctggaggaccccctgcggggcctgctgtcctatgatgaaggaggcatcaccaagcagccccctgtgacccagagcaagacagccagtgacaagagccccagcacagtgcgggaccagggccccagcatccccctgacccctggggacacccccatcaggaagaaggaggagctgctgtttgatgatggagatgacatcatggccaccctgggctttggagacagccccaaggccgagaagaggcagatcggggaccaggagggccccaggcctgcccggagcaccctggatgagctgctgggccggggcatggccaccaagctgctggcccggcccggcactggagagcaccgggagttcaagctggacaagaagtaccagaggccccaggacagcgaggacatgtggggagatgaggacttcaccttcggggcctaccagcccaccgtggtgagcagcgagggccggcagagccggcggcagagcgtgcgcttctttgctgacagcggggctgaccccaagggggagcccggcagcaagcagagcccccccatggccagcagccccatccagcccaggaaaggaggagctgactggctgggcctgaaggatgaggacctggacctcttccctgccagccccacccgggaggcccaccgggagagctctgtgcctgtgacccccagcgtgcccccaccagccagccagcacagcaccccagctggcctgccccccagccgggccaagcccccaacagaaggagctggcagccctgccaaggccagccaggccagcaagctgcgggccagcaaggaggagaaggaggactggctgagccacgccctgagcaggaagaagagccagggcctggcccgggagcagcacgccggcaccagcgagggcctgcacctggccggcacagctggccacccccccagcggcagccagcccctgaccagcacccagggcctggagcacgccgccgccggcggcagcagcggcaccacagcccgggagcggccctgtgtgcggcctggggtgtctggcagccctgtgacccagaaccacgccgccagcgccctgcccaccggcagccccaagaggggcacagcccctggggacctgagcgccacagagcccgccacctgcttccccagcacccagaagcccacagagcccagcgtgcctgtgcagcccctgctgcctgagagcctggcccggagcctgctgcccagcacagagtaccagaagcagctgctggccgcccaggtgcagctgcagtgcagccctgctgagctgcaggccgagctgctgcacagccaggcccggctggccgagctggaggcccaggtgaggaagctggagctggagcgggcccagcacgagctgctgctgggcagcctgcagcagcagcaccaggccgacctggagctgattgagagcgcccacaggagccgcatcaaggtgctggagaccagctaccagcagcgggaggagcggctgcggagagaaaatgaggagctgagcgcccgctacctgagccagtgccaggaggccgagcaggcccgggcagagctgacagcccagcaccagaggcggctggccgccatcgcccaggagaaggaccaggagatggagcggctgcgggagctgcagagggccagcatcctggacatgagaagagaccacgaggagcagctgcagaggctgaagctgctgaaggaccgggaggtggatgctgccaccagcgccaccagccacaccaggagcctgaacagcatcatccaccagatggagaagttcagcagcagcctgcacgagctgagcagccgggtggaggccagccacctgaccaccagccaggagcgggagctgggcatccggcagagagatgagcagctgcgggccctgcaggagcggctgggccagcagcagagggacatggaggaggagaggagccggcagcaggaggtgattggcaagatggaggcccggctgaatgagcagagccggctgctggagcaggagcgctggagggtgacagctgagcagagcaaggccgagagcatgcagagggccctggaggagcagaggaaggtgacagcccagcagatggccatggagagagctgagctggagcgggccaagagcgccctgctggaggagcagaagtctgtgatgctgaagtgtggggaggagcggcggcggctggccgctgagtgggccgagttcagcgcccagcagaagctgagcaaggagcgggcagagcgggaggccgagcgggccctgcaggtggacacccagcgggagggcaccctcatcagcctggccaaggagcaggccgagctgaagatccgggccagcgagctgcgggcagaggagaagcagctggccgctgagagagctgccctggagcaggagcggcaggagctgcggctggagaaggagcgcatcaatgccacagccctgcgggtgaagctgcgggcagaggaggtggagagcatgagcaaggtggccagcgagaagtatgaggagggggagcgggccctgcgggaggcccagcaggtgcaggccgagcagcaggcccggctgcaggccgtgcagcagcagcaggagcggctgaggaagcaggagcagcacatgcaccaggagcacctgagcctggcccagcagaggctgcagctggaccgggcccggcaggacctgcccagcagcctggtgggcctcttcccccgggcccagggccctgctgccagcagccagagcgccctgatgcccccagcccccaccacccgctggtgcagccagccccccaccggcctggaccccagccccctgcacctgcacgcccggctggccctgctgcggcacatggccgagcaggaccgggacttcctggagaatgagcagttcttcctggagaccctgaagaagggcagctacaacctgaccagccacagcgcctag

SEQ ID NO: 36961 - DNA, 2493 bp, Artificial Sequence
  derived and/or modified sequence
atggcccccaagaccaagaagggctgcaaggtgaccctgcctgagaagcctgtgaagctggccagccacacccgggacaccaccggggtgtcccagatgttccccagcagcaaggcccggaccaagagcctgctgggagatgatgtgttcagcaccatggccggcctggaggaggctgatgctgaggtgtctggcatcagcgaggccgacccccaggccctgctgcaggccatgaaggacctggatggcatggatgctgacatcctgggcctgaagaagagcaacagcgcccccagcaagaaggccgccaaggaccccgggaagggggagctgcccaaccaccccaagccagctgggggcgccatccccaccaagaagagcctgcccagccccagcagcagcggccaccagaacagacgcttcagcagcgaggacctggaggaccccctgcggggcctgctgtcctatgatgaaggaggcatcaccaagcagccccctgtgacccagagcaagacagccagtgacaagagccccagcacagtgcgggaccagggccccagcatccccctgacccctggggacacccccatcaggaagaaggaggagctgctgtttgatgatggagatgacatcatggccaccctgggctttggagacagccccaaggccgagaagaggcagatcggggaccaggagggccccaggcctgcccggagcaccctggatgagctgctgggccggggcatggccaccaagctgctggcccggcccggcactggagagcaccgggagttcaagctggacaagaagtaccagaggccccaggacagcgaggacatgtggggagatgaggacttcaccttcggggcctaccagcccaccgtggtgagcagcgagggccggcagagccggcggcagagcgtgagccgcttctttgctgacagcggggctgaccccaagggggagcccggcagcaagcagagcccccccatggccagcagccccatccagcccaggaagggcggcgctgactggctgggcctgaaggatgaggacctggacctcttccctgccagccccacccgggaggcccaccgggagagctctgtgcctgtgaccccatctgtgcccccaccagccagccagcacagcaccccagctggcctgccccccagccgggccaagccacccacagagggcgccggcagccctgccaaggccagccaggccagcaagctgcgggccagcaaggaggagaaggaggactggctgagccacgccctgagcaggaagaagagccagggcctggcccgggagcagcacgccggcaccagcgagggcctgcacctggccggcacagctggccaccccccatctggcagccagcccctgaccagcacccagggcctggagcacgccgctgctgggggcagcagcggcaccacagcccgggagcggccctgtgtgcggcctggggtgtctggcagccctgtgacccagaaccacgccgccagcgccctgcccaccggcagccccaagaggggcacagcccctggggacctgagcgccacagagcccgccacctgcttccccagcacccagaagcccacagagcccagcgtgcctgtgcagcccctgctgcctgagagcctggcccggagcctgctgcccagcacagagtaccagaagcagctgctggccgcccaggtgcagctgcagtgcagccctgctgagctgcaggccgagctgctgcacagccaggcccggctggccgagctggaggcccaggtgaggaagctggagctggagcgggcccagcacgagctgctgctgggcagcctgcagcagcagcaccaggccgacctggagctgattgaaagtgcccacaggagccgcatcaaggtgctggagaccagctaccagcagcgggaggagcggctgcggcgggagaatgaggagctgagcgcccgctacctgagccagtgccaggaggccgagcaggcccgggcagagctgacagcccagcaccagaggcggctggccgccatcgcccaggagaaggaccaggagatggagcggctgcgggagctgcagagggccagcatcctggacatgaggcgggaccacgaggagcagctgcagaggctgaagctgctgaaggaccgggaggtggatgctgccaccagcgccaccagccacaccaggagcctgaacagcatcatccaccagatggagaagttcagcagcagcctgcacgagctgagcagccgggtggaggccagccacctgaccaccagccaggagcgggagctgggcatccggcagagagatgagcagctgcgggccctgcaggagcggctgggccagcagcagagggacatgggcagagatgaggagggcagcctgtgtgccgcccacctgcccaaggcccagctgagcggctatgctgtggaggccaccaggaaccagagccagctgcagcgcttcctgtag

SEQ ID NO: 36962 - DNA, 3405 bp, Artificial Sequence
  derived and/or modified sequence
atggcccccaagaccaagaagggctgcaaggtgaccctgcctgagaagcctgtgaagctggccagccacacccgggacaccaccggggtgtcccagatgttccccagcagcaaggcccggaccaagagcctgctgggagatgatgtgttcagcaccatggccggcctggaggaggctgatgctgaggtgtctggcatcagcgaggccgacccccaggccctgctgcaggccatgaaggacctggatggcatggatgctgacatcctgggcctgaagaagagcaacagcgcccccagcaagaaggccgccaaggaccccgggaagggggagctgcccaaccaccccaagccagctgggggcgccatccccaccaagaagagcctgcccagccccagcagcagcggccaccagaacagacgcttcagcagcgaggacctggaggaccccctgcggggcctgctgtcctatgatgaaggaggcatcaccaagcagccccctgtgacccagagcaagacagccagtgacaagagccccagcacagtgcgggaccagggccccagcatccccctgacccctggggacacccccatcaggaagaaggaggagctgctgtttgatgatggagatgacatcatggccaccctgggctttggagacagccccaaggccgagaagaggcagatcggggaccaggagggccccaggcctgcccggagcaccctggatgagctgctgggccggggcatggccaccaagctgctggcccggcccggcactggagagcaccgggagttcaagctggacaagaagtaccagaggccccaggacagcgaggacatgtggggagatgaggacttcaccttcggggcctaccagcccaccgtggtgagcagcgagggccggcagagccggcggcagagcgtgagccgcttctttgctgacagcggggctgaccccaagggggagcccggcagcaagcagagcccccccatggccagcagccccatccagcccaggaagggcggcgctgactggctgggcctgaaggatgaggacctggacctcttccctgccagccccacccgggaggcccaccgggagagctctgtgcctgtgaccccatctgtgcccccaccagccagccagcacagcaccccagctggcctgccccccagccgggccaagccacccacagagggcgccggcagccctgccaaggccagccaggccagcaagctgcgggccagcaaggaggagaaggaggactggctgagccacgccctgagcaggaagaagagccagggcctggcccgggagcagcacgccggcaccagcgagggcctgcacctggccggcacagctggccaccccccatctggcagccagcccctgaccagcacccagggcctggagcacgccgctgctgggggcagcagcggcaccacagcccgggagcggccctgtgtgcggcctggggtgtctggcagccctgtgacccagaaccacgccgccagcgccctgcccaccggcagccccaagaggggcacagcccctggggacctgagcgccacagagcccgccacctgcttccccagcacccagaagcccacagagcccagcgtgcctgtgcagcccctgctgcctgagagcctggcccggagcctgctgcccagcacagagtaccagaagcagctgctggccgcccaggtgcagctgcagtgcagccctgctgagctgcaggccgagctgctgcacagccaggcccggctggccgagctggaggcccaggtgaggaagctggagctggagcgggcccagcacgagctgctgctgggcagcctgcagcagcagcaccaggccgacctggagctgattgaaagtgcccacaggagccgcatcaaggtgctggagaccagctaccagcagcgggaggagcggctgcggcgggagaatgaggagctgagcgcccgctacctgagccagtgccaggaggccgagcaggcccgggcagagctgacagcccagcaccagaggcggctggccgccatcgcccaggagaaggaccaggagatggagcggctgcgggagctgcagagggccagcatcctggacatgaggcgggaccacgaggagcagctgcagaggctgaagctgctgaaggaccgggaggtggatgctgccaccagcgccaccagccacaccaggagcctgaacagcatcatccaccagatggagaagttcagcagcagcctgcacgagctgagcagccgggtggaggccagccacctgaccaccagccaggagcgggagctgggcatccggcagagagatgagcagctgcgggccctgcaggagcggctgggccagcagcagagggacatggaggaggagaggagccggcagcaggaggtgattggcaagatggaggcccggctgaatgagcagagccggctgctggagcaggagcgctggagggtgacagctgagcagagcaaggccgagagcatgcagagggccctggaggagcagaggaaggtgacagcccagcagatggccatggagcgggcagagctggagcgggccaagagcgccctgctggaggagcagaagtctgtgatgctgaagtgtggggaggagcggcggcggctggccgctgagtgggccgagttcagcgcccagcagaagctgagcaaggagagagctgagcgggaggccgagcgggccctgcaggtggacacccagcgggagggcaccctcatcagcctggccaaggagcaggccgagctgaagatccgggccagcgagctgcgggcagaggagaagcagctggccgctgagcgggccgccctggagcaggagcggcaggagctgcggctggagaaggagcgcatcaatgccacagccctgcgggtgaagctgcgggcagaggaggtggagagcatgagcaaggtggccagcgagaagtatgaggagggggagcgggccctgcgggaggcccagcaggtgcaggccgagcagcaggcccggctgcaggccgtgcagcagcagcaggagcggctgaggaagcaggagcagcacatgcaccaggagcacctgagcctggcccagcagaggctgcagctggaccgggcccggcaggacctgcccagcagcctggtgggcctcttcccccgggcccagggccctgctgccagcagccagagcgccctgatgcccccagcccccaccacccgctggtgcagccagcccccaacaggcctggaccccagccccctgcacctgcacgcccggctggccctgctgcggcacatggccgagcaggaccgggacttcctggagaatgagcagttcttcctggagaccctgaagaagggcagctacaacctgaccagccacagcgcctag

SEQ ID NO: 36963 - DNA, 3444 bp, Artificial Sequence
  derived and/or modified sequence
gcccccaagaccaagaagggctgcaagggcagcattgatgacttcctgggggacctgctgggagatgacatgaccctgcctgagaagcctgtgaagctggccagccacacccgggacaccactggagtgtcccagatgttccccagcagcaaggcccggaccaagagcctgctgggagatgatgtgttcagcaccatggccggcctggaggaggctgatgctgaggtgtctggcatcagcgaggccgacccccaggccctgctgcaggccatgaaggacctggatggcatggatgctgacatcctgggcctgaagaagagcaacagcgcccccagcaagaaggccgccaaggaccctggaaaaggagagctgcccaaccaccccaagccagctggaggagccatccccaccaagaagagcctgcccagccccagcagcagcggccaccagaacagacgcttcagcagcgaggacctggaggaccccctgcggggcctgctgtcctatgatgagggcggcatcaccaagcagccccctgtgacccagagcaagacagccagtgacaagagccccagcacagtgcgggaccagggccccagcatccccctgacccctggggacacccccatcaggaagaaggaggagctgctgtttgatgatggagatgacatcatggccaccctgggctttggagacagccccaaggccgagaagaggcagattggagaccaggagggccccaggcctgcccggagcaccctggatgagctgctgggccggggcatggccaccaagctgctggcccggcccggcaccggggagcaccgggagttcaagctggacaagaagtaccagaggccccaggacagcgaggacatgtggggagatgaggacttcacctttggagcctaccagcccaccgtggtgtcctctgagggccggcagagccggcggcagagcgtgagccgcttctttgctgacagcggggctgaccccaagggggagcccggcagcaagcagagcccccccatggccagcagccccatccagcccaggaaaggaggagctgactggctgggcctgaaggatgaggacctggacctcttccctgccagccccacccgggaggcccaccgggagagctctgtgcctgtgacccccagcgtgcccccaccagccagccagcacagcaccccagctggcctgccccccagccgggccaagcccccaacagaaggagctggcagccctgccaaggccagccaggccagcaagctgcgggccagcaaggaggagaaggaggactggctgagccacgccctgagcaggaagaagagccagggcctggcccgggagcagcacgccggcaccagcgagggcctgcacctggccggcacagctggccacccccccagcggcagccagcccctgaccagcacccagggcctggagcacgccgccgccggcggcagcagcggcaccacagcccgggagcggccctgtgtgcggcctggggtgtctggcagccctgtgacccagaaccacgccgccagcgccctgcccaccggcagccccaagaggggcacagcccctggggacctgagcgccacagagcccgccacctgcttccccagcacccagaagcccacagagcccagcgtgcctgtgcagcccctgctgcctgagagcctggcccggagcctgctgcccagcacagagtaccagaagcagctgctggccgcccaggtgcagctgcagtgcagccctgctgagctgcaggccgagctgctgcacagccaggcccggctggccgagctggaggcccaggtgaggaagctggagctggagcgggcccagcacgagctgctgctgggcagcctgcagcagcagcaccaggccgacctggagctgattgagagcgcccacaggagccgcatcaaggtgctggagaccagctaccagcagcgggaggagcggctgcggagagaaaatgaggagctgagcgcccgctacctgagccagtgccaggaggccgagcaggcccgggcagagctgacagcccagcaccagaggcggctggccgccatcgcccaggagaaggaccaggagatggagcggctgcgggagctgcagagggccagcatcctggacatgagaagagaccacgaggagcagctgcagaggctgaagctgctgaaggaccgggaggtggatgctgccaccagcgccaccagccacaccaggagcctgaacagcatcatccaccagatggagaagttcagcagcagcctgcacgagctgagcagccgggtggaggccagccacctgaccaccagccaggagcgggagctgggcatccggcagagagatgagcagctgcgggccctgcaggagcggctgggccagcagcagagggacatggaggaggagaggagccggcagcaggaggtgattggcaagatggaggcccggctgaatgagcagagccggctgctggagcaggagcgctggagggtgacagctgagcagagcaaggccgagagcatgcagagggccctggaggagcagaggaaggtgacagcccagcagatggccatggagagagctgagctggagcgggccaagagcgccctgctggaggagcagaagtctgtgatgctgaagtgtggggaggagcggcggcggctggccgctgagtgggccgagttcagcgcccagcagaagctgagcaaggagcgggcagagcgggaggccgagcgggccctgcaggtggacacccagcgggagggcaccctcatcagcctggccaaggagcaggccgagctgaagatccgggccagcgagctgcgggcagaggagaagcagctggccgctgagagagctgccctggagcaggagcggcaggagctgcggctggagaaggagcgcatcaatgccacagccctgcgggtgaagctgcgggcagaggaggtggagagcatgagcaaggtggccagcgagaagtatgaggagggggagcgggccctgcgggaggcccagcaggtgcaggccgagcagcaggcccggctgcaggccgtgcagcagcagcaggagcggctgaggaagcaggagcagcacatgcaccaggagcacctgagcctggcccagcagaggctgcagctggaccgggcccggcaggacctgcccagcagcctggtgggcctcttcccccgggcccagggccctgctgccagcagccagagcgccctgatgcccccagcccccaccacccgctggtgcagccagccccccaccggcctggaccccagccccctgcacctgcacgcccggctggccctgctgcggcacatggccgagcaggaccgggacttcctggagaatgagcagttcttcctggagaccctgaagaagggcagctacaacctgaccagccacagcgcctag

SEQ ID NO: 36964 - DNA, 3402 bp, Artificial Sequence
  derived and/or modified sequence
atggcccccaagaccaagaagggctgcaaggtgaccctgcccgagaagcccgtcaagcttgcgtctcatacaagagatactaccggtgtttcccagatgtttcctagtagcaaagcacgcacaaagtctttgctcggtgatgatgtcttcagcacgatggccggcctcgaggaggccgacgcagaagtaagtggaatctctgaagctgacccgcaagctcttctccaggcgatgaaggatcttgatggtatggacgctgacatcctggggctgaaaaagtccaactcagcccccagcaagaaggccgccaaggacccaggcaaaggcgagctgccaaatcaccccaagccagccgggggcgctatccccaccaaaaaaagtctgccttcaccaagctcatcaggccaccaaaatcggaggttctccagcgaggacctcgaggacccattacgagggcttctgtcctacgacgaaggggggattaccaagcagccccccgtaacacaatcaaagaccgcctccgataagagtccatccactgtgagggaccagggtccatccattcctcttaccccaggtgacactcctatccgcaaaaaagaagagttgctgtttgatgacggtgacgacatcatggctacacttggatttggggacagccccaaggctgagaaacgacagattggagatcaggaagggcctaggccggctagatccacactggatgaactccttggacgaggtatggccaccaagctgctcgcccgtccaggtaccggcgaacatcgagagttcaagctcgataagaagtatcaacgtccgcaagactctgaagacatgtggggagacgaggattttaccttcggggcatatcagccgacagtggtgagctccgaaggacgtcagtcaagacggcagtccgtgagatttttcgccgatagcggcgcagacccaaaaggcgaacccggatcaaaacagagcccccctatggcttcttctcctatccagcctcgaaagggcggggctgattggcttgggctgaaagatgaggacctagatctgttcccggcaagtccaacccgggaagcgcatagagagtcttctgtgcctgtcacgccttccgttcctccacccgcatcacagcattccactcctgccggactccccccttcgagggcaaaacccccgaccgaaggcgctggctcaccagccaaagcgtcccaggccagcaaactcagggcctcaaaggaggagaaggaggactggttgagtcacgcgctgtcaagaaagaaatctcagggcttggcccgtgagcagcacgcaggcacgagcgagggtctccatctcgcaggaaccgcaggacaccctccatctggctcacagcccctcactagcacccagggtctggaacacgccgcagccggcggctcatccggcacgacagcccgggaacgtccatgcgtacggcccggcgtctcggggtctccagtgacacagaatcacgcggccagcgccttgcctacaggctcaccaaaaaggggcactgcccctggagatctgtccgcaacggaacccgcgacatgttttcccagcacccaaaagccgactgaaccttccgttcctgtccagcctctccttccagagagtctagctcgctctcttctgccgagcacggaatatcagaagcagttattagccgctcaggttcaactccagtgttctcccgccgagctgcaagctgaactgctacacagtcaggcccgactagccgagctggaagcccaagtgcgtaagttagaattggaaagggcacagcacgaattactgcttgggtcactgcagcagcagcaccaggcagatctagagctcatcgagagcgcccatcggtctaggatcaaggttttggagacatcctatcagcagcgcgaagaaaggctgcgacgtgagaatgaggagctgtccgcccgttatctgtcccaatgccaggaggctgaacaagccagagctgaactaacagctcagcatcagaggcgactcgcagccatcgcccaggagaaggaccaggaaatggagcgtctgcgggagcttcagcgggctagtattctggatatgagacgggatcacgaggaacagctgcagcggttgaagctgctgaaggatcgagaagtggacgcggcaacttcagctacctcccacacaagatcactcaattccatcattcaccagatggagaaattttcatcctctctccacgagctatcctccagagtcgaagcctcccatctgacaacctcccaagagagagagttgggtattcggcagcgtgatgaacagctccgggcacttcaggagagattaggtcaacagcaacgcgatatggaggaggaaagaagtagacagcaggaagtgattggcaagatggaggccaggctcaatgaacagagtcggctgctggagcaagaaaggtggagggtgactgccgagcaatctaaggcagaatccatgcagagagccctggaagaacagcgaaaagtaactgctcagcagatggccatggagcgcgccgagttggaaagggcaaaaagcgctctcctcgaagaacagaaatcggtcatgctaaagtgtggcgaagaaagacgacgcctggcagccgagtgggcagagttctccgctcagcagaagctgagtaaggagagagccgagagggaggctgagcgcgccctacaggtagacacgcaacgtgaaggcacactgatatcactggccaaagagcaggctgaattgaagattagggccagtgagctgcgcgccgaagaaaagcaattagctgcagaacgtgcggccttggaacaggagcgtcaggagctgcggctcgagaaggagagaataaatgcgaccgccctgcgggtgaaactacgggctgaggaggtggagtcaatgagtaaagtggccagcgaaaaatacgaggaaggcgaacgcgctctgagggaagcgcaacaagtgcaggccgagcagcaggctaggttgcaggctgtccaacagcagcaggaacggctccgaaagcaagagcagcacatgcaccaggaacacctgtctctcgctcagcaaaggctgcaacttgatcgcgccagacaggatctacccagtagtttggtcggcctgtttccacgggcacaaggtcctgccgccagcagccaatctgcacttatgccacccgctcccaccacgaggtggtgttcacagccccccacgggcctggacccttccccacttcatctgcatgccagattagcactgttaagacacatggccgaacaggacagagatttcctggagaacgaacagttttttctcgaaacccttaaaaagggaagctataacctgacgagccactccgcctag

SEQ ID NO: 36965 - DNA, 2493 bp, Artificial Sequence
  derived and/or modified sequence
atggcccccaagaccaagaagggctgcaaggtgaccctgcccgagaagcccgtgaaactggcttcacacacccgggatacgaccggtgtttctcagatgttcccctcttctaaagcccggaccaagagcctgctcggagacgacgtgtttagcaccatggccggcctagaggaagcggatgctgaagtgtctggcatttctgaagcagacccccaggctctgctgcaagcaatgaaagatctggatggtatggatgccgatattctgggcctcaagaagagcaatagcgcacctagcaagaaggcggccaaggatcccgggaaaggggagctccccaaccacccgaaacctgcaggaggagctatcccgaccaaaaagagccttccatctccttccagttctggccaccagaatcgacggttttccagcgaagacctggaggaccccctccggggtctgctgagctatgatgagggcgggataacaaagcagcctcctgtcacacagtcgaaaactgcttcggataagtccccctccacagtccgcgaccagggaccctcaatccccctcacccccggagatacaccaattaggaagaaagaggagcttctgtttgacgacggtgatgatattatggccaccttggggttcggcgattcccctaaagctgaaaaaagacaaataggagatcaagaagggcctagacctgcaagatctactttagatgaactgctaggccggggaatggctacaaagcttctggctaggccgggcacaggagagcatagggagttcaagcttgacaagaaataccagcgaccacaggattcagaagacatgtggggagacgaggactttacatttggtgcgtatcagccaaccgtagtgagctccgagggaagacagagcagacgccagagtgtctctcgatttttcgctgatagtggcgcagatccaaagggagagccaggatcaaagcaatcacctcccatggcgtcaagtcccattcagccacgcaaaggtggagcagactggctgggattgaaagacgaggatctagatttgttccctgcgtctccaacaagagaagctcatagagagagcagtgttccagtgaccccctccgtgcccccaccagccagccagcattccacaccggctggcttgcctcccagccgggcaaaaccacctaccgagggtgccggcagcccagccaaagccagccaagcctccaaactcagagctagtaaggaggaaaaggaggactggctcagccacgccttatccaggaaaaagagtcaaggattggctcgggagcagcatgcgggaacatccgaaggcctgcacctggcgggtacggcaggccaccccccgtccgggtcacaaccgctgacgagcacccaggggctagagcatgccgctgccggcggatcctcaggtaccacagcacgcgagagaccttgcgtgcggcctggagtgagtggcagtcctgtgacccaaaaccacgccgcctccgccttacccactgggtcacccaagagaggcaccgcccccggcgacctgagtgcaacagaaccggccacatgttttccaagtacccagaaaccaactgagcctagtgtacccgtgcagcctcttctgccagaatccctcgccaggtctttgttacctagtaccgaataccagaaacagctattggctgcccaggtacaacttcagtgttcgcctgcagagctgcaggccgaactgctgcatagccaggcacgtttagcagagcttgaggcacaagtccgcaagttagaactcgagcgagcccagcatgagctgctgctcggctcactgcaacagcagcaccaggctgacctggaactgatcgaatcagcacaccgcagccgtatcaaagtacttgagacatcttaccagcaaagggaggagcgactgcgtcgcgagaatgaggaactgagtgctcgatatctgagccagtgtcaggaggccgagcaggctcgcgctgagctgacggcacaacatcagaggcgcttagcagcaattgcccaagagaaggatcaggagatggaacgacttagggagctccaaagggcctctatcttggatatgcgcagggaccacgaggagcagttgcagcggcttaagcttcttaaagacagggaggtggatgcagccaccagtgctacatcacacactcggtcacttaactctattatccatcaaatggaaaagttctcctcatccctccatgagctgtcaagccgtgtggaagcatctcacttgacgaccagccaggagcgtgagttgggcatccgccaaagggatgagcaattgcgggcattacaggagcggcttggtcagcagcagagggatatgggtcgggacgaggaggggagcctttgcgctgctcatcttccaaaggctcagctgtcaggatatgccgtcgaggcaacccgcaatcagagccaactccagcgatttctgtag

SEQ ID NO: 36966 - DNA, 3405 bp, Artificial Sequence
  derived and/or modified sequence
atggcccccaagaccaagaagggctgcaaggtgaccctgcccgagaagccagttaagctcgctagtcatacacgggataccactggcgtctcccagatgttcccttcgagtaaagctcggactaagagcctactcggtgacgatgtttttagcactatggccgggctagaggaagccgacgccgaagtgagtggcatatccgaagccgaccctcaggcactgttgcaggcgatgaaggacctggacgggatggatgcagatatcctcggtttgaaaaagagtaattccgcccctagcaaaaaggcagcgaaggaccccggcaagggggaactccctaatcacccgaagcccgctggaggtgctatccccaccaagaagagcctgccatcaccttcttctagcggacatcagaaccggcggttctcctccgaggatctggaggacccactacggggcctgctatcatatgatgagggtggtatcacaaagcagccacctgtgacccaaagtaaaacagcgtccgacaagagccccagcacagtcagggaccagggaccgagcattcctctcactcccggagacacgccaattcgcaagaaagaagagctcctgttcgacgatggtgacgacattatggctaccttagggtttggggattcgcctaaggcagagaaaaggcagattggagatcaggaggggcctcggccagctaggtcaacacttgacgagttactgggacggggaatggcaactaagctcctggctaggcctggcaccggagaacacagagaatttaagctcgacaagaaataccagagaccgcaggacagcgaggacatgtggggcgatgaggatttcacctttggcgcctaccagcccacggttgtgagctccgaggggcggcagtcccgcaggcagtcagtcagtcgttttttcgccgacagtggggctgatccgaagggagagcctggtagcaaacagtcacccccaatggcctcctcgccgatccagccaaggaaaggaggtgcggactggctgggtctgaaggacgaagacctggatctgtttcctgccagccccactcgagaagcccacagggaatcttcggttcccgttacgcccagtgtcccacccccagcctcccagcactcgacacccgccggccttcccccttccagagcgaagccgccaactgagggtgcagggagtcccgctaaggcatcccaggcgtcaaaacttcgagccagcaaggaagaaaaggaagattggctgtcccacgctctttcgcgaaaaaagtcgcagggcctcgcgcgagagcagcacgcgggaaccagcgaaggactacaccttgccggaactgcaggacatcctcctagtggctcgcagccattgacgtctactcaggggttggagcatgccgccgccggggggtccagtggcactaccgcccgggagagaccctgcgtacgacccggagtcagcggttctccggtgactcagaaccatgccgcttcagctctccctaccggctcccctaaaaggggcactgcgccaggcgatctctcagccactgaaccggcaacatgcttcccgtccacgcagaagcctaccgagcccagcgtcccagtccaaccactcctgcctgagagcctcgccagaagcctccttccttctactgaataccagaaacagctgctggcggcacaggtgcaacttcaatgtagcccagcagaactgcaggcggaactactgcactctcaagcccgcctcgccgagttagaggcgcaggtgcgcaaactcgagttggagcgggcccaacacgaacttttgctggggagccttcagcagcagcaccaggctgacctggaactgatcgaatctgcgcatcgtagccggattaaggtgctcgaaaccagttatcaacagcgcgaagagaggctgcgacgagagaatgaagaactctcagcaaggtacttatctcagtgtcaggaggcagaacaagccagggccgaactcactgcccagcaccagcgccgcctcgctgccatcgcccaggagaaggaccaggaaatggaacgcttaagggagctgcagcgcgcctcaatcctagatatgcgtcgtgatcacgaagaacagctgcagagattgaagctcctaaaggaccgcgaggtggacgctgccacctccgccaccagtcacactcgtagcctcaactctatcatccaccaaatggagaaattcagttcttcactacatgagctgtccagcagggtcgaggcgtcacacctgactacgtcacaggagagagagttagggattagacagcgggacgaacagctgcgcgcactgcaggagaggctgggtcaacagcaacgcgacatggaagaggagcggagccgtcagcaggaggtcataggcaaaatggaggcccgcctcaatgaacagtctcggctccttgagcaggagcgctggcgggtcacagcggagcagtctaaggccgagtcaatgcagagagctttggaggagcagagaaaagtcaccgcccagcagatggccatggagagagccgagttggaacgcgctaagtccgcactgctggaggagcagaaatccgtcatgctgaagtgcggggaggaaagacgacgactggccgcagagtgggccgaattcagtgcccaacagaaactctcaaaggagcgggctgaaagagaggccgaacgtgcgttgcaggtcgacacgcagcgcgaaggaaccctgatttccctggctaaagaacaagcagaattaaagatccgcgctagtgagctgcgagcggaggaaaagcaactggccgcagaacgagcggcactggaacaggagcgacaggagctgagactcgagaaagagcggataaacgcaaccgcccttcgcgtgaagttgcgggcagaggaggtcgagtctatgtctaaagtggcctcagagaagtatgaagagggtgaacgtgcacttcgggaagcccagcaagttcaggcagagcaacaggcaaggctgcaagcagtccagcagcaacaagaacgtctgaggaagcaggagcagcatatgcatcaggagcatctatctcttgctcaacaacggctccaacttgacagggccagacaagacctgccgtcctctcttgttggtctcttccccagggcgcagggacctgccgcatcctcgcagtcagccttgatgccacccgcgccaaccacacgttggtgtagccaaccgcctaccgggctggatccttcaccgctgcacctgcacgccaggctagcactgctgcgccatatggccgagcaggaccgcgattttctcgagaacgagcagttctttttggagactctgaagaaaggaagctataatctcacaagccactccgcatag

SEQ ID NO: 36967 - DNA, 3444 bp, Artificial Sequence
  derived and/or modified sequence
gcccccaagaccaagaagggctgcaagggcagcatcgacgacttcctgggtgatttgttaggggacgatatgacattgccggagaagccagtgaagctggctagtcatactagggataccaccggggtctcgcagatgttcccctcctcaaaggccaggacaaagtctctgctgggtgatgatgtgttttcaacaatggctggacttgaagaggccgatgcagaagttagtggcatctcggaggccgatcctcaggctctgctgcaggctatgaaggatcttgacggaatggacgcggatatcttgggcctgaagaaatcgaatagcgctccctctaagaaggccgccaaggaccctggaaagggcgagctacccaatcaccctaaacctgccggaggcgcaatccctactaagaagtccctgccttcccccagcagttctggacatcagaaccgaagattcagctcagaagacctggaagatcctcttagaggcctattgagttatgacgaaggtgggatcaccaagcagccacccgtgacacaatcaaagactgcctctgataaatctccctccaccgtgagagaccaggggccttcgatacccttgaccccgggggacacccctatcaggaagaaagaagaacttctattcgatgacggcgacgatattatggccactctgggttttggtgatagtcccaaagcagagaaacggcagatcggcgaccaggaggggcctaggccggctaggtcgactcttgacgaactgttaggccggggaatggccactaagttactggctcggcctggcactggggagcatagagagtttaaactggacaagaaataccagaggccacaggacagtgaggacatgtggggtgacgaggacttcaccttcggggcctaccagccaacggtcgtcagcagcgaggggagacaatcccgccggcagtcagtcagtcggttctttgccgattctggagccgatcctaaaggcgaacccggaagcaaacagagtccgccaatggcatcgagccctatccagccccgcaaggggggtgctgattggctcggcttgaaagatgaggatctggaccttttcccagcgtctcccaccagggaagctcatcgggagtcttctgtgccagtaacgccttctgtccctcccccagcgtcacagcacagtacccccgccggcctgccaccatcaagagctaagcctccgactgagggtgcgggatcgcccgctaaggcttctcaagcatctaagctaagagcctcaaaggaggaaaaagaagactggctgtcacacgcactgtccaggaagaagtcacagggattggcgagagagcagcacgctggaacctcagaggggctccatcttgccggaactgcagggcatccccctagcggtagccagccactgacatcaacccaaggactggagcacgccgctgctggagggtcctccggcacaactgccagagagaggccgtgtgtgcggcccggggtcagtgggtctccagtgactcagaaccatgccgccagcgccttacctaccggaagccccaagagaggtaccgcacccggagatctgtctgccaccgaaccagccacctgtttcccaagcacacagaaaccaactgaaccatccgttccggttcaacccctgttgccagagtcactagcgcggtctctgcttccatccactgaataccaaaagcagctgctcgcggcccaggtacagttacagtgtagccccgctgaattacaggcggagttgttgcattcccaggcaaggctggcggagctcgaagcacaagtgagaaaactggagctcgaaagggctcagcatgaattgctgttgggcagccttcagcaacagcatcaggccgatctcgaactgatcgagagcgcacaccggtcccggatcaaagttctggaaacttcctaccaacagagggaggagcgcctccgtcgcgaaaacgaagaactgtccgcacggtacctctcccagtgtcaggaggccgagcaggcgagagcagagctaaccgcccaacatcagagacgattagctgccatcgcgcaagagaaagatcaggagatggagagattgcgcgaactccagagggcctccattttagatatgcgcagggaccacgaagagcaattgcagcgcttgaaactgctaaaagatcgagaggttgacgctgccaccagtgcaactagccacaccaggtctctgaattcaatcattcaccaaatggagaagtttagctcctcattgcacgagcttagctctagggtggaggcctcgcatcttaccacctcccaggagcgtgagctgggcatcagacaacgagatgaacagttaagggctctccaggaacgactcgggcagcaacagagagacatggaagaagagcggtcccgccaacaggaggttatcgggaaaatggaggctagactcaatgagcagtcccgtctgctggaacaggagcgctggagggtcactgctgaacaatcaaaagcagaatcgatgcagcgagcccttgaggaacagcggaaagttaccgcacagcaaatggccatggaaagagccgaactggaacgcgccaagagcgcactcttagaggagcagaaatcagttatgctgaaatgcggagaggagcgccgccgtctcgcagctgagtgggcagagtttagtgcccagcagaagctgtcaaaggaacgggctgagagagaggctgaaagagcacttcaggttgatacccagagggagggtacactgatatcccttgccaaagagcaggccgaactgaaaatccgcgcgtcagagctaagagctgaggaaaaacaactggctgcagaacgtgccgccctggagcaggagcgccaggagctgcgattagagaaagagcgcattaatgctactgcattgagggttaagttaagagcggaagaggtggaatccatgtcaaaggtcgcatcggagaaatacgaggagggcgaaagggcattgagagaggcacagcaggtccaggccgagcagcaggctcgactgcaggctgtccagcagcagcaggagcgcttaaggaaacaagaacagcatatgcaccaagagcacctctctctagctcaacaacgtttgcaactcgaccgcgcaaggcaggatcttcccagttcactggtgggtctgttcccccgcgcccagggacccgcagcaagctcccagtccgctttgatgccacctgctcctaccactagatggtgttcccagccccctaccggcctggatccctctcctcttcacctgcacgcacgactcgcgcttttgcggcatatggccgaacaggacagggatttcctggaaaacgagcagtttttcttagaaacgctgaagaaggggtcttataacctaacatcccactcagcctag

SEQ ID NO: 36968 - DNA, 3402 bp, Artificial Sequence
  derived and/or modified sequence
atggcacctaaaactaagaaaggatgtaaagtcaccctgccggaaaaacccgtgaaacttgcctcccacactagggatacaacaggcgtatctcagatgttcccatcctcaaaggccagaaccaaatcgctacttggggacgatgtctttagtaccatggcgggactggaagaagcggatgccgaggtgagtggaattagtgaggctgacccacaggctttattgcaggcaatgaaagaccttgacggcatggatgcggacattctgggcctgaagaaatccaattcggcaccttcaaaaaaagctgctaaggatcccggtaaaggagagcttcccaaccaccctaagccagctggcggtgccatccccaccaaaaaatcacttccatcaccgagcagcagtgggcaccaaaacagaagattctcctcagaagaccttgaagatccactccggggactactgtcttatgacgagggaggcatcaccaagcaaccaccggtgacccaatcaaaaactgcctctgataaatcacccagcactgtgcgcgatcaaggcccaagcatccctctgaccccgggagacacacccatcagaaagaaggaagagcttctcttcgacgatggcgacgacatcatggctacattgggatttggtgactctccgaaagccgagaagcggcagatcggcgaccaggaggggccaaggccggctaggtccaccctggacgagctgctcggtcggggtatggcaactaagcttctggctcgacccggaactggagagcaccgcgagttcaagcttgataagaaataccagagacctcaggactctgaggacatgtggggcgacgaagactttacgtttggggcttaccagcccacagtagtgtcctccgaggggcgtcagtcccgtcggcaaagcgttaggttttttgctgactccggagccgaccctaagggagagcccggttctaaacagtcccccccaatggcttcatcccctatccagcctcgcaaaggcggagctgactggctcggtctcaaggatgaggacctcgacctgtttcccgctagtccaacacgggaggcccatcgggaaagcagtgtgcctgtaaccccttctgtaccgccaccggcatcccagcattccacgcctgctggattacctccttcaagggccaaaccaccaacagagggcgctggcagtccggctaaagctagccaggcctctaaactgcgggcatcaaaggaagagaaggaagattggctgtcgcacgcattatccagaaaaaagagtcaagggctggccagggagcagcatgctgggacctccgagggtctccatctggcaggaactgcagggcaccccccttccgggtctcagccactcacgtctacccaggggctggaacacgcggctgccggtggctcctccggcacgacagccagagagcgaccctgcgtgagaccaggtgtgagtggttcccccgtaacccaaaaccacgctgccagtgcactgcctaccggtagtcccaaacggggaaccgccccaggggatctgagcgctactgaaccagctacatgtttcccaagcacccaaaagccaaccgagccatcagtgcccgtgcagcccttgcttcccgaatctctcgctcgcagtttgctgccatcaaccgagtaccagaagcaattactggcagcccaggttcagctccagtgttctccagccgagttacaggcagaactgctgcattcacaggcccgactggccgaactggaagcgcaggttcggaagctcgaactcgaacgcgctcaacacgagctgctcctgggcagtctccagcagcagcaccaggccgatctggaactgatagagagcgcccatcggtctaggatcaaggtgctggaaacctcctatcagcagagagaagaaagactgcgcagggagaacgaagagcttagcgctcgctacctttcgcagtgtcaagaggctgaacaggcccgagcagaactcaccgcacagcaccagcgtcggcttgccgcaatagcccaagaaaaggatcaagaaatggaacgattgagagaattacagcgcgcttctatccttgacatgagaagagatcacgaggaacagctgcaaaggttgaagctgctcaaggacagagaggtggacgcggcaaccagtgcaacttcccacacgcgaagtctgaattcaatcatccaccagatggagaagttctcttcttctctccacgagttatcttctcgagtggaggctagccatctgacaacatcacaagagcgtgaattaggaataagacagagggatgagcaactgcgggctcttcaggaacgcctcggccagcagcagcgagacatggaagaggagagatcaaggcagcaagaagttattggtaagatggaggccaggctaaacgagcagtcaaggctgcttgagcaagagaggtggcgggttaccgccgagcagtcgaaggcggaatctatgcagagagccctggaagaacagcgtaaagtaaccgcacagcagatggctatggaacgggcagagctggaacgggctaagtctgctttgctagaagaacagaaatctgtgatgctcaaatgcggtgaggaacgccgtcgccttgccgcagaatgggctgagttctctgctcagcagaagctcagtaaggaacgcgcagagcgcgaggcagaacgagctctgcaggtcgatacacagagagaaggaacactcatctctcttgcaaaggagcaagccgagctgaagattagagcgtccgagttaagagccgaggaaaaacaattggccgcagaacgtgcagccctggagcaggagcggcaggagcttaggctggagaaagaacgcattaatgctacagctctccgggtgaaactgcgagcggaggaagttgagagtatgagtaaggtagcatctgagaagtacgaggaaggggagagggcccttagggaagcacagcaagttcaggccgagcaacaggccagactgcaggcggtccaacagcaacaggagcgtctccggaaacaggaacagcatatgcatcaggaacatctctcactggcccagcagcgcttacagttggatcgtgctcgacaggacctccccagcagtttggtcggcctgttcccaagggcccaggggcctgcggctagctcacagtccgccctcatgccacctgctcctactacacggtggtgtagccaacccccaaccgggctggatcccagccctctccatctgcacgcccgtcttgctctgcttcgacacatggccgagcaggatcgggatttcctggagaacgaacagttctttttggaaaccctgaagaagggtagttacaacttgacttctcattcagcgtag

SEQ ID NO: 36969 - DNA, 2493 bp, Artificial Sequence
  derived and/or modified sequence
atggcgccaaagaccaaaaaaggatgcaaagttacactacctgagaaacctgtgaaacttgctagtcacaccagggacacaacgggcgtatcccagatgtttccttcctctaaggctcgcactaagtccctgctgggggacgacgttttctctactatggcaggcctggaagaagcagacgccgaagtatctggaattagtgaagcagatccacaggccctcctccaggcaatgaaggacctagacggtatggacgccgatatcctggggctgaagaagtctaatagcgctccaagtaaaaaggccgctaaggatccgggaaaaggagagctgcctaaccatccaaaacctgcaggaggagccattccaacaaagaaaagcctcccatctcccagctcctcgggccaccagaacaggcgtttttccagcgaggacttggaagatcctctccgtggactcttgtcctacgacgaaggagggatcactaaacagcctccggtcacacagtccaagacagccagtgataagagcccctcaacggtgagagatcaggggccatctattccattgacacctggtgataccccgattcgcaagaaagaggagctactgttcgacgacggtgacgacatcatggcgaccttggggttcggggattccccgaaggccgagaagcgccagattggagatcaggaaggacccaggccagccagatctacgctggacgaattgctcggtcggggtatggccacgaagctccttgctcgacccggaacaggcgagcacagagagttcaagttagataagaaatatcagagacctcaggattccgaagatatgtggggggatgaagatttcaccttcggggcttaccaacctacggtcgtgagcagtgaagggagacagtccagacgccaaagcgtatcccgcttcttcgcagacagtggggcagacccaaagggcgagcctgggagcaagcagtccccacccatggctagctcccccattcaaccacggaaaggaggcgctgattggctgggtctcaaggacgaggacctcgacttgttccccgcttctcctacaagggaggcccaccgcgaatcatcagtccctgtgacaccatcagtgcctccacctgcctctcagcactccacccccgcagggctgcctcctagccgcgctaagcctccaacagagggtgcgggatctcctgcaaaagctagccaggcttccaagcttcgggcatccaaggaagagaaggaagactggttgtcacacgccctgagccggaaaaagtctcaaggtctggccagggagcagcacgcaggaacctcagagggcctgcatttggccggaaccgccggtcaccctccatccggcagccagccccttacatctactcaggggcttgaacacgctgctgctggcggaagttccggaacgactgcaagagaaaggccatgcgtacgtcctggagtgtcaggcagtcccgttacacagaatcacgccgcttcagccctgcctactgggtccccgaagcggggtactgcccctggtgatctgtccgctactgaacctgccacatgttttcctagtacacagaagcctaccgagcccagtgttcctgtacagccactactgccagagagtctagcgcgttcactgctcccttctacggagtatcagaaacagctactcgcggctcaggtccagctccagtgttcacctgcagagttgcaggctgaacttcttcactcccaggcgagactggccgaactggaggctcaagttcgcaagctagagcttgagcgcgcacaacatgagcttttgctcgggagcctccagcaacagcaccaggctgaccttgagctgattgagtccgcacaccggtccaggattaaggtgctggaaacctcataccagcagcgagaagagagattgcggagagagaacgaggagttgagcgctcgctatctgagtcaatgccaggaagcagagcaggctagagctgaactgactgcccagcaccagcgtcgtttagccgctattgcacaggaaaaagaccaggaaatggagaggttacgggaactacagagggctagcattctggacatgaggcgcgaccacgaagaacaactacagaggctcaagctgctcaaggacagggaggtggatgccgctacctccgcaacttcgcatacccggagcctcaattccattatccatcagatggagaaattctcttcctctctacacgagctttcctcccgggtcgaggcctctcacctgacaacttcacaggaacgggagctgggcattaggcagagggacgagcagctccgagcgcttcaggagcgactcggccagcagcagcgcgatatggggcgtgatgaggagggctccttatgtgctgcccacctccctaaagcccagctgtccggatacgcggtggaggccacccgtaaccaatctcaattgcaacgatttctatag

SEQ ID NO: 36970 - DNA, 3405 bp, Artificial Sequence
  derived and/or modified sequence
atggcaccaaaaacaaagaaagggtgtaaggttacacttccggagaagccggttaagctggcatcccacaccagggacacaactggggtcagccagatgtttccttcgtccaaggctaggaccaagtctctcttaggggacgatgtcttcagcacgatggctggcctggaggaggcagatgcagaggtttccgggatctccgaagccgatccccaggctctgcttcaggccatgaaggatctcgatgggatggatgcggatattctgggcctgaagaagtcaaactcagccccttctaaaaaggccgctaaagatcccggaaagggtgagctgccaaatcaccctaagccggctgggggtgccattcccactaagaagagcctgcccagccctagttctagcgggcaccagaacagacgcttttccagcgaggacctcgaagatcctctgcggggactcctgtcatatgatgagggcggaatcactaagcagccccctgtgacacagtccaagaccgccagtgataaatctccgtctactgttagagatcagggaccatcaatcccactcacacccggagatacaccaattcgaaagaaggaggaactgctgttcgatgacggcgacgacatcatggccacgctgggatttggcgatagtcccaaagccgaaaaaagacagattggggatcaagaggggccacgcccagccaggtccaccctggacgaactactggggagggggatggcgactaaactgctggcccgacctggcacaggagagcaccgcgagttcaaattggacaagaagtatcagaggccacaagattccgaggatatgtggggtgatgaagattttacctttggagcctaccagccaactgtggtctcctccgagggacggcagtctagacgacagagcgtgagtaggttcttcgcagatagtggggctgacccaaaaggagaaccagggagcaagcagtctcccccaatggcttcctcacctattcagccgcgtaaaggtggtgccgattggctgggtctcaaggacgaagatctagatttgttccctgcctcacccacccgcgaggcccacagggaatcctctgttcccgttacgccgtcagtaccaccgcctgcttctcaacattccacccctgctggtcttccacccagcagggctaaaccccctacagaaggggctgggagccccgcaaaagccagccaggcttctaagctgcgagcgtcaaaagaggagaaagaggactggttgtcccatgcgctgtcacggaaaaaatcccaaggactcgctcgagaacaacacgcgggtacaagcgaaggcctgcacctcgcagggactgcaggacaccctccgagcggaagccagcccctgactagtactcagggtctcgaacacgccgctgcgggtggaagcagcggaactaccgcgcgagagaggccatgtgttaggcctggcgtcagcgggtcaccagtgacccagaaccacgcggcttcggccctgcccacgggctcacctaagaggggaactgccccaggcgatctctctgcgacggaaccagcgacatgttttccaagtacgcagaaaccaacagagccctcagttcccgtacagcccctcctgccagagtccttagccagaagtctgttgcctagcactgagtatcagaagcagctgttagccgcacaggtacagctgcaatgctcacctgcggagcttcaagcagaactactgcactctcaggctaggcttgctgaattagaagcccaagtgagaaaattggaactggaaagagctcagcacgaactattactggggagcctacaacagcagcatcaggcggatctcgaactcatagaaagtgcacaccgctcgaggattaaagtgctcgagacttcttatcagcaaagagaagaacggttgcggagggaaaacgaggaactttcggctagatatctgagtcaatgccaggaggccgaacaggccagagcagaactaacggcgcagcatcagcgtcggctcgccgctattgcccaagagaaagatcaggaaatggaacgtttgagagagcttcagagggcaagtatcttagacatgagaagagatcacgaggaacagctacagcggttgaaacttctgaaggaccgggaagttgacgcggctacctcagccaccagccatacaaggtcattgaacagcatcattcaccagatggaaaaattcagctcttctctccatgaactgtcaagtcgggtggaagcttcccatttaactacctctcaagagcgcgaattgggtattaggcaacgagacgagcaacttcgggcactgcaggagcggctcgggcagcaacagagggatatggaggaggaacggtcccgacagcaagaggtcattggaaaaatggaggccaggctcaacgagcagtctagattgctcgaacaggagcgatggagggtgaccgccgagcagtcaaaagcagagtccatgcagcgggcattggaggaacagagaaaggtgaccgcccaacagatggctatggagcgcgctgagttagagagggccaagtccgctctgctggaggagcagaaaagcgtaatgctcaaatgcggcgaggagcgcaggcggcttgctgctgaatgggcggaattcagtgcacagcagaaattaagcaaagaaagagctgagagggaggcggaacgcgctctccaggtggacacccagagagagggaacactgatttctttggctaaagagcaagccgagctgaaaatccgtgcatccgagctgcgcgctgaggagaagcagctcgctgccgaaagagctgctttggagcaggagaggcaggagcttagactggaaaaagaacggatcaatgccacagcgctcagggttaaactccgcgcagaggaggttgaatccatgagtaaggtcgcctcagagaaatacgaagagggcgagcgcgcactgcgtgaggcccagcaagtgcaggccgaacaacaggccaggttgcaggccgtgcagcaacaacaggaaaggctgcgcaagcaggagcagcatatgcatcaagagcatctttccctcgcacagcagcgtctgcagctggacagggccaggcaggatttgccatcctccctggtgggtctgttccccagagcacagggaccagcggcatcctctcagtccgcactaatgcctccagcccctaccactcggtggtgtagtcagccccctacaggtctagacccctctccgctgcacctccatgcccgtctagctctcttacgccacatggctgagcaggatagggacttccttgagaacgaacaattcttcttggagacacttaagaaagggtcatacaatctgacctcacattccgcctag

SEQ ID NO: 36971 - DNA, 3444 bp, Artificial Sequence
  derived and/or modified sequence
gcaccaaagaccaaaaagggctgtaagggaagcattgatgacttcctaggggacttattaggagatgatatgaccttacctgaaaagccagtaaaattggcaagtcacacaagggacaccacgggggtctcgcagatgtttccaagttcgaaggccagaaccaaatccttgctgggcgacgatgtctttagcactatggcaggattagaggaggcagacgcagaagtgtccggtattagtgaagctgacccacaggccctgttgcaggccatgaaagacttggatgggatggatgccgacattctgggactaaagaagtccaatagcgcgccttctaagaaagcagcaaaagacccgggaaagggcgaacttcccaatcacccaaagcctgcaggaggtgccattcccaccaagaagtcactgccttctccatcatcttcaggccaccagaataggaggttcagttccgaggacctggaggaccctttgcggggtctcctaagctacgacgagggaggcattacgaagcagccccctgtgacccagtcaaaaaccgcctcggacaaatcgccaagcactgtgcgcgaccagggtcctagcattcctttgacccctggtgacactccgattaggaagaaggaagagctgctgttcgacgatggcgatgacatcatggccacactgggcttcggcgatagtccgaaggccgagaaaagacagataggggatcaggagggacccagacccgctcggagtacactggatgaattgctgggaagaggaatggctacaaagcttctggccaggcccggtaccggagaacacagagaattcaagctggacaaaaagtaccaacggccacaagactccgaggatatgtggggcgatgaggacttcacctttggagcttaccagcccactgtggtatcaagcgagggaagacaatctagaaggcagtccgtgtcccgattcttcgcggatagtggcgctgatcctaagggcgagcctggatccaaacagagtcctcctatggcaagttctccaatccaacccaggaaaggaggcgctgactggttagggctgaaggacgaggacctagacctgttccctgccagtcctacaagagaggcccatagggaaagttccgtccccgtgacaccttcagttccccctccggcaagtcagcacagcacccccgctgggctgcccccaagtcgcgctaaaccccctacagaaggagcaggctccccggcaaaagcaagtcaagcctccaaattacgcgcatccaaggaagagaaggaggactggctatctcacgctctcagccggaagaaaagtcaaggactcgcacgcgaacaacacgcaggcaccagcgaggggctgcacctcgcgggaactgctggtcaccccccttcgggctctcagccacttacatcaacgcagggtctggagcatgcagctgctggaggctcttccggcactaccgccagggagaggccttgcgtcaggcctggagtctcagggagccccgtgacccagaatcacgctgccagcgcactgcctactggctcccccaagagaggtacagcacctggcgacctttcagctactgagcccgcaacatgttttcctagcactcagaagccgactgaacccagtgtgcccgtgcagcccttactgccagaatctcttgccagaagcctgcttccctcgaccgagtaccagaaacagctgctggccgctcaagtccagctacagtgttcccctgccgagttgcaagctgagttgctacacagccaagcgaggttggccgaactggaagcacaggtgaggaagcttgagttggagcgagcccagcacgagcttcttctcgggtccctgcagcagcagcaccaagctgacctggagctgattgaatctgctcatcgttcacgaattaaggtccttgaaacctcataccagcaaagagaggagcgcctgcgaagggaaaatgaggagctgagcgcacggtatctgagtcagtgccaagaggcggaacaagcgcgtgccgaactgaccgcccaacatcagcggcgactggctgccattgcccaggagaaagatcaagaaatggaacgactgagagagctccagagggccagcattctcgacatgcgcagagaccacgaagaacagttgcaaaggctcaagctattgaaggacagggaggtggatgcagcaacctctgccacctcacatacccgaagtctgaactcaatcattcatcagatggagaagttcagcagttctctccatgagctttccagcagggtagaggcatcccatctcacaacgtcccaggaacgggaattgggtatccgccagcgcgatgagcagctgcgcgctctccaagagagactggggcagcagcagagggacatggaggaggaacgatcccgacagcaagaagtgataggtaagatggaagctcgactgaacgaacagagcaggcttcttgagcaggagcgatggagagtgaccgcagaacagagtaaggctgaatccatgcagagggcacttgaagagcagcggaaggtgacagcccaacaaatggcgatggagcgagccgagttagaaagggcaaaatctgctcttcttgaagaacagaagtctgtgatgttgaagtgcggcgaggagagacgcaggctggcagcggagtgggccgaattttccgcccagcagaaactgagtaaggagcgcgctgagagggaggctgaaagggccctccaggtggacacccagcgagagggcacacttatcagcctggccaaagagcaggccgagctgaagatccgcgcatcagaattgagagcagaggagaagcagctggccgcagagcgagctgcattggagcaagagagacaggaattgcgattagaaaaagaacggatcaatgcaacggccctgagggtgaaactgcgggcagaggaggtagagtcaatgtcaaaggtggccagcgaaaagtacgaggagggtgagcgggctctgcgggaggcccagcaagtgcaggctgagcagcaggccagactacaggccgtgcagcagcagcaagaaagactgcgcaaacaggaacagcatatgcaccaggagcatctgtccctcgcccagcagcgtctgcagctggaccgggctcgacaggacctgccatctagcctggtcgggctcttccctagagctcagggcccagccgcaagtagtcagtctgctttgatgccacccgctccaaccacacggtggtgtagtcaaccacctacgggcctcgaccctagccctcttcacctgcatgccaggttggcactcttacggcacatggcagagcaggatcgtgactttctagagaacgaacagttctttttggagaccctgaagaaaggtagctacaacctaaccagccacagtgcatag

SEQ ID NO: 36972 - DNA, 378 bp, Artificial Sequence
  derived and/or modified sequence
atggggattttccagctattgcgggaccggaggatttccagtaggggacccggactgcacactcccaaggctgaaccccgccgccgtaagggactgacaacaggtctgatgacacaggcagagcggcaaaagcaagctcatcagcgtcaggcaaccatgcgcgagaccgcactgtggtgcaccggccacattagaccacgcacccatatgcataccggcacacacacccagaccgacagagagcgggagcgcaacacacagcgcctcagagacagagaacggcgcgagaatggcagacacacacatattcatactcagacccaccgacagtcattgattgccaaggccctgaaggatacgcatcccggcaacccttag

SEQ ID NO: 36973 - protein, 271 aa, Artificial Sequence
  derived and/or modified sequence
MLQACKMEGFPLVPPQPSEDLVPYDTDLYQRQTHEYYPYLSSDGESHSDHYWDFHPHHVHSEFESFAENNFTELQSVQPPQLQQLYRHMELEQMHVLDTPMVPPHPSLGHQVSYLPRMCLQYPSLSPAQPSSDEEEGERQSPPLEVSDGEADGLEPGPGLLPGETGSKKKIRLYQFLLDLLRSGDMKDSIWWVDKDKGTFQFSSKHKEALAHRWGIQKGNRKKMTYQKMARALRNYGKTGEVKKVKKKLTYQFSGEVLGRGGLAERRHPPH

SEQ ID NO: 36974 - DNA, 1168 bp, Artificial Sequence
  derived and/or modified sequence
ccgaggcaggggatctgaccgactcggagcccggctggatgttacaggcgtgcaaaatggaagggtttcccctcgtcccccctcagccatcagaagacctggtgccctatgacacggatctataccaacgccaaacgcacgagtattacccctatctcagcagtgatggggagagccatagcgaccattactgggacttccacccccaccacgtgcacagcgagttcgagagcttcgccgagaacaacttcacggagctccagagcgtgcagcccccgcagctgcagcagctctaccgccacatggagctggagcagatgcacgtcctcgatacccccatggtgccaccccatcccagtcttggccaccaggtctcctacctgccccggatgtgcctccagtacccatccctgtccccagcccagcccagctcagatgaggaggagggcgagcggcagagccccccactggaggtgtctgacggcgaggcggatggcctggagcccgggcctgggctcctgcctggggagacaggcagcaagaagaagatccgcctgtaccagttcctgttggacctgctccgcagcggcgacatgaaggacagcatctggtgggtggacaaggacaagggcaccttccagttctcgtccaagcacaaggaggcgctggcgcaccgctggggcatccagaagggcaaccgcaagaagatgacctaccagaagatggcgcgcgcgctgcgcaactacggcaagacgggcgaggtcaagaaggtgaagaagaagctcacctaccagttcagcggcgaagtgctgggccgcgggggcctggccgagcggcgccacccgccccactgagcccgcagcccccgccgggccccgccaggcctccccgctggccatagcattaagccctcgcccggcccggacacagggaggacgctcccggggcccagaggcaggactgtggcgggccgggcctcgcctcacccgccccctccccccactccaggccccctccacatcccgcttcgcctccctccaggactccaccccggctcccggacgccagctgggcgtcagaccccaccggggcaaccttgcagaggacgacccggggtactgccttgggagtctcaagtccgtatgtaaatcagatctcccctctcacc

SEQ ID NO: 36975 - DNA, 816 bp, Artificial Sequence
  derived and/or modified sequence
atgctgcaagcgtgtaaaatggagggtttccctctggtccccccccaaccttcagaagacctggttccctatgatacagacctctaccagcggcaaacccacgagtactatccctacttaagttccgacggggagagtcacagtgatcattactgggattttcatcctcaccatgtgcactctgagtttgagtcatttgccgaaaacaattttacagaactgcagtcggtgcagcctccacagctacagcagctgtacagacacatggaactcgaacaaatgcacgttctggacaccccaatggtccccccccacccaagtctggggcaccaagtgtcatatcttccaaggatgtgtcttcaataccccagcttatctccagcacagcccagcagcgacgaagaggaaggtgagcggcagtcgccgcctcttgaagtgagcgatggggaggccgacggtctcgagcctggaccaggtctgctccccggcgagactgggtctaagaaaaaaattaggttataccagttccttctcgatttgctgcggtctggagacatgaaggactctatttggtgggtggacaaggacaaagggacatttcagttctcatctaagcataaagaggccctcgcacatcgttggggcattcagaagggaaacagaaagaagatgacttatcaaaagatggcccgggccttgcgcaattacggcaagaccggagaggtcaagaaggtgaagaagaagttaacgtatcaattctcaggtgaagtactggggagaggtggactggcagagcggagacatcctccacactag

SEQ ID NO: 36976 - DNA, 816 bp, Artificial Sequence
  derived and/or modified sequence
atgctgcaggcctgcaagatggagggcttccccctggtgcccccccagcccagcgaggacctggtgccctatgacacagacctgtaccagaggcagacccatgagtactacccctacctgagcagtgatggagagagccacagcgaccactactgggacttccacccccaccacgtgcacagcgagtttgagagctttgctgagaacaacttcacagagctgcagagcgtgcagcccccccagctgcagcagctgtaccgccacatggagctggagcagatgcacgtgctggacacccccatggtgcccccccaccccagcctgggccaccaggtgtcctacctgcccaggatgtgcctgcagtaccccagcctgagccctgcccagcccagcagtgatgaggaggagggggagcggcagagcccccccctggaggtgtctgatggagaggctgatggcctggagcccggccctggcctgctgcccggggagaccggcagcaagaagaagatccggctgtaccagttcctgctggacctgctgcggagcggggacatgaaggacagcatctggtgggtggacaaggacaagggcaccttccagttcagcagcaagcacaaggaggccctggcccaccgctggggcatccagaagggcaacaggaagaagatgacctaccagaagatggcccgggccctgaggaactacggcaagacaggagaggtgaagaaggtgaagaagaagctgacctaccagttcagcggggaggtgctgggccggggcggcctggccgagcggcggcaccccccccactag

SEQ ID NO: 36977 - DNA, 816 bp, Artificial Sequence
  derived and/or modified sequence
atgctgcaggcctgcaagatggagggcttccccctggtgcccccccagccatctgaggacctcgtcccttacgacaccgatctctatcagcgccaaacccatgaatattatccatatttatcgtctgacggcgagtcgcattccgatcactattgggacttccatccacaccacgtgcactccgaattcgagtctttcgctgaaaacaattttacggaattacaatcagtccagccaccacagctgcagcagctgtacagacatatggagctagagcaaatgcacgtgcttgacacaccaatggttccaccgcatccatcactgggacaccaggtatcctatctaccacgcatgtgcctccagtacccatccctgagtcctgctcagccctccagtgacgaagaggaaggcgagaggcagtcaccacccctcgaagtctccgacggagaagccgatggcctcgagcctggccctgggctcctacccggagagaccggatcaaagaagaaaatccgcctgtatcagtttcttctggacttactgcgcagtggagatatgaaggattctatctggtgggtcgataaagataaggggacattccaattctcctctaagcataaggaggcattagctcaccggtggggcattcagaagggaaaccgaaaaaagatgacttaccagaaaatggcacgagctttgcgaaactatggcaaaacgggtgaagtgaagaaggtgaagaaaaaactgacttaccagttttcaggcgaagttctgggacgaggcggactggctgagaggaggcacccaccacattag

SEQ ID NO: 36978 - DNA, 816 bp, Artificial Sequence
  derived and/or modified sequence
atgcttcaggcgtgtaaaatggagggattcccgctcgtgcccccacagcctagcgaggatttagtcccctacgatacagatctataccagagacagacacatgagtactatccttacctttcgtctgatggcgaaagccatagcgaccattactgggacttccatccacatcacgttcactcggagtttgaatcatttgctgagaataacttcacagagcttcaaagcgttcagccaccacagctgcagcagctttataggcatatggagttagaacagatgcacgtgctggacacgcctatggtgcccccacacccctcactcggtcatcaggtctcatatttgccacggatgtgtctgcagtatcctagcctgagccctgcgcagccgtcatctgatgaagaggaaggtgagcgtcagagcccaccactggaagtgtccgacggggaagctgatgggctggagcccggtcctggcctgctgcctggtgaaaccggttctaagaagaagatccggctgtatcaatttctcttggacctgctacgaagtggcgacatgaaggactccatctggtgggtagataaggacaagggtacattccagttctcatcaaaacacaaggaggcattggctcatcggtggggaatccagaaaggaaacaggaagaaaatgacataccagaagatggctagggccctgagaaattatgggaaaacaggggaagtgaaaaaagtgaaaaaaaagctgacctaccagttcagcggggaggtgctcgggaggggcggactggcagagaggagacatccaccacattag

SEQ ID NO: 36979 - DNA, 816 bp, Artificial Sequence
  derived and/or modified sequence
atgctgcaggcctgcaagatggagggcttccccctggtgcccccccagcccagcgaggacctggtgccctacgacaccgacctgtaccagagacagacccacgagtactacccctacctgagcagcgacggcgagagccacagcgaccactactgggacttccacccccaccacgtgcacagcgagttcgagagcttcgccgagaacaacttcaccgagctgcagagcgtgcagcccccccagctgcagcagctgtacagacacatggagctggagcagatgcacgtgctggacacccccatggtgcccccccaccccagcctgggccaccaggtgagctacctgcccagaatgtgcctgcagtaccccagcctgagccccgcccagcccagcagcgacgaggaggagggcgagagacagagcccccccctggaggtgagcgacggcgaggccgacggcctggagcccggccccggcctgctgcccggcgagaccggcagcaagaagaagatcagactgtaccagttcctgctggacctgctgagaagcggcgacatgaaggacagcatctggtgggtggacaaggacaagggcaccttccagttcagcagcaagcacaaggaggccctggcccacagatggggcatccagaagggcaacagaaagaagatgacctaccagaagatggccagagccctgagaaactacggcaagaccggcgaggtgaagaaggtgaagaagaagctgacctaccagttcagcggcgaggtgctgggcagaggcggcctggccgagagaagacaccccccccactag

SEQ ID NO: 36980 - protein, 552 aa, Artificial Sequence
  derived and/or modified sequence
MDNKISPEAQVAELELDAVIGFNDIILWDYKNRELLARLSLHKGKIEALAFSPNDLYLVSLGGPDDGSVVVWSIAKRDAICGSPAAGLNVGNATNVIFSRCRDEMFMTAGNGTIRVWELDLPNRKIWPTECQTGQLKRIVMSIGVDDDDSFFYLGTTTGDILKMNPRTKLLTDVGPAKDKFSLGVSAIRCLKMGGLLVGSGAGLLVFCKSPGYKPIKKIQLQGGITSITLRGEGHQFLVGTEESHIYRVSFTDFKETLIATCHFDAVEDIVFPFGTAELFATCAKKDIRVWHTSSNRELLRITVPNMTCHGIDFMRDGKSIISAWNDGKIRAFAPETGRLMYVINNAHRIGVTAIATTSDCKRVISGGGEGEVRVWQIGCQTQKLEEALKEHKSSVSCIRVKRNNEECVTASTDGTCIIWDLVRLRRNQMILANTLFQCVCYHPEEFQIITSGTDRKIAYWEVFDGTVIRELEGSLSGSINGMDITQEGVHFVTGGNDHLVKVWDYNEGEVTHVGVGHSGNITRIRISPGNQYIVSVSADGAILRWKYPYTS

SEQ ID NO: 36981 - DNA, 1659 bp, Artificial Sequence
  derived and/or modified sequence
atggacaacaagatcagccccgaggcccaggtggccgagctggagctggacgccgtgatcggcttcaacgacatcatcctgtgggactacaagaacagagagctgctggccagactgagcctgcacaagggcaagatcgaggccctggccttcagccccaacgacctgtacctggtgagcctgggcggccccgacgacggcagcgtggtggtgtggagcatcgccaagagagacgccatctgcggcagccccgccgccggcctgaacgtgggcaacgccaccaacgtgatcttcagcagatgcagagacgagatgttcatgaccgccggcaacggcaccatcagagtgtgggagctggacctgcccaacagaaagatctggcccaccgagtgccagaccggccagctgaagagaatcgtgatgagcatcggcgtggacgacgacgacagcttcttctacctgggcaccaccaccggcgacatcctgaagatgaaccccagaaccaagctgctgaccgacgtgggccccgccaaggacaagttcagcctgggcgtgagcgccatcagatgcctgaagatgggcggcctgctggtgggcagcggcgccggcctgctggtgttctgcaagagccccggctacaagcccatcaagaagatccagctgcagggcggcatcaccagcatcaccctgagaggcgagggccaccagttcctggtgggcaccgaggagagccacatctacagagtgagcttcaccgacttcaaggagaccctgatcgccacctgccacttcgacgccgtggaggacatcgtgttccccttcggcaccgccgagctgttcgccacctgcgccaagaaggacatcagagtgtggcacaccagcagcaacagagagctgctgagaatcaccgtgcccaacatgacctgccacggcatcgacttcatgagagacggcaagagcatcatcagcgcctggaacgacggcaagatcagagccttcgcccccgagaccggcagactgatgtacgtgatcaacaacgcccacagaatcggcgtgaccgccatcgccaccaccagcgactgcaagagagtgatcagcggcggcggcgagggcgaggtgagagtgtggcagatcggctgccagacccagaagctggaggaggccctgaaggagcacaagagcagcgtgagctgcatcagagtgaagagaaacaacgaggagtgcgtgaccgccagcaccgacggcacctgcatcatctgggacctggtgagactgagaagaaaccagatgatcctggccaacaccctgttccagtgcgtgtgctaccaccccgaggagttccagatcatcaccagcggcaccgacagaaagatcgcctactgggaggtgttcgacggcaccgtgatcagagagctggagggcagcctgagcggcagcatcaacggcatggacatcacccaggagggcgtgcacttcgtgaccggcggcaacgaccacctggtgaaggtgtgggactacaacgagggcgaggtgacccacgtgggcgtgggccacagcggcaacatcaccagaatcagaatcagccccggcaaccagtacatcgtgagcgtgagcgccgacggcgccatcctgagatggaagtacccctacaccagctag

SEQ ID NO: 36982 - DNA, 1659 bp, Artificial Sequence
  derived and/or modified sequence
atggataataagatttctccagaagctcaggtggctgagctagagttagatgccgtgatcggatttaatgacatcattctttgggactacaaaaacagggagctcctcgcgcgcctgtccttgcacaaagggaaaatcgaggctctggcattttcgcctaacgatctgtacttagtgtccctgggcgggcccgatgatggctcagtggtggtatggagcatagctaaacgcgatgctatctgtggctcccccgcggccggactgaacgtaggaaatgcgacaaatgtgatcttcagcagatgccgagatgagatgttcatgactgcgggcaacggtacaatcagggtctgggagttggatctacccaacagaaagatctggcccacagagtgccagacaggccaactgaagagaattgtgatgagcataggggtcgatgatgatgactccttcttttatcttggaactacaaccggggatatcctgaaaatgaaccctcggactaagctgttaaccgacgtggggcctgctaaggacaaattcagcctgggagtgtcggccattagatgtcttaagatgggtggtctgctggtggggtctggggcagggctgctcgtattttgtaagagtccaggctacaaaccaataaagaagatccaactgcagggaggtattacgtcgataacactgcgaggcgaggggcatcaatttctcgtggggacagaagaaagccacatctacagagtgtccttcaccgattttaaagagacactcattgctacatgtcactttgacgccgtggaagatatcgtttttcccttcggcaccgccgagctgttcgcaacctgtgctaagaaagacattcgcgtgtggcatacatcaagcaaccgcgagctgcttaggataacagtcccgaatatgacttgtcacggcatcgatttcatgagagatgggaaatccatcatctctgcttggaacgatggaaagattcgagcctttgccccggaaactggcaggctgatgtatgtgataaacaacgctcacaggatcggggtgacagctatagcgaccacaagcgactgcaagcgggtcattagtggtggaggggaaggcgaggttagggtttggcaaatcggctgccagactcaaaagctcgaggaggctctgaaggagcataagagttcggttagctgcatcagggtcaaacgcaataacgaggagtgcgtgactgcatctacagatgggacgtgcatcatttgggatctcgtgaggctccggcggaatcaaatgattctggccaacacactgtttcagtgcgtgtgctatcaccctgaggagtttcaaataataacttctgggacagaccgtaagatcgcctattgggaggtttttgatgggacagtgattagagaacttgaaggtagcttgagtggaagtataaatggtatggacatcacacaggagggtgtgcatttcgtgaccggaggtaatgatcacctggttaaggtttgggattataatgagggtgaagtgacacatgtgggcgtaggccactctgggaacatcaccagaatccgcatctctccagggaatcaatatattgtgtctgtgagtgcagacggcgccattctgcgctggaaatacccatatacctcatag

SEQ ID NO: 36983 - DNA, 1659 bp, Artificial Sequence
  derived and/or modified sequence
atggacaacaagatcagccctgaggcccaggtggccgagctggagctggatgctgtgattggcttcaatgacatcatcctgtgggactacaagaaccgggagctgctggcccggctgagcctgcacaagggcaagattgaggccctggccttcagccccaatgacctgtacctggtgtccctgggcggcccagatgatggctctgtggtggtgtggagcatcgccaagagagatgccatctgtggcagccctgctgctggcctgaatgtgggcaatgccaccaacgtcatcttcagccgctgcagagatgagatgttcatgacagctggaaatggcaccatccgggtgtgggagctggacctgcccaacaggaagatctggcccacagagtgccagacaggccagctgaagagaattgtgatgagcattggagtggatgatgatgacagcttcttctacctgggcaccaccaccggggacatcctgaagatgaaccccaggaccaagctgctgacagatgtgggccctgccaaggacaagttcagcctgggcgtgtctgccatccgctgcctgaagatgggcggcctgctggtgggcagcggggccggcctgctggtgttctgcaagagccctggctacaagcccatcaagaagatccagctgcagggcggcatcaccagcatcaccctgcggggggagggccaccagttcctggtgggcacagaggagagccacatctacagagtgtccttcacagacttcaaggagaccctgattgccacctgccactttgatgctgtggaggacatcgtgttccccttcggcacagctgagctgtttgccacctgtgccaagaaggacatccgggtgtggcacaccagcagcaaccgggagctgctgcgcatcaccgtgcccaacatgacctgccacggcatcgacttcatgagagatggcaagagcatcatcagcgcctggaatgatggcaagatccgggcctttgcccctgagaccggccgcctgatgtatgtgatcaacaatgcccaccgcatcggcgtgacagccatcgccaccaccagtgactgcaagagggtcatcagcggcggcggggagggggaggtgcgggtgtggcagatcggctgccagacccagaagctggaggaggccctgaaggagcacaagagctctgtgtcctgcatccgggtgaagagaaataatgaagaatgtgtgacagccagcacagatggcacctgcatcatctgggacctggtgcggctgcggaggaaccagatgatcctggccaacaccctcttccagtgtgtgtgctaccaccctgaggagttccagatcatcaccagcggcacagacaggaagatcgcctactgggaggtgtttgatggcaccgtcatccgggagctggagggcagcctgagcggcagcatcaatggcatggacatcacccaggagggcgtgcactttgtgactggaggaaatgaccacctggtgaaggtgtgggactacaatgaaggagaggtgacccacgtgggcgtgggccacagcggcaacatcacccgcatccgcatcagccctggcaaccagtacatcgtgtctgtgtctgcagatggagccatcctgcgctggaagtacccctacaccagctag

SEQ ID NO: 36984 - DNA, 1659 bp, Artificial Sequence
  derived and/or modified sequence
atggacaacaagatcagccccgaggcccaggtggccgagctggagctcgacgccgttattgggtttaacgatatcatcctgtgggactacaaaaaccgagaactgttggctcgcttaagtcttcataagggcaagatcgaggcactggcattcagtccgaatgacctgtaccttgtatccctcggtggaccggacgatggatcagtggttgtgtggagtatagccaagcgcgacgccatctgcgggtctcctgccgctggactcaatgtcgggaacgccactaatgttatcttctccaggtgtagagatgagatgttcatgactgctggcaatgggaccattagggtttgggaactggacctgccaaacagaaaaatttggcctactgaatgtcagacaggccagttgaagcgcattgtgatgtccattggggttgatgacgacgacagcttcttttatctagggaccaccacaggcgatatcctaaagatgaatccaagaactaaactgctgacagacgtagggcccgctaaggacaaattctcccttggcgtaagtgctatccgttgtctgaagatgggagggctcttagttgggagcggggcaggactgctcgtgttctgtaagtctcctggatacaaaccgattaagaagatccagctgcaggggggtattaccagcattactctccgaggagaagggcatcagttcttagtgggaactgaggagtctcatatctaccgagtttcattcaccgactttaaagaaaccttaatcgctacatgccatttcgacgccgtggaagatatcgtctttcccttcgggacggcggagctgttcgccacgtgtgcaaagaaagacatccgggtgtggcacacttccagcaaccgggagctcctccgaataaccgtccccaacatgacttgccatgggattgacttcatgagggacggtaagagcattattagtgcatggaatgacggtaagatccgagcttttgctccggaaacagggcgtctgatgtatgttattaacaatgcccatcgcataggcgtcacggcgatcgcgactaccagcgactgtaagcgggtgatttccggtggcggcgaaggcgaagtgcgggtgtggcagataggctgtcagacacaaaagttggaggaagccctgaaggagcacaaaagcagtgtgagttgcatccgtgtcaagcgtaacaacgaggagtgcgtgacagcatccaccgacggcacatgcatcatctgggacttagtgcgactgagacgtaaccaaatgatcctagctaacactctgttccagtgcgtctgctatcacccagaggagtttcaaatcatcaccagcggtaccgacaggaagattgcatattgggaggtttttgatggaacggtaattagggagctggaaggttctctgtcgggcagcattaatggaatggatatcactcaggagggagtgcacttcgtcactggcggaaatgaccacctggtgaaagtctgggattataatgaaggcgaagttacacacgtaggagtgggacattcaggcaatatcacacgtatccgaattagccctgggaaccagtacattgtgagcgttagcgccgatggagccatcttgcggtggaaatatccatacacctcctag

SEQ ID NO: 36985 - DNA, 1659 bp, Artificial Sequence
  derived and/or modified sequence
atggataacaagatctcccctgaggctcaagtcgcagaactcgagctagacgctgtgatcggttttaacgacattattctttgggattataagaatagggagctactcgcccgactgagtttacacaaaggtaaaattgaggctctcgcctttagtcctaacgatctgtatttagtcagcttaggtggtcctgatgatggctctgtggttgtgtggagcatcgccaagagggacgccatctgcggcagtcccgctgctggcctgaacgtgggaaacgccacaaatgtgatctttagtcgttgtagggacgagatgttcatgaccgccggaaacggtaccatccgtgtctgggaacttgatttaccaaaccgcaagatctggcccacagagtgccagaccggacagctgaaacgtatcgtgatgagcattggggtcgatgacgacgattcctttttctacttggggaccactactggagacatcctcaaaatgaaccctcggaccaaattgctgacggatgttggaccagcgaaagataagttctctctgggcgtgagcgccatccgatgccttaagatggggggtcttctcgtcggctccggggcaggtcttctggttttttgtaaaagtcctggctacaaacccatcaaaaagatccagcttcaggggggtattacctcaataaccctgaggggcgaggggcaccagttcttggtcggcacagaagagtcccacatatatagggtaagcttcactgatttcaaagaaaccctcatcgctacctgccactttgatgctgtagaggacatagtctttcccttcggaaccgccgagctgttcgctacttgcgccaagaaggacatccgggtgtggcacactagctcaaatagggagttattgagaatcaccgtgccaaatatgacctgtcatggaatagattttatgcgcgatgggaagtcgattatcagtgcatggaacgacggcaaaatcagagccttcgcccctgaaacggggagactcatgtatgtcattaataacgcgcataggatcggcgtcacagccattgcgacaacctctgattgtaagcgcgttatatccggcggaggtgagggggaggttagagtctggcagattggatgtcagactcaaaagcttgaagaagcactgaaagaacacaagtcttcagtgtcttgtatccgcgtcaaacggaacaacgaggagtgtgtcactgcttctaccgatgggacatgcatcatctgggacttggtgaggctgcggagaaaccagatgatcctggccaatacactctttcagtgtgtgtgctatcacccagaggagttccagatcattacctccgggactgataggaaaattgcctattgggaggtctttgatggtacagtgatccgtgagctggagggatcgctcagcggaagcatcaacgggatggacataacgcaggaaggggttcactttgtcacagggggtaatgatcacttggtgaaggtttgggactataatgagggggaggtaacccatgtgggtgtgggccactctggcaatataacaagaataaggattagcccgggtaaccagtatattgtgtcggttagtgctgatggagctatcttgagatggaagtatccctatactagttag

SEQ ID NO: 36986 - DNA, 1985 bp, Artificial Sequence
  derived and/or modified sequence
gttaccataacgaccagaagacgctgcagccactagggaggagagcaaagtaatcagaacctcccaaggatggataacaaaatttcgccggaggcccaagtggcggagctggaacttgacgccgtgatcggcttcaatgacatcattttgtgggattataagaacagagagctgcttgctcggctgtcccttcacaaaggcaaaattgaagctctggccttttctccaaatgatttgtacttggtatcactaggaggcccagatgacggaagtgtggtggtgtggagcatagccaagagagatgccatctgtggcagccctgcagccggcctcaatgttggcaatgccaccaatgtgatcttctccaggtgccgggatgagatgtttatgactgctggaaatgggacaattcgagtatgggaattggatcttccaaatagaaaaatctggccaactgagtgccaaacaggacagttgaaaagaatagtcatgagtattggagtggatgatgatgatagctttttctaccttggcaccacgactggagatattctaaaaatgaaccccaggactaaactgctgacagatgttgggcctgcgaaggacaaattcagtttgggagtgtcagctatcaggtgcctgaagatggggggtttgttggtgggctctggagccggactgctggtcttctgtaaaagccctggctacaaacccatcaagaagattcagttacaaggcggcatcacttctatcacacttcgaggagaaggacaccagtttctcgtaggaacagaagaatcgcacatttatcgtgtcagcttcacggatttcaaagagacgctcatagcgacttgtcactttgatgctgtcgaggatattgtctttccatttggcactgctgagctatttgcaacctgtgccaagaaggatatcagggtgtggcacacatcatccaacagggagctgctgcggatcaccgtgcccaacatgacctgccacggcatcgacttcatgagggacggcaaaagcatcatttcagcatggaacgacggtaaaatccgagccttcgccccagagacaggccgactgatgtatgtcattaacaatgctcacaggatcggcgtcaccgccatcgccaccaccagtgactgtaaaagggtcatcagtggcggtggggaaggggaggtgagggtatggcagataggctgtcagacccagaagctggaggaggccctgaaggaacacaagtcatcagtgtcctgcattagggtgaagaggaacaacgaggagtgtgtcaccgccagcaccgatgggacttgtatcatttgggaccttgtgcgtctcaggaggaatcagatgatactagccaacaccttattccagtgtgtgtgctatcaccctgaggagttccagatcatcaccagcggaacagacagaaagattgcttactgggaagtatttgatgggacagtaatcagagaattggaaggttccctgtctgggtcgataaatggcatggatatcacacaggaaggggtgcactttgtcacaggtggaaatgaccatctggtcaaagtttgggattataatgagggtgaagtgactcacgttggggtgggacacagtggcaacatcacacgcatccgcataagtccaggaaatcaatatattgttagtgtaagtgccgatggagccattttgcgatggaagtacccatatacctcctgaagctgatgagatgtctctgagccttggcgttgcacgcagtcctgttgaagactgagtttagataactccaacactagtcttcatttctcacagctctgtttttgttcttgagtcaatttttctctttttctttatagaatgcattttatattcttaaattgcatattaaaattgaagtatgttcaagaataatttgtgcagactctaattagaacttttaacattttgaataaattcttagttgttggttttctgtt

SEQ ID NO: 36987 - protein, 766 aa, Artificial Sequence
  derived and/or modified sequence
MGEERWVSLTPEEFDQLQKYSEYSSKKIKDALTEFNEGGSLKQYDPHEPISYDVFKLFMRAYLEVDLPQPLSTHLFLAFSQKPRHETSDHPTEGASNSEANSADTNIQNADNATKADEACAPDTESNMAEKQAPAEDQVAATPLEPPVPRSSSSESPVVYLKDVVCYLSLLETGRPQDKLEFMFRLYDSDENGLLDQAEMDCIVNQMLHIAQYLEWDPTELRPILKEMLQGMDYDRDGFVSLQEWVHGGMTTIPLLVLLGMDDSGSKGDGRHAWTMKHFKKPTYCNFCHIMLMGVRKQGLCCTYCKYTVHERCVSRNIPGCVKTYSKAKRSGEVMQHAWVEGNSSVKCDRCHKSIKCYQSVTARHCVWCRMTFHRKCELSTLCDGGELRDHILLPTSICPITRDRPGEKSDGCVSAKGELVMQYKIIPTPGTHPLLVLVNPKSGGRQGERLNFFRDTPDFRVLACGGDGTVGWILDCIDKANFAKHPPVAVLPLGTGNDLARCLRWGGGYEGGSLTKILKDIEQSPLVMLDRWHLEVIPREEVENGDQVPYSIMNNYFSIGVDASIAHRFHVMREKHPEKFNSRMKNKLWYFEFGTSETFAATCKKLHDHIELECDGVGVDLSNIFLEGIAILNIPSMYGGTNLWGENKKNRAVIRESRKGVTDPKELKFCVQDLSDQLLEVVGLEGAMEMGQIYTGLKSAGRRLAQCASVTIRTNKLLPMQVDGEPWMQPCCTIKITHKNQAPMMMGPPQKSSFFSLRRKSRSKD

SEQ ID NO: 36988 - DNA, 2301 bp, Artificial Sequence
  derived and/or modified sequence
atgggcgaggagcgttgggtcagcctgacccccgaggagttcgatcaactgcagaagtacagcgaatattcatccaaaaaaatcaaggacgctctgaccgagtttaacgagggagggtccctgaagcagtatgacccgcatgagcccataagctatgatgtatttaaactttttatgcgcgcatatctggaagtggacctccctcaaccactgagtacacatcttttcttagctttctcccagaagcctcggcacgaaacttcagatcatccaactgagggtgcatctaacagcgaagccaactccgcggatactaatatacaaaatgccgacaacgcaaccaaggctgacgaagcgtgtgcccctgacacagaaagtaacatggccgagaagcaggcccccgcggaagatcaagtggctgccactccattggaacctcccgtaccacgttctagttcttcagagagccctgtagtgtacctcaaggacgttgtgtgctatctctctctgttagaaacggggcgccctcaggataaactggaatttatgttcagactgtacgatagcgacgaaaatggcttgctggaccaagccgagatggattgcatcgttaatcagatgctgcacatcgcccaatacctggagtgggatccaaccgaacttcgacccattttgaaagagatgctgcaagggatggattacgatcgagatggctttgttagcctccaggaatgggtgcacggcgggatgaccactatcccattgctagtgctgctgggaatggacgatagcgggagcaagggcgatggaaggcacgcatggactatgaagcatttcaagaagcctacatattgtaacttttgtcacattatgctaatgggcgtccgaaagcagggactttgttgcacttattgcaagtacacagtccacgaaagatgtgttagccggaacatccccggatgcgtgaagacatacagtaaggcgaagcggagcggggaggttatgcaacacgcatgggtcgagggcaattctagtgtaaaatgcgacaggtgccataaatcaatcaaatgctatcagagcgtgaccgctaggcattgcgtgtggtgcaggatgacattccatcgaaaatgcgaactcagtactttgtgtgacggaggggaactcagggatcatatcctcctcccgacctcaatctgccccattacccgcgaccgcccaggggaaaagtcagacggatgcgtttccgctaagggcgagctggtaatgcaatacaagataatccctacccctggaacacatccattgttggtcttagttaatccaaagagcggtggtaggcagggcgaaaggctcaacttcttccgggacacccctgacttcagggtcttggcctgcggcggtgacggaaccgtgggatggattctagattgtatcgacaaggccaattttgctaaacaccctcccgtcgccgtgctccccctgggtaccggtaacgatctggccagatgcctgagatggggtggcggctacgagggggggtctttgactaagatattgaaggatattgagcagagtcccctggtgatgttagataggtggcacctggaagtcattccccgcgaggaagtcgaaaacggtgatcaggtgccttacagcataatgaacaactacttttcaataggggttgacgcatcgattgcccataggttccatgtcatgcgagagaagcatccagaaaagtttaactctagaatgaagaacaaactttggtatttcgagtttggcacctccgaaacctttgctgcaacctgtaagaaactgcacgaccacatcgagctggaatgcgacggcgtcggagtggatcttagcaatatatttctggaaggtatcgcaattctgaatatcccgagcatgtacggcggcaccaatctctggggggagaacaagaagaaccgggccgttatcagggagagccggaaaggtgtaactgatcccaaggagctgaaattctgtgtgcaggacttatcggatcagctgctcgaggtggtgggcctggagggagctatggagatgggccagatctacaccgggctgaaatccgcagggcgaagactggcccaatgtgcatcagtgacaatccgaaccaataaactgctgccaatgcaagtggatggagagccttggatgcagccctgttgtacaatcaaaataacccacaaaaaccaggcaccaatgatgatgggccctccgcagaagagctcttttttctccctgcggcgcaagtcccgatctaaagattag

SEQ ID NO: 36989 - DNA, 2301 bp, Artificial Sequence
  derived and/or modified sequence
atgggagaggagcgctgggtgtccctgaccccagaggagtttgaccagctgcagaagtacagcgagtacagcagcaagaagatcaaggatgccctgacagagttcaatgaaggaggcagcctgaagcagtatgacccccatgagcccatctcctatgatgtgttcaagctgttcatgagggcctacctggaggtggacctgccccagcccctgagcacccacctgttcctggccttcagccagaagcccaggcatgagaccagtgaccaccccacagagggcgccagcaacagcgaggccaacagcgctgacaccaacatccagaatgctgacaatgccaccaaggcagatgaggcctgtgccccagacacagagagcaacatggccgagaagcaggccccagctgaggaccaggtggccgccacccccctggagccccctgtgcccaggagcagcagcagcgagagccctgtggtgtacctgaaggatgtggtgtgctacctgagcctgctggagaccggccggccccaggacaagctggagttcatgttccggctgtatgacagtgatgaaaatggcctgctggaccaggccgagatggactgcatcgtgaaccagatgctgcacatcgcccagtacctggagtgggaccccacagagctgcggcccatcctgaaggagatgctgcagggcatggactatgacagagatggctttgtgtccctgcaggagtgggtgcatggaggcatgaccaccatccccctgctggtgctgctgggcatggatgacagcggcagcaaaggagatggaagacatgcctggaccatgaagcacttcaagaagcccacctactgcaacttctgccacatcatgctgatgggcgtgaggaagcagggcctgtgctgcacctactgcaagtacacagtgcatgagcgctgtgtgtccaggaacatccctggctgtgtgaagacctacagcaaggccaagaggtctggagaggtgatgcagcacgcctgggtggagggcaacagctctgtgaagtgtgaccgctgccacaagagcatcaagtgctaccagagcgtgacagcccggcactgtgtgtggtgcaggatgaccttccacaggaaatgtgagctgagcaccctgtgtgatggaggagagctgcgggaccacatcctgctgcccaccagcatctgccccatcacccgggacaggcctggagagaagagtgatggctgtgtgtctgccaagggggagctggtgatgcagtacaagatcatccccaccccaggcacccaccccctgctggtgctggtgaaccccaagagcggcggccggcagggcgagcggctgaacttcttccgggacaccccagacttccgggtgctggcctgtggaggagatggcaccgtgggctggatcctggactgcatcgacaaggccaactttgccaagcacccccctgtggccgtgctgcccctgggcactggaaatgacctggcccgctgcctgcgctggggcggcggctatgagggcggcagcctgaccaagatcctgaaggacatcgagcagagccccctggtgatgctggaccgctggcacctggaggtgatcccccgggaggaggtggagaatggagaccaggtgccctacagcatcatgaacaactacttcagcattggagtggatgccagcatcgcccaccgcttccacgtgatgagggagaagcaccctgagaagttcaacagcaggatgaagaacaagctgtggtactttgaatttggcaccagcgagacctttgctgccacctgcaagaagctgcatgaccacatcgagctggagtgtgatggagtgggcgtggacctgagcaacatcttcctggagggcatcgccatcctgaacatccccagcatgtatggaggcaccaacctgtggggcgagaacaagaagaacagagctgtgatccgggagagcaggaagggcgtgacagaccccaaggagctgaagttctgtgtgcaggacctgagtgaccagctgctggaggtggtgggcctggagggcgccatggagatgggccagatctacacaggcctgaagtctgctggaagaaggctggcccagtgtgcctctgtgaccatccgcaccaacaagctgctgcccatgcaggtggatggagagccctggatgcagccctgctgcaccatcaagatcacccacaagaaccaggcccccatgatgatgggccccccccagaagagcagcttcttcagcctgcggaggaagagccgcagcaaggactag

SEQ ID NO: 36990 - DNA, 2301 bp, Artificial Sequence
  derived and/or modified sequence
atgggcgaggagcggtgggtgagcctgacccccgaggagttcgaccagctgcagaagtacagcgaatatagctcgaagaaaatcaaagatgcactgacagaattcaacgaaggagggagcctgaaacagtatgatccacatgaacccatcagttatgacgtgttcaagcttttcatgcgggcatatcttgaagttgatttgcctcaaccgctgtctactcatctgttcctggctttctcccagaagccccggcatgagacaagtgatcacccgaccgagggggcttctaattctgaagccaattccgccgataccaatatccagaatgctgacaacgcaacaaaagccgatgaggcttgcgcacccgatactgagtccaacatggcagagaagcaagctccagcggaggaccaggtagctgccacccctctcgaacctccagtgcctagatcaagcagcagcgaaagcccagtggtctatctgaaagacgtggtgtgctatctatccctccttgagacaggaaggccacaagacaagcttgagtttatgtttcggctctatgactcggacgaaaacggactgctagaccaggccgagatggattgtattgtgaatcaaatgcttcatatagcccagtacctggagtgggatccaaccgaactccgcccgatccttaaggagatgctgcaggggatggactatgatcgggacggattcgtctccctgcaggagtgggtccacgggggcatgacgactatcccactgctggttctactgggcatggatgatagtggctctaagggcgacggtcggcatgcctggaccatgaaacacttcaaaaaaccaacctactgtaacttttgtcacatcatgctgatgggagtaagaaagcagggcctgtgttgcacctattgcaagtacactgtgcacgagagatgcgtctcaagaaacattccagggtgcgttaaaacatactctaaagccaagagaagtggggaggtgatgcagcacgcctgggtggaggggaactccagcgtaaaatgtgatagatgccataagagtattaagtgttatcagtcagtgacagctagacattgtgtctggtgcaggatgacctttcatcgaaaatgtgaacttagtacgctctgcgatggaggggaacttcgcgaccacattctgttgccaacctccatatgtccaatcactcgcgatagaccgggggagaaatctgacggttgtgtaagtgccaaaggagaactggtcatgcagtataagatcatccccacaccaggcacgcatcctctactcgtgctggtcaatcctaagagcggagggcgtcagggcgaacggctcaacttcttccgggatacccccgacttccgcgtgctggcgtgtggaggagatggaacagttgggtggattctggattgcattgacaaggcaaacttcgcaaagcatcctcccgtagcagttttgccactcggaactgggaatgatcttgcccgatgtctgagatggggcggcggctatgagggaggttctctaacaaagattctcaaagatatcgagcaatcacccctcgtaatgttggatcgctggcatcttgaggtcattcctcgagaagaagtggaaaacggagatcaggtcccctacagcatcatgaataattatttttccattggtgtagatgcatcaattgcacaccgctttcacgtaatgcgggagaagcatccagaaaagtttaactccagaatgaagaataagctgtggtatttcgagttcggaaccagcgaaactttcgctgcgacatgcaagaaactgcacgaccacatcgagctggaatgcgacggcgtgggagtggacctcagtaatatttttcttgagggtatcgcaattctgaatatcccctcgatgtacggcgggaccaacctttggggcgagaataaaaagaatagggcagtgatccgggagtcccgcaagggagtgaccgatccgaaagaactgaagttctgcgtgcaagacctgagtgaccaattgttggaagtcgtgggcctggaaggagctatggaaatgggacaaatctacactggactgaagtcggccggacgaaggctcgcccaatgtgctagcgtaactatccgcaccaataagctcttacccatgcaggtggacggcgagccatggatgcaaccttgctgtacgatcaagatcacacataagaatcaggctccaatgatgatgggccctccccagaagtcgtcctttttttcgctgcgccggaaatcccggagcaaagattag

SEQ ID NO: 36991 - DNA, 2301 bp, Artificial Sequence
  derived and/or modified sequence
atgggggaagagcgatgggtgtccttgacccccgaggaattcgatcagctgcaaaagtactctgaatactcttctaaaaagatcaaggacgccctgaccgaattcaacgagggtggcagcttaaagcagtacgacccccacgagcccatcagctatgatgtgttcaaactgtttatgcgagcctacctggaggtcgacttaccgcaaccattatcgactcatttattccttgctttttcccagaagcctaggcacgagactagcgaccatccaaccgagggcgcaagcaattctgaagcaaattctgctgacaccaacatccagaacgctgacaacgccacaaaagccgatgaagcttgcgcacctgacaccgagtctaatatggctgagaaacaggcccctgctgaggaccaagtggccgctactcccctcgaacccccagtgccaagaagctcttcatcagagtcgccggtcgtgtacctgaaagacgtcgtttgttacctgtcactactggagacggggaggccccaggacaaactcgaattcatgttccgattgtacgactcagacgaaaatggacttctggaccaggccgaaatggactgtatagtgaaccagatgctccacatcgctcagtacctcgagtgggatccgacagaactgcgacctatcctcaaggaaatgctgcaaggcatggactatgatagggacggcttcgtttccctgcaagagtgggtccacgggggaatgacaactatccccttgctggtcctgttgggcatggatgatagcggaagtaagggagacggccgtcacgcctggacaatgaagcatttcaagaaaccaacctactgtaacttctgccacattatgttgatgggcgtccggaagcaagggttgtgttgtacttactgcaagtatacagtgcacgagcgatgcgtctctcggaatatccccggatgtgttaagacctatagcaaggctaagcgatctggcgaagttatgcagcacgcctgggtggaggggaacagtagtgtcaaatgcgaccgttgccataaatctatcaagtgttaccagtcggtgaccgcaagacattgtgtttggtgtcgcatgacgttccatcgaaaatgcgagcttagcacattatgtgatggcggtgaactgcgggatcacattctgctgccaacgtctatctgtccaatcacccgcgaccggccaggcgagaagtctgatggttgtgtgtcggccaagggcgagctcgttatgcaatataagattattcctacccccggaactcatcctctacttgtgctggtgaacccaaaatccgggggacgtcagggtgagcgcctgaatttcttcagagatacccctgattttagggtattggcctgtggcggagatgggaccgtcggatggatcctggactgcatcgataaggctaacttcgccaaacatccccctgtcgctgtcttgccactgggaactggcaacgatttggccaggtgcctacgatggggcggtgggtatgaggggggtagccttaccaaaatcttgaaggatatagagcagtctcctctcgtcatgttggatagatggcacctcgaggtcatacctcgtgaggaagtggagaacggtgatcaggtgccctactctattatgaataattacttcagcatcggagtggatgcctctatcgcccatcgattccatgttatgcgcgaaaagcacccggagaagtttaatagcaggatgaaaaataagctgtggtactttgaattcggcacctccgagacgttcgctgcaacatgcaagaagctacacgaccacattgagcttgagtgtgacggcgtgggcgtcgatttgagcaacatttttctggaggggatcgctattcttaatattccctccatgtatggtgggaccaacctgtggggggaaaacaaaaagaaccgcgctgtgatccgggagtctaggaagggggtgaccgaccctaaagagctaaagttctgcgtgcaagacttatccgaccaactgctggaggtggtcggactggaaggcgcaatggagatgggtcaaatctacacaggccttaagtcagcagggagaagactcgcccaatgcgcctccgttaccattaggaccaacaaacttctgcccatgcaggtggatggggaaccatggatgcagccgtgctgtacaattaagatcacccataaaaaccaggcacctatgatgatgggacccccacaaaagagtagcttcttttccctgcgccgaaagagcagatccaaggactag

SEQ ID NO: 36992 - DNA, 2301 bp, Artificial Sequence
  derived and/or modified sequence
atgggcgaggagagatgggtgagcctgacccccgaggagttcgaccagctgcagaagtacagcgagtacagcagcaagaagatcaaggacgccctgaccgagttcaacgagggcggcagcctgaagcagtacgacccccacgagcccatcagctacgacgtgttcaagctgttcatgagagcctacctggaggtggacctgccccagcccctgagcacccacctgttcctggccttcagccagaagcccagacacgagaccagcgaccaccccaccgagggcgccagcaacagcgaggccaacagcgccgacaccaacatccagaacgccgacaacgccaccaaggccgacgaggcctgcgcccccgacaccgagagcaacatggccgagaagcaggcccccgccgaggaccaggtggccgccacccccctggagccccccgtgcccagaagcagcagcagcgagagccccgtggtgtacctgaaggacgtggtgtgctacctgagcctgctggagaccggcagaccccaggacaagctggagttcatgttcagactgtacgacagcgacgagaacggcctgctggaccaggccgagatggactgcatcgtgaaccagatgctgcacatcgcccagtacctggagtgggaccccaccgagctgagacccatcctgaaggagatgctgcagggcatggactacgacagagacggcttcgtgagcctgcaggagtgggtgcacggcggcatgaccaccatccccctgctggtgctgctgggcatggacgacagcggcagcaagggcgacggcagacacgcctggaccatgaagcacttcaagaagcccacctactgcaacttctgccacatcatgctgatgggcgtgagaaagcagggcctgtgctgcacctactgcaagtacaccgtgcacgagagatgcgtgagcagaaacatccccggctgcgtgaagacctacagcaaggccaagagaagcggcgaggtgatgcagcacgcctgggtggagggcaacagcagcgtgaagtgcgacagatgccacaagagcatcaagtgctaccagagcgtgaccgccagacactgcgtgtggtgcagaatgaccttccacagaaagtgcgagctgagcaccctgtgcgacggcggcgagctgagagaccacatcctgctgcccaccagcatctgccccatcaccagagacagacccggcgagaagagcgacggctgcgtgagcgccaagggcgagctggtgatgcagtacaagatcatccccacccccggcacccaccccctgctggtgctggtgaaccccaagagcggcggcagacagggcgagagactgaacttcttcagagacacccccgacttcagagtgctggcctgcggcggcgacggcaccgtgggctggatcctggactgcatcgacaaggccaacttcgccaagcacccccccgtggccgtgctgcccctgggcaccggcaacgacctggccagatgcctgagatggggcggcggctacgagggcggcagcctgaccaagatcctgaaggacatcgagcagagccccctggtgatgctggacagatggcacctggaggtgatccccagagaggaggtggagaacggcgaccaggtgccctacagcatcatgaacaactacttcagcatcggcgtggacgccagcatcgcccacagattccacgtgatgagagagaagcaccccgagaagttcaacagcagaatgaagaacaagctgtggtacttcgagttcggcaccagcgagaccttcgccgccacctgcaagaagctgcacgaccacatcgagctggagtgcgacggcgtgggcgtggacctgagcaacatcttcctggagggcatcgccatcctgaacatccccagcatgtacggcggcaccaacctgtggggcgagaacaagaagaacagagccgtgatcagagagagcagaaagggcgtgaccgaccccaaggagctgaagttctgcgtgcaggacctgagcgaccagctgctggaggtggtgggcctggagggcgccatggagatgggccagatctacaccggcctgaagagcgccggcagaagactggcccagtgcgccagcgtgaccatcagaaccaacaagctgctgcccatgcaggtggacggcgagccctggatgcagccctgctgcaccatcaagatcacccacaagaaccaggcccccatgatgatgggccccccccagaagagcagcttcttcagcctgagaagaaagagcagaagcaaggactag

SEQ ID NO: 36993 - DNA, 3445 bp, Artificial Sequence
  derived and/or modified sequence
ggagcgccccgggccaccgcgcaaccaagtgttgcctggtgaggaagagccaggacttctgaatttaccttgaatacagacaggaggatgttgcctaaggaatagcagagatcttgtctcatcttctgagaggtgcctgctgctgctgtatacacttgagtgctcccagaagtctcctgaaaggcttacatcgcaaacctgcaatgagccaggccctgggctgggcctccacttcagcctagtgaacaaaactccatcactgccctttagccactcacataaagtttaaaaatgggtgaagaacggtgggtctccctcactccagaagaatttgaccaactccagaaatattcagaatattcctccaagaagataaaagatgccttgactgaatttaatgagggtgggagcctcaaacaatatgacccacatgagccgattagctatgatgtcttcaagctgttcatgagggcgtacctggaggtggaccttccccagccactgagcactcacctcttcctggccttcagccagaagcccagacacgagacctctgaccacccgacggagggagccagcaacagtgaggccaacagcgcagatactaatatacagaatgcagataatgccaccaaagcagacgaggcctgtgcccctgatactgaatcaaatatggctgagaagcaagcaccagctgaagaccaagtggctgcgacccccctggaaccccccgtccctcggtcttcaagctcggaatccccagtggtatacctgaaggatgttgtgtgctacctgtccctgctggagacggggaggcctcaggataagctggagttcatgtttcgcctctatgattcagatgagaacggtctcctggaccaagcggagatggattgcattgtcaaccaaatgctgcatattgcccagtacctggagtgggatcccacagagctgaggcctatattgaaggagatgctgcaagggatggactacgaccgggacggctttgtgtctctacaggaatgggtccatggagggatgaccaccatcccattgctggtcctcctggggatggatgactctggctccaagggggatgggcggcacgcctggaccatgaagcacttcaagaaaccaacctactgcaacttctgccatatcatgctcatgggcgtccgcaagcaaggcctgtgctgcacttactgtaaatacactgtccacgaacgctgtgtgtccagaaacattcctggttgtgtcaaaacgtactcaaaagccaaaaggagtggtgaggtgatgcagcacgcatgggtggaagggaactcctccgtcaagtgtgaccggtgccacaaaagtatcaagtgctaccagagtgtcaccgcgcggcactgcgtgtggtgccggatgacgtttcaccgcaaatgtgaattatcaacgttgtgtgacggtggggaactcagagaccacatcttactgcccacctccatatgccccatcacccgggacaggccaggtgagaagtctgatggctgcgtgtccgccaagggcgaacttgtcatgcagtataagatcatccccaccccgggtacccaccccctgctggtcttggtgaaccccaagagtggagggagacaaggagaaaggttgaactttttccgtgatactccagacttccgtgttttggcctgtggtggagatgggacagttggctggattttggattgcattgataaggccaactttgcaaagcatccaccagtggctgtcctgcctcttggaacaggaaatgaccttgcccgttgtctccgctggggaggaggttatgaagggggcagcttgacaaaaatcctgaaagacattgagcagagccccttggtgatgctggaccgctggcatctggaagtcatccccagagaggaagtggaaaacggggaccaggtcccatacagcatcatgaacaactatttctccattggtgtggacgcttccattgcacacagattccatgtgatgagagagaaacatcctgaaaaattcaacagcaggatgaagaacaagctgtggtactttgaatttggcacctcggagacttttgcagcgacctgcaagaaactccacgaccacattgagttggagtgtgatggggttggggtggacctgagcaacatcttcctggaaggcattgccattctcaacattcccagcatgtacggaggcaccaatctctggggagaaaacaagaagaaccgggctgtgatccgggaaagcaggaagggtgtcactgaccccaaagaactgaaattctgcgttcaagacctcagtgaccagctccttgaagtggtggggctagaaggagccatggagatggggcagatctacaccggcctgaagagtgcaggcaggaggctggcccagtgcgcctctgtcaccatcaggacaaacaagctgctgccaatgcaagtggatggagaaccctggatgcagccatgttgcacgattaaaattactcacaagaaccaagcgcccatgatgatggggcctccccagaagagcagcttcttctcgttgagaaggaagagccgttcaaaagactaaacagtgtgccaaacaccagctaaaccaagagagaaagcaagaaactataatgcacactcacacacaatttatgtgcacactcacacatgcacacacacacacacatacacactcttctctaaccagtggaagcaaagccacccttcgggaagaaaacgtcaccttgccatacattctgtttcaacagtgggtacacccctaacagagccagtgccaacaaaacattttgaatggacttagggcccatgaggttgtggctggcttaggcagcaacctccacattcccacaggccttgagcagaattttctgagactgaagggaaatccccctttctttctaccagccctgcaagtttcctcatggacgctcgcgaggagcaggctgcaggtttcctgcctatggtgagatcagatgtggccaagggaaggagctctggttccagagaatttgcacaaagttccctctgtacagagacaaaacggcctccggctctcagagcataatccttggcagggctcagcaggcgcacgttggtttcttggtcgtcctttgagtgacaacttctccgtgaacctgctgaagaggcagaaaggctgtggaaagctgtatttccattcttgggtttctgcgccgtcggtgggcacttgttattttccaggaaccttctcctggtgtctacatgtttgcttagaggcggctccaagagcccccagagctgcctgcatagcacaccttagatgtggtatttattttcttagttctgtgaacacctgggagggagagcggagaaactgggatttatttttcaaattggtgtcataatattgtgtaaaaagggaaggaaaaaaaaaa

SEQ ID NO: 36994 - protein, 752 aa, Artificial Sequence
  derived and/or modified sequence
MGEERWVSLTPEEFDQLQKYSEYSSKKIKDALTEFNEGGSLKQYDPHEPISYDVFKLFMRAYLEVDLPQPLSTHLFLAFSQKPRHETSDHPTEGASNSEANSADTNIQNADNATKADEACAPDTESNMAEKQAPAEDQVAATPLEPPVPRSSSSESPVVYLKDVVCYLSLLETGRPQDKLEFMFRLYDSDENGLLDQAEMDCIVNQMLHIAQYLEWDPTELRPILKEMLQGMDYDRDGFVSLQEWVHGGMTTIPLLVLLGMDDSGSKGDGRHAWTMKHFKKPTYCNFCHIMLMGVRKQGLCCTYCKYTVHERCVSRNIPGCVKTYSKAKRSGEFHRKCELSTLCDGGELRDHILLPTSICPITRDRPGEKSDGCVSAKGELVMQYKIIPTPGTHPLLVLVNPKSGGRQGERILRKFHYLLNPKQVFNLDNGGPTPGLNFFRDTPDFRVLACGGDGTVGWILDCIDKANFAKHPPVAVLPLGTGNDLARCLRWGGGYEGGSLTKILKDIEQSPLVMLDRWHLEVIPREEVENGDQVPYSIMNNYFSIGVDASIAHRFHVMREKHPEKFNSRMKNKLWYFEFGTSETFAATCKKLHDHIELECDGVGVDLSNIFLEGIAILNIPSMYGGTNLWGENKKNRAVIRESRKGVTDPKELKFCVQDLSDQLLEVVGLEGAMEMGQIYTGLKSAGRRLAQCASVTIRTNKLLPMQVDGEPWMQPCCTIKITHKNQAPMMMGPPQKSSFFSLRRKSRSKD

SEQ ID NO: 36995 - protein, 605 aa, Artificial Sequence
  derived and/or modified sequence
SLKMGEERWVSLTPEEFDQLQKYSEYSSKKIKDALTEFNEGGSLKQYDPHEPISYDVFKLFMRAYLEVDLPQPLSTHLFLAFSQKPRHETSDHPTEGASNSEANSADTNIQNADNATKADEACAPDTESNMAEKQAPAEDQVAATPLEPPVPRSSSSESPVVYLKDVVCYLSLLETGRPQDKLEFMFRLYDSDENGLLDQAEMDCIVNQMLHIAQYLEWDPTELRPILKEMLQGMDYDRDGFVSLQEWVHGGMTTIPLLVLLGMDDSGSKGDGRHAWTMKHFKKPTYCNFCHIMLMGVRKQGLCCTYCKYTVHERCVSRNIPGCVKTYSKAKRSGEFHRKCELSTLCDGGELRDHILLPTSICPITRDRPGEKSDGCVSAKGELVMQYKIIPTPGTHPLLVLVNPKSGGRQGERILRKFHYLLNPKQVFNLDNGGPTPGLNFFRDTPDFRVLACGGDGTVGWILDCIDKANFAKHPPVAVLPLGTGNDLARCLRWGGGYEGGSLTKILKDIEQSPLVMLDRWHLEVIPREEVENGDQVPYSIMNNYFSIGVDASIAHRFHVMREKHPEKFNSRMKNKLWYFEFGTSETFAATCKKLHDHIELEWC

SEQ ID NO: 36996 - protein, 732 aa, Artificial Sequence
  derived and/or modified sequence
MGEERWVSLTPEEFDQLQKYSEYSSKKIKDALTEFNEGGSLKQYDPHEPISYDVFKLFMRAYLEVDLPQPLSTHLFLAFSQKPRHETSDHPTEGASNSEANSADTNIQNADNATKADEACAPDTESNMAEKQAPAEDQVAATPLEPPVPRSSSSESPVVYLKDVVCYLSLLETGRPQDKLEFMFRLYDSDENGLLDQAEMDCIVNQMLHIAQYLEWDPTELRPILKEMLQGMDYDRDGFVSLQEWVHGGMTTIPLLVLLGMDDSGSKGDGRHAWTMKHFKKPTYCNFCHIMLMGVRKQGLCCTYCKYTVHERCVSRNIPGCVKTYSKAKRSGEFHRKCELSTLCDGGELRDHILLPTSICPITRYKIIPTPGTHPLLVLVNPKSGGRQGERILRKFHYLLNPKQVFNLDNGGPTPGLNFFRDTPDFRVLACGGDGTVGWILDCIDKANFAKHPPVAVLPLGTGNDLARCLRWGGGYEGGSLTKILKDIEQSPLVMLDRWHLEVIPREEVENGDQVPYSIMNNYFSIGVDASIAHRFHVMREKHPEKFNSRMKNKLWYFEFGTSETFAATCKKLHDHIELECDGVGVDLSNIFLEGIAILNIPSMYGGTNLWGENKKNRAVIRESRKGVTDPKELKFCVQDLSDQLLEVVGLEGAMEMGQIYTGLKSAGRRLAQCASVTIRTNKLLPMQVDGEPWMQPCCTIKITHKNQAPMMMGPPQKSSFFSLRRKSRSKD

SEQ ID NO: 36997 - DNA, 2259 bp, Artificial Sequence
  derived and/or modified sequence
atgggagaagagagatgggtctcacttacccccgaagaatttgatcagctacagaagtactcagaatattcatcaaagaagatcaaagacgcattgactgagtttaacgaggggggcagcttaaaacagtatgacccgcatgagccaatatcctacgatgtcttcaaattatttatgcgcgcatacttagaagttgatctgcctcagccactgtccactcaccttttcctggccttcagccagaagccacgtcacgagacaagcgaccaccctacagagggcgcctcaaatagtgaagccaattccgctgacacaaatatacagaatgcagataacgccactaaggccgatgaggcctgtgcgcctgatactgagtcgaatatggcggagaaacaggcccccgccgaagaccaggttgccgcaactcccctggagcctcctgttccccggagctcatcttctgaatctcctgtcgtttatctcaaggacgtggtgtgctatctgtcgctgcttgagactggtaggccacaggataagctcgaatttatgtttcgactgtacgactctgatgagaacgggctgctggatcaggccgaaatggactgcatcgtgaaccagatgcttcacatcgcacagtatttagaatgggaccccaccgagcttcgccccatcctgaaggagatgctccagggcatggactatgaccgcgacggttttgtgagcttacaggaatgggttcatggggggatgacgactattcccctccttgttctgctggggatggatgatagcgggtctaaaggcgatggtagacatgcctggaccatgaagcacttcaagaaaccaacctattgtaatttttgtcacatcatgctaatgggcgtgaggaaacaagggttatgttgtacctactgcaaatatacggtgcatgaaagatgtgtgagtcggaacattccaggctgtgttaagacctactcgaaggcgaaaaggtctggagaatttcaccgcaaatgtgagctctctacactgtgcgacgggggcgagttgcgggaccacattctgctgccaacctctatttgtccgatcacccgcgatcggcccggcgagaaatctgatggctgtgtctctgctaagggagagctcgtgatgcaatacaagattatccctactccaggaacccatccccttcttgtgttggtcaaccccaaaagcgggggtagacagggagagaggatactgaggaagttccactacttattaaaccctaaacaggtctttaatctcgataacggcgggcccacacctggtctcaacttcttccgagacacgccagactttcgggtgttagcttgtggtggagacggaacagtcgggtggatcttagattgcatcgacaaagcgaacttcgccaagcatccccccgtggcagtgctgcccttaggaacaggtaacgatttggccaggtgtctgagatggggaggagggtacgagggaggtagcctgactaagattctgaaagatatcgagcaatcaccactggtcatgcttgatcgttggcacctcgaggtgatcccacgggaagaagtggagaatggggatcaggtaccctatagcattatgaataattactttagcattggtgtggatgcatctatagcacatcgcttccacgttatgcgcgagaagcacccagagaagtttaactctaggatgaaaaataaactctggtactttgaattcggaacatccgaaacattcgccgcaacatgtaaaaaactccatgaccacatagagctggaatgcgacggggtaggagttgacctctccaacatcttcctggagggtatcgcaattctcaacatacccagcatgtacggcggtactaatctttggggagagaataaaaaaaacagggccgtgatccgcgagagccggaaaggcgtaaccgaccccaaggagctgaaattctgcgtgcaggatcttagcgaccagttgcttgaggtggttggccttgaaggggccatggagatgggacagatttacaccgggctcaaatctgccgggcgaaggcttgcccagtgcgccagcgtcacaatcaggaccaacaagcttctgccaatgcaggtggacggcgaaccatggatgcagccatgctgcactataaagatcactcataagaaccaagcccccatgatgatgggtccccctcaaaaatcaagcttctttagtctgaggcggaaaagcagatccaaggattag

SEQ ID NO: 36998 - DNA, 1818 bp, Artificial Sequence
  derived and/or modified sequence
agtttgaagatgggggaggagcggtgggtaagcctaactccagaggagtttgatcaactccaaaagtatagtgaatattcctcaaaaaaaatcaaggacgcccttacagaatttaacgagggaggctctctgaagcagtatgacccacatgaacctatttcctacgatgtctttaagctctttatgcgtgcatacttggaagtagacctgcctcagcctcttagcacgcatctgttcctggcctttagccaaaaaccccgccacgaaacctccgaccatccgacagaaggggcatctaacagcgaggccaactcagctgacacaaacatacaaaacgcggataacgcaacaaaggctgatgaagcatgtgccccggacacagagtctaatatggccgaaaagcaagcaccggcagaagatcaggttgcagctacgcccttagaaccacctgtgccgcggtcttccagcagcgagagcccagtagtgtatcttaaggacgtggtgtgttacctgtcacttttagagacggggcgaccccaggataaactggagtttatgttcagactgtacgatagtgacgagaacggactcttggatcaagcagaaatggattgtatagtaaatcaaatgctgcacatcgcgcaatatctggaatgggatccgaccgaacttagacctatccttaaggagatgcttcagggcatggattacgaccgtgacggctttgtgtcattacaggaatgggtgcatgggggcatgactactattcccttgctggtgctgctcggtatggatgacagcggttccaagggtgatgggcgtcacgcctggacgatgaaacattttaaaaaaccaacctactgcaatttctgccatatcatgctgatgggtgtgaggaaacaggggctgtgctgtacgtactgcaagtatactgtgcacgaaagatgcgtctccagaaatattcctggctgtgtgaaaacatactctaaggcaaagagatcaggggagttccatcggaaatgtgagctctccaccctttgcgatggcggtgagctgcgggatcacattcttctacctacatcaatttgtccaatcacccgggacaggccaggtgaaaaatccgacgggtgtgtgagcgcaaagggggaattagtgatgcaatacaaaatcattcccacccccggtacccacccattactagtgttagttaatccaaaatctggtggtaggcagggagagagaattctgcgaaagttccattacctcttaaaccctaaacaggtattcaacctcgataacggcgggcccactcctggattgaactttttcagggacactcctgattttcgggttctggcttgcggaggcgacgggaccgtcggctggattcttgactgcatcgacaaggctaactttgccaagcaccctccagttgcagtgctgccactggggaccggcaatgatctggccaggtgtctgcgttggggaggtggatatgaaggggggtcgcttaccaaaatcctgaaggatattgagcagtccccactcgtgatgctggacaggtggcatctcgaagttataccacgcgaagaggtggagaacggagaccaggttccttatagcatcatgaacaattacttctccattggcgttgatgccagcatagctcaccggttccacgtgatgcgtgagaagcatcccgaaaagtttaacagccgcatgaaaaataaactgtggtatttcgagttcggaacttctgaaacatttgccgcgacttgcaaaaaattacatgatcacatcgagctggagtggtgttag

SEQ ID NO: 36999 - DNA, 2199 bp, Artificial Sequence
  derived and/or modified sequence
atgggcgaagaacgctgggtcagtttaactccggaggaattcgaccagcttcagaaatatagtgagtattcttcgaaaaagataaaagacgcgctcacggaattcaacgaaggcggttcactcaagcagtacgatcctcatgagcccatctcttacgacgtctttaaactgttcatgcgcgcctatcttgaagttgatctcccacagcctctgtctacacatctgtttttagctttttctcagaagcctaggcatgaaacatccgaccacccaactgaaggggcgtctaacagcgaagcaaacagcgccgatacaaatatacagaatgccgacaatgctaccaaggccgatgaggcgtgcgctcccgataccgagtcgaacatggccgagaaacaggccccggccgaggaccaagtggctgctacgccattggaacctccagtgcccaggtcctcgagcagcgaatcccccgttgtttatttgaaggacgtggtgtgctacctaagcctcctagagactggacgtcctcaggacaaattagagtttatgttccgcctctatgatagtgacgagaatgggctgctggatcaggcggaaatggactgtattgtgaaccaaatgttgcacatcgcacagtacctggaatgggacccaaccgagctgcggcccattctaaaggagatgctacaggggatggattacgatcgtgatggattcgtgtccctgcaagaatgggtgcatggtggaatgacaaccatccctttgttagtgctgttaggtatggacgactccggcagcaagggtgacggcaggcatgcatggactatgaaacactttaaaaagccaacttattgcaacttctgtcacataatgctgatgggcgttcgaaagcagggactgtgttgcacttattgcaagtacaccgtgcacgaaaggtgcgtgagtcggaacatcccaggctgcgtcaagacttattccaaagcaaagcggtctggcgaattccatcggaaatgtgaactctccactttatgcgacggcggagaactgagggaccacattcttctgccaactagcatttgcccaattacccgttacaagatcattcctactcctgggacccaccccctgttggtcctcgttaatcccaagagtggcggccgacagggtgaaagaatactgcggaagtttcactacctgctgaaccccaaacaggtttttaacttagacaatggaggcccaaccccaggattaaacttctttagagacactccagatttccgagtcctggcttgcgggggtgacgggaccgtggggtggattctggactgcatcgataaagcaaacttcgccaaacaccccccggtggcagtgcttcccttaggaactggtaatgacttagcccggtgcctgcgatggggtggcgggtacgaggggggatctctcacaaagatattgaaggatattgaacagtccccccttgtgatgctggacagatggcacctggaggtgatcccacgtgaagaggtcgaaaatggggaccaagtgccttacagcataatgaacaactatttcagcattggtgtggacgcgtccattgctcaccgatttcacgtcatgcgcgaaaagcatcctgaaaagttcaactctcggatgaagaacaagttgtggtattttgaattcggaacatctgagacttttgccgccacatgtaagaaacttcatgaccacatcgagttagaatgcgacggggtcggggtggacctgagcaatatttttctggagggaattgccatcctgaatatacctagcatgtatggcggaaccaatctgtggggggagaacaagaagaatcgcgcggtgatcagagaatctcgcaagggcgtgactgatccgaaggaactgaagttttgtgtgcaggatctgtctgaccagctactggaagtggtgggtctcgagggggcgatggaaatggggcagatttacaccgggttaaagtcagctggacgaaggttagcccaatgcgcctctgtaactatccgcacaaacaagcttttgccaatgcaggttgacggtgaaccctggatgcagccttgctgcacaatcaagatcacccacaagaaccaggcacccatgatgatggggccaccccagaaatcttcgttcttctcactgcgtagaaagtcaagaagtaaggattag

SEQ ID NO: 37000 - DNA, 2259 bp, Artificial Sequence
  derived and/or modified sequence
atgggagaggagcgctgggtgtccctgaccccagaggagtttgaccagctgcagaagtacagcgagtacagcagcaagaagatcaaggatgccctgacagagttcaatgaaggaggcagcctgaagcagtatgacccccatgagcccatctcctatgatgtgttcaagctgttcatgagggcctacctggaggtggacctgccccagcccctgagcacccacctgttcctggccttcagccagaagcccaggcatgagaccagtgaccaccccacagagggcgccagcaacagcgaggccaacagcgctgacaccaacatccagaatgctgacaatgccaccaaggcagatgaggcctgtgccccagacacagagagcaacatggccgagaagcaggccccagctgaggaccaggtggccgccacccccctggagccccctgtgcccaggagcagcagcagcgagagccctgtggtgtacctgaaggatgtggtgtgctacctgagcctgctggagaccggccggccccaggacaagctggagttcatgttccggctgtatgacagtgatgaaaatggcctgctggaccaggccgagatggactgcatcgtgaaccagatgctgcacatcgcccagtacctggagtgggaccccacagagctgcggcccatcctgaaggagatgctgcagggcatggactatgacagagatggctttgtgtccctgcaggagtgggtgcatggaggcatgaccaccatccccctgctggtgctgctgggcatggatgacagcggcagcaaaggagatggaagacatgcctggaccatgaagcacttcaagaagcccacctactgcaacttctgccacatcatgctgatgggcgtgaggaagcagggcctgtgctgcacctactgcaagtacacagtgcatgagcgctgtgtgtccaggaacatccctggctgtgtgaagacctacagcaaggccaagaggtctggagagttccacaggaaatgtgagctgagcaccctgtgtgatggaggagagctgcgggaccacatcctgctgcccaccagcatctgccccatcacccgggacaggcctggagagaagagtgatggctgtgtgtctgccaagggggagctggtgatgcagtacaagatcatccccaccccaggcacccaccccctgctggtgctggtgaaccccaagagcggcggccggcagggcgagcgcatcctgaggaagttccactacctgctgaaccccaagcaggtgttcaacctggacaatggaggccccaccccaggcctgaacttcttccgggacaccccagacttccgggtgctggcctgtggaggagatggcaccgtgggctggatcctggactgcatcgacaaggccaactttgccaagcacccccctgtggccgtgctgcccctgggcactggaaatgacctggcccgctgcctgcgctggggcggcggctatgagggcggcagcctgaccaagatcctgaaggacatcgagcagagccccctggtgatgctggaccgctggcacctggaggtgatcccccgggaggaggtggagaatggagaccaggtgccctacagcatcatgaacaactacttcagcattggagtggatgccagcatcgcccaccgcttccacgtgatgagggagaagcaccctgagaagttcaacagcaggatgaagaacaagctgtggtactttgaatttggcaccagcgagacctttgctgccacctgcaagaagctgcatgaccacatcgagctggagtgtgatggagtgggcgtggacctgagcaacatcttcctggagggcatcgccatcctgaacatccccagcatgtatggaggcaccaacctgtggggcgagaacaagaagaacagagctgtgatccgggagagcaggaagggcgtgacagaccccaaggagctgaagttctgtgtgcaggacctgagtgaccagctgctggaggtggtgggcctggagggcgccatggagatgggccagatctacacaggcctgaagtctgctggaagaaggctggcccagtgtgcctctgtgaccatccgcaccaacaagctgctgcccatgcaggtggatggagagccctggatgcagccctgctgcaccatcaagatcacccacaagaaccaggcccccatgatgatgggccccccccagaagagcagcttcttcagcctgcggaggaagagccgcagcaaggactag

SEQ ID NO: 37001 - DNA, 1818 bp, Artificial Sequence
  derived and/or modified sequence
agcctgaagatgggagaggagcgctgggtgtccctgaccccagaggagtttgaccagctgcagaagtacagcgagtacagcagcaagaagatcaaggatgccctgacagagttcaatgaaggaggcagcctgaagcagtatgacccccatgagcccatctcctatgatgtgttcaagctgttcatgagggcctacctggaggtggacctgccccagcccctgagcacccacctgttcctggccttcagccagaagcccaggcatgagaccagtgaccaccccacagaaggagccagcaacagcgaggccaacagcgctgacaccaacatccagaatgctgacaatgccaccaaggcagatgaggcctgtgccccagacacagagagcaacatggccgagaagcaggccccagctgaggaccaggtggccgccacccccctggagccccctgtgcccaggagcagcagcagcgagagccctgtggtgtacctgaaggatgtggtgtgctacctgagcctgctggagaccggccggccccaggacaagctggagttcatgttccggctgtatgacagtgatgaaaatggcctgctggaccaggccgagatggactgcatcgtgaaccagatgctgcacatcgcccagtacctggagtgggaccccacagagctgcggcccatcctgaaggagatgctgcagggcatggactatgacagagatggctttgtgtccctgcaggagtgggtgcacggcggcatgaccaccatccccctgctggtgctgctgggcatggatgattctggcagcaaaggagatggaagacatgcctggaccatgaagcacttcaagaagcccacctactgcaacttctgccacatcatgctgatgggcgtgaggaagcagggcctgtgctgcacctactgcaagtacacagtgcatgagcgctgtgtgtccaggaacatccctggctgtgtgaagacctacagcaaggccaagaggtctggagagttccacaggaaatgtgagctgagcaccctgtgtgatggaggagagctgcgggaccacatcctgctgcccaccagcatctgccccatcacccgggacaggcctggagagaagagtgatggctgtgtgtctgccaagggggagctggtgatgcagtacaagatcatccccaccccaggcacccaccccctgctggtgctggtgaaccccaagagcggcggccggcagggcgagcgcatcctgaggaagttccactacctgctgaaccccaagcaggtgttcaacctggacaatggaggccccaccccaggcctgaacttcttccgggacaccccagacttccgggtgctggcctgtggaggagatggcaccgtgggctggatcctggactgcatcgacaaggccaactttgccaagcacccccctgtggccgtgctgcccctgggcactggaaatgacctggcccgctgcctgcgctggggcggcggctatgaaggaggcagcctgaccaagatcctgaaggacatcgagcagagccccctggtgatgctggaccgctggcacctggaggtgatcccccgggaggaggtggagaatggagaccaggtgccctacagcatcatgaacaactacttcagcattggagtggatgccagcatcgcccaccgcttccacgtgatgagggagaagcaccctgagaagttcaacagcaggatgaagaacaagctgtggtactttgaatttggcaccagcgagacctttgctgccacctgcaagaagctgcatgaccacatcgagctggagtggtgctag

SEQ ID NO: 37002 - DNA, 2199 bp, Artificial Sequence
  derived and/or modified sequence
atgggagaggagcgctgggtgtccctgaccccagaggagtttgaccagctgcagaagtacagcgagtacagcagcaagaagatcaaggatgccctgacagagttcaatgaaggaggcagcctgaagcagtatgacccccatgagcccatctcctatgatgtgttcaagctgttcatgagggcctacctggaggtggacctgccccagcccctgagcacccacctgttcctggccttcagccagaagcccaggcatgagaccagtgaccaccccacagagggcgccagcaacagcgaggccaacagcgctgacaccaacatccagaatgctgacaatgccaccaaggcagatgaggcctgtgccccagacacagagagcaacatggccgagaagcaggccccagctgaggaccaggtggccgccacccccctggagccccctgtgcccaggagcagcagcagcgagagccctgtggtgtacctgaaggatgtggtgtgctacctgagcctgctggagaccggccggccccaggacaagctggagttcatgttccggctgtatgacagtgatgaaaatggcctgctggaccaggccgagatggactgcatcgtgaaccagatgctgcacatcgcccagtacctggagtgggaccccacagagctgcggcccatcctgaaggagatgctgcagggcatggactatgacagagatggctttgtgtccctgcaggagtgggtgcatggaggcatgaccaccatccccctgctggtgctgctgggcatggatgacagcggcagcaaaggagatggaagacatgcctggaccatgaagcacttcaagaagcccacctactgcaacttctgccacatcatgctgatgggcgtgaggaagcagggcctgtgctgcacctactgcaagtacacagtgcatgagcgctgtgtgtccaggaacatccctggctgtgtgaagacctacagcaaggccaagaggtctggagagttccacaggaaatgtgagctgagcaccctgtgtgatggaggagagctgcgggaccacatcctgctgcccaccagcatctgccccatcacccgctacaagatcatccccaccccaggcacccaccccctgctggtgctggtgaaccccaagagcggcggccggcagggcgagcgcatcctgaggaagttccactacctgctgaaccccaagcaggtgttcaacctggacaatggaggccccaccccaggcctgaacttcttccgggacaccccagacttccgggtgctggcctgtggaggagatggcaccgtgggctggatcctggactgcatcgacaaggccaactttgccaagcacccccctgtggccgtgctgcccctgggcactggaaatgacctggcccgctgcctgcgctggggcggcggctatgagggcggcagcctgaccaagatcctgaaggacatcgagcagagccccctggtgatgctggaccgctggcacctggaggtgatcccccgggaggaggtggagaatggagaccaggtgccctacagcatcatgaacaactacttcagcattggagtggatgccagcatcgcccaccgcttccacgtgatgagggagaagcaccctgagaagttcaacagcaggatgaagaacaagctgtggtactttgaatttggcaccagcgagacctttgctgccacctgcaagaagctgcatgaccacatcgagctggagtgtgatggagtgggcgtggacctgagcaacatcttcctggagggcatcgccatcctgaacatccccagcatgtatggaggcaccaacctgtggggcgagaacaagaagaacagagctgtgatccgggagagcaggaagggcgtgacagaccccaaggagctgaagttctgtgtgcaggacctgagtgaccagctgctggaggtggtgggcctggagggcgccatggagatgggccagatctacacaggcctgaagtctgctggaagaaggctggcccagtgtgcctctgtgaccatccgcaccaacaagctgctgcccatgcaggtggatggagagccctggatgcagccctgctgcaccatcaagatcacccacaagaaccaggcccccatgatgatgggccccccccagaagagcagcttcttcagcctgcggaggaagagccgcagcaaggactag

SEQ ID NO: 37003 - DNA, 2259 bp, Artificial Sequence
  derived and/or modified sequence
atgggcgaggagcggtgggtgagcctgacccccgaggagttcgaccaactgcagaaatacagcgagtattcctctaagaagattaaagatgccctcaccgagttcaatgagggaggaagcctgaagcagtacgacccccatgaacctatcagttacgatgtcttcaagctgtttatgcgggcttacctggaggtggacctaccccaacccctatccactcacttgtttctcgccttctcccagaagcctcgtcacgagacttcagaccaccccacagagggcgcatcaaattcggaggccaactccgcggatacaaacattcagaacgcagacaatgccactaaggccgacgaggcttgcgctccggacaccgagagcaatatggccgaaaagcaagcacctgctgaggaccaggtggccgcaacacctctggagcctcctgttcctcggtcttcaagcagcgagagtccagtggtgtatcttaaagacgtcgtctgctacctgagcctcctggagaccggcaggccacaggacaagttagaattcatgtttagactttatgacagcgacgaaaatgggctgctggaccaagccgagatggattgcatcgtgaaccaaatgctccacatagctcagtatcttgagtgggaccccactgagttaaggcctatattgaaagagatgttgcagggaatggattacgatcgtgatggttttgtgtctctacaagaatgggtccacggaggcatgacaactattcccctgctcgttctgttaggtatggacgattcaggcagtaaaggggacggccggcacgcatggacaatgaaacacttcaaaaagcccacttactgtaacttctgccatatcatgctgatgggtgtccggaagcagggactttgctgtacatactgtaaatacacggtgcacgagaggtgcgtaagcagaaatattccaggatgcgtcaaaacgtactcaaaagctaagcgtagcggtgaatttcatcggaagtgcgaactgtcgacattatgcgatggcggtgaactcagagatcacattcttttgcccactagcatatgccctatcacgcgggaccgtccaggcgagaagtctgatggctgtgtgagcgccaagggtgagctggtgatgcagtacaaaattattccaacgcctgggacccacccactgctggtacttgtgaacccgaaaagcggcggcaggcagggcgaacgcatcctgcgcaaatttcactacctgcttaaccctaagcaagtttttaacctcgataatgggggacctaccccgggtcttaacttttttagagacactccagattttcgagtgctggcatgtggtggggatggcaccgtgggctggattctggactgcattgataaggccaactttgcaaagcaccccccagtggccgtgctccccctgggcacaggcaacgatttggcccggtgcctaagatggggcggcggctacgagggcggctccctgacaaagattctgaaggatattgagcaatctccgttagtaatgttagacagatggcacctggaggtgattccacgcgaagaggtggagaatggcgatcaggtcccgtatagtattatgaacaactacttttccatcggcgtggacgcttctatcgctcatcgctttcatgtcatgcgcgagaaacacccggaaaagtttaattccagaatgaagaataagctctggtacttcgagtttggcacaagcgaaacattcgccgcaacatgtaagaagctgcatgatcacattgaactggagtgcgacggggttggcgtcgatctgtctaacatttttctagagggcatcgccatcctgaatattccaagcatgtatggaggcacgaacctctggggggagaacaagaagaaccgcgccgtcatccgcgagtcgaggaagggcgtgactgacccaaaggagctgaaattctgcgtacaggacctatctgaccaactcctggaagtggtgggcctagagggagctatggagatgggccaaatatatactggattgaagtcagcgggacgacgcctggcccaatgtgcctccgtaaccattcgcacaaataaactgctgccaatgcaggtggacggtgaaccctggatgcagccttgctgtaccattaagattacccacaagaatcaggcccctatgatgatgggtcccccacagaaatcatcctttttctccctgcgcagaaaatcccgaagcaaggactag

SEQ ID NO: 37004 - DNA, 1818 bp, Artificial Sequence
  derived and/or modified sequence
agcctgaagatgggcgaggagcggtgggtgagcctgacccccgaggagtttgaccagttgcagaagtactccgaatacagtagtaagaagataaaagacgccctgactgagttcaacgaggggggaagtctaaagcagtacgatccacacgagcctatctcctacgacgtctttaaactgttcatgagggcatacctggaggtagacctaccacagcccttgtccacgcatctcttcttggctttctcgcagaaacctaggcatgaaaccagcgaccaccccaccgagggagctagcaacagtgaggctaatagtgctgataccaacattcagaatgctgataacgccacaaaagccgacgaggcctgcgctcccgatactgagtccaatatggcagagaaacaggcccctgccgaagaccaggtcgccgcaacacctttggaaccccccgtgcctcggtcaagttcatctgagtcccccgttgtatatcttaaggacgtggtgtgctatctgtcactgctggagaccgggagacctcaggataagttggagtttatgttccggctgtacgattcagacgaaaatggcctgctggaccaagctgagatggactgcatcgtcaaccagatgctccatatcgcccagtaccttgagtgggaccccaccgaacttaggccgatcttaaaggagatgctgcagggcatggactacgatagagatgggtttgtaagcctgcaagagtgggtccacggcggaatgacaacaatcccgctgctcgtcctcttgggaatggacgatagtggttcaaaaggagatggccgccacgcatggacgatgaaacattttaaaaagccgacttactgcaacttttgtcacataatgttgatgggcgttcggaagcagggtctgtgctgtacctattgtaaatacactgtgcacgagaggtgcgttagcaggaacatccccggttgtgtaaagacatattctaaagctaagcggagcggggaatttcacagaaaatgtgagctatccacactctgcgatggcggggagctgcgcgatcatatcctgttgccaactagcatctgccccatcactcgggacagacctggagagaaaagtgacggctgcgtgtctgccaaaggggagctcgtgatgcagtacaaaatcatccctactccagggacacaccctctcctcgttctggtgaatccaaagagtggcgggaggcagggagagagaatcctgcgaaaatttcactatctgctgaacccaaaacaggtctttaatctcgacaacggggggcctaccccagggctgaacttcttccgggatacccctgattttagggtcctggcttgtggcggggatggaaccgtgggctggattttagactgcatagacaaagcgaacttcgccaagcacccaccagtggccgttctacctctggggactggcaacgatctggcgcgctgtctccgctggggcggcggttatgaaggtgggtctcttacaaaaattcttaaggacatcgaacagtctcctctggtgatgctggaccggtggcacctggaagttataccccgagaagaagtggagaacggagatcaagtgccttacagtattatgaacaactactttagcattggggtggacgcgtcaatcgcccaccggtttcatgtcatgagggagaaacacccagagaagttcaattcacgcatgaaaaataagttgtggtatttcgagttcggtacgtcggaaacctttgcggctacctgcaagaagctccatgatcatatcgagctggagtggtgttag

SEQ ID NO: 37005 - DNA, 2199 bp, Artificial Sequence
  derived and/or modified sequence
atgggcgaggagcggtgggtgagcctgacccccgaggagttcgaccagttgcagaaatacagcgaatactctagcaagaaaattaaagacgccttaaccgagttcaacgagggtggctcactgaagcagtatgacccacatgaaccaatatcctacgacgtgttcaaactgttcatgcgcgcttacctggaggtggatctgccccagcccttatctacccacttatttcttgcgttttctcaaaagcctaggcacgagacctccgatcatccgaccgagggagcgagtaactcagaggctaacagcgctgacaccaacatacagaatgcagacaatgccactaaggctgacgaggcgtgcgcgccagacacagagagcaacatggctgaaaagcaggctcccgccgaagaccaagtagccgccacgcctctggagccccccgtccctcgaagcagctcgtctgaatcccctgtcgtctatctgaaagacgtggtgtgttacctttcactgttagaaaccgggcgcccacaggataaacttgagttcatgtttcggctgtatgatagtgatgaaaatggcctgcttgaccaggccgagatggattgcattgtgaatcagatgcttcacattgctcaatatctggaatgggatcccactgagctgcgtcctatcctcaaggagatgcttcagggaatggattacgaccgggacggtttcgtttcactgcaggaatgggtgcacggtggtatgacaactatcccccttctggtgctgctgggtatggatgattctggatctaaaggggatgggcgacatgcttggaccatgaagcacttcaagaaacccacatactgcaacttttgtcacatcatgttgatgggagtccgaaagcaaggcctctgctgcacatattgcaaatacaccgtgcacgagagatgcgtgtcccgaaacatcccaggctgcgtgaagacttactctaaagccaaacggagtggcgagttccacagaaagtgcgaactgagcactttgtgtgatgggggcgaactgcgcgaccacatcttgcttccaaccagtatttgccccatcacccgctacaagattatcccgacgcctggcacccacccactgcttgtgctagtgaaccctaaatcaggcggccgccagggtgaacgaatccttcggaaattccattaccttctaaatcctaagcaggtttttaatttggataacggcggccctacccccggactgaatttcttcagggatacacctgatttccgggtcctggcctgcgggggagacgggaccgttggatggatcctcgactgcatcgacaaggcgaattttgccaagcatcctcccgtggccgtgctgcccctcggcacggggaacgacctcgccagatgcttgcggtggggcggcggctatgaaggcggttccctgacgaaaatattgaaagacatcgagcagagccctctggtgatgttagacaggtggcacttggaggttatacctagagaagaggtagaaaacggcgatcaggtgccatacagcataatgaacaattacttttccataggcgtggacgcatcaattgcacatcgattccatgtcatgcgggagaaacacccagagaaattcaactcaagaatgaaaaataaactttggtactttgaattcggtacttctgaaacgtttgccgcaacatgtaagaaattgcacgatcatattgaactggagtgcgacggagtcggcgtggacctttctaacatcttcctggaagggatcgcaatccttaacatcccatcaatgtacggagggaccaatctctggggagagaataagaaaaatagagccgtcatccgtgagtctcgcaagggagtgacggatcctaaagaactgaaattttgcgtgcaggacttatccgaccagctcctcgaggtcgtggggctggagggtgccatggagatgggccagatatacactggtcttaaatcagcgggccgccgcctggcccagtgtgccagcgttaccatcagaacaaacaagctgctgccaatgcaggtggacggagaaccatggatgcagccctgctgcaccattaagatcacccacaagaaccaggcacccatgatgatgggccccccccaaaagagcagcttcttctccctcagaagaaagtcgcggtcaaaggattag

SEQ ID NO: 37006 - DNA, 2259 bp, Artificial Sequence
  derived and/or modified sequence
atgggagaagaacgttgggtctcccttactcctgaggagttcgaccaactgcagaagtatagtgagtatagttcaaagaagatcaaggacgccctgacggaatttaatgaggggggaagtcttaaacaatacgacccacatgagcccattagctatgatgtctttaaactgttcatgcgggcatacctcgaggtcgatctgccacaaccactgtccactcacctgtttctggctttttcccagaagcctagacatgaaaccagcgatcaccctactgaaggtgcaagtaactccgaagctaacagcgcggacacaaacattcagaatgccgacaacgccacaaaagctgatgaggcttgcgcccctgacactgagagcaatatggctgagaagcaggctcccgcagaggaccaggtggccgcaacgccacttgagcccccagtgcccagatcaagttcaagtgagagcccagtggtgtatttgaaagacgtcgtgtgctatctgagcttgctcgaaactggcaggcctcaggataaactagagtttatgtttcgactttatgactcagacgagaacggtctgcttgaccaggcagagatggactgcatagttaaccaaatgctgcacattgcccagtatctggagtgggatccaaccgaactacgtcccatcctgaaggaaatgctccagggaatggattacgatagggatgggttcgtgtctctccaagagtgggtgcatggaggcatgaccacaatccctcttttggtgctcctggggatggacgatagcggcagtaagggagatggtcgtcatgcatggacgatgaagcactttaagaaacccacgtattgcaatttctgtcatattatgctgatgggcgtgcgcaaacaggggctgtgttgcacctattgtaagtatactgttcatgagaggtgtgtgagtaggaatataccaggctgcgtgaagacatattctaaggcgaaaaggtcaggggagttccaccgcaaatgtgagctgtcaaccctctgtgacggaggagagctgcgcgatcacatcctcctgcccaccagcatctgcccaattactcgggacaggccaggcgaaaagtcggacggctgtgtgtctgcaaaaggagagttagtgatgcagtataagattattccaacccctggcacccacccactcttggtgcttgtgaaccctaagagcggtggtaggcagggggaacggattctccgaaagttccattatttgctcaaccccaagcaggtgtttaatctggacaatgggggtcctaccccgggactgaatttctttcgcgatactcctgacttccgggtcctggcctgcggcggagatggaacagtcggctggattctagactgtatagataaagcgaactttgcaaagcacccccctgttgcagtcctcccccttggcaccgggaatgacctggcaaggtgcctgcgctggggcggtgggtacgagggcggatctctgactaagatactcaaagacatagaacagtctcccttggttatgctcgacagatggcaccttgaggtgatccctcgcgaggaagtcgaaaacggagaccaagtgccctacagtataatgaataactacttttccatcggagtcgacgcatctatagcacaccggttccacgtcatgagggagaagcatccagagaaattcaactcaagaatgaagaacaaactgtggtacttcgagttcggcacctctgaaacattcgccgcaacttgcaaaaaactgcacgatcacatcgagttggaatgcgacggcgtgggggtggatctgtccaacattttcctggaggggatagccattcttaacatcccgagtatgtacggaggaacaaatctctggggagagaacaaaaagaaccgcgctgtcatccgggagtcaaggaaaggagtaacagatcccaaggagctcaaattctgtgtgcaggacttgtccgatcagctgctggaagtggtgggccttgaaggagccatggagatggggcaaatctatacggggctcaagtcggcaggcagaagactggctcagtgtgcttcagtgaccattcgcactaataagctactgccgatgcaagtcgatggcgaaccttggatgcagccctgttgcactatcaagatcactcataagaaccaggctccaatgatgatgggtccaccacagaaatcctcctttttctcactcaggcgaaaatcaaggtcgaaggactag

SEQ ID NO: 37007 - DNA, 1818 bp, Artificial Sequence
  derived and/or modified sequence
agcctgaaaatgggggaagagagatgggtgtcacttacacctgaggaatttgatcaactccagaaatactctgagtattcttctaagaagattaaagacgccctgactgaattcaacgagggaggttcactgaagcaatatgatccgcacgagcccatctcttatgacgtcttcaagctgtttatgagggcatacttggaagtggatctccctcaacccctgagtactcatctcttcctggcgttctcgcagaagccacggcatgagacttccgaccatccaactgagggcgctagcaattccgaggctaactcggcagacacaaacatccagaacgccgataacgctactaaggccgatgaagcctgcgcccctgacaccgagtctaacatggcagaaaaacaggcacccgctgaagaccaggtggccgcaaccccactagagcccccagttcccagatcctccagcagtgagtcaccggtggtgtacctcaaggatgtagtatgttatctgtcactgctcgaaacaggcagaccacaggacaaacttgagttcatgtttcggctgtatgattcagacgaaaacggtctactggaccaggcggaaatggattgtattgtgaaccaaatgctccatatcgctcaatacttggagtgggacccaactgaactccggccaatcctcaaggaaatgctccagggcatggattatgatagagatggattcgtgagcctgcaggaatgggtccatggaggtatgaccaccattcccctgctggtactgctcggaatggacgactccggtagcaagggagacggtcgacatgcatggacgatgaagcactttaaaaagcccacttattgcaatttttgccacattatgctgatgggcgtgcgaaagcagggtctctgttgcacatattgcaagtacacagtgcacgagagatgcgtgtctcggaacataccaggctgcgtgaaaacctactccaaagctaagagatctggcgaatttcacaggaagtgtgagctgagcactctgtgtgacgggggtgagctgcgcgaccacatccttctgcctacttcaatctgccctatcactcgagaccggcctggggaaaaatcagatggctgcgtgtccgccaaaggagagctggtgatgcagtacaagatcattcctacgccgggtactcaccccctgcttgtcttggtaaacccaaagagtgggggtagacagggcgaacggatcctgcgcaagttccactacttgctaaacccaaagcaggtgttcaatctggacaacgggggtcctacccccggactgaatttctttcgcgacacgccagactttcgggtgttggcctgcggaggtgacggaactgtgggatggattttggattgtatcgataaagccaactttgccaaacacccgccagtcgcagtgctgcccctcggtaccgggaatgatctggcaaggtgcctaaggtgggggggtggatatgaagggggaagccttaccaagatccttaaggacatcgagcaaagccctctggtcatgctggacagatggcacttggaagtcatccctcgggaagaggttgaaaatggcgatcaggtcccatattctataatgaataattatttcagcatcggagtggatgctagcatcgcccatcggttccatgtgatgagggagaagcaccctgagaagttcaactccagaatgaaaaacaagctgtggtattttgagtttgggacctcagagacctttgctgccacttgtaaaaaactccacgaccatattgagctggagtggtgttag

SEQ ID NO: 37008 - DNA, 2199 bp, Artificial Sequence
  derived and/or modified sequence
atgggggaggaacgctgggtaagtttgactccggaggaattcgaccagttacagaagtacagcgaatactcaagtaaaaaaattaaagacgcgctaacagaatttaacgagggagggtccctcaaacagtatgatccccatgaacctatcagctatgatgtgtttaagctttttatgcgtgcttacctggaagtggacctgccccaacccctgagcacccacctatttcttgcgttcagccagaagccaaggcatgaaacaagcgatcatcccacagagggggcatctaactccgaggcgaattccgccgataccaatatacagaatgcggacaacgccactaaagccgatgaagcttgcgcgccagacacggaatctaacatggctgaaaaacaggccccagctgaagatcaggtggccgctacacctctcgaacctcctgtcccacggagttccagttctgaatcccccgtggtatatttaaaggacgtcgtgtgttacctctctctcctggagaccggtcggcctcaagacaaacttgaattcatgttcagactctatgactcagacgagaacggactcctcgatcaggctgagatggattgcatcgtgaaccagatgctacatattgcccagtacttagagtgggacccaacggagctacggcctattctcaaggagatgttgcagggcatggattacgatcgagatggttttgtaagcctacaggagtgggtgcacgggggtatgactacaattcccctgcttgtcctgttaggtatggacgacagtggatctaaaggtgacggacggcacgcctggacaatgaagcacttcaaaaaacctacgtactgtaatttctgccacattatgctaatgggagtcagaaaacaggggctgtgctgcacctattgcaaatataccgtgcacgagcgttgcgtgtccaggaacatcccaggatgtgtaaagacctacagtaaggctaaacgctcgggcgaattccacagaaagtgcgaacttagtactctgtgcgatgggggagagctccgggaccatatcctcctgccaacgtctatatgtcctatcacccggtataaaattatccctacccctggaactcatcccctcctcgtgctggtgaatccgaagagcggtggtcgccagggtgaacggatcctaaggaagttccactatctccttaatccgaagcaggtgtttaacctggacaatgggggaccaacgcctggcttaaacttcttccgcgatacgccagacttccgcgtcctggcctgcggaggcgatgggaccgtgggatggattcttgactgcatcgacaaagccaattttgccaaacacccaccagtcgccgtgctgcctctcggtaccggcaatgacttggcccgatgtctgcggtggggcggtggttatgagggcggaagcctcaccaagatccttaaagatatcgagcaaagtcccctcgttatgctcgaccggtggcaccttgaggtcatccctagagaggaagtcgagaacggagaccaggtgccttactccatcatgaacaattacttttcaattggcgtcgacgcctcaatcgcccatcgttttcatgtcatgagagaaaaacatccggagaagtttaacagccgaatgaagaacaaactttggtatttcgagttcgggacctcagagactttcgcagccacctgtaagaagctccacgatcatattgaacttgagtgtgacggagtcggggtagacctctccaacatcttcctggagggcatcgctatcctcaacatcccaagtatgtacggaggcacaaacctctggggcgaaaacaagaagaacagagccgtgattagggagtccaggaaaggtgtaactgaccctaaggagctcaagttctgcgttcaggatctaagcgaccaacttctggaagtggtcggcttagaaggcgctatggagatgggacagatctatacagggttaaagagcgctgggagaaggctggcacagtgtgcaagtgtgacaatcagaacaaataaactgctgccaatgcaggtggacggtgagccttggatgcagccctgctgcacaataaaaatcacgcacaaaaatcaggcgcctatgatgatgggtcctccccaaaaatccagcttcttctcccttcgccgaaagtctaggagcaaagactag

SEQ ID NO: 37009 - DNA, 2259 bp, Artificial Sequence
  derived and/or modified sequence
atgggcgaggagagatgggtgagcctgacccccgaggagttcgaccagctgcagaagtacagcgagtacagcagcaagaagatcaaggacgccctgaccgagttcaacgagggcggcagcctgaagcagtacgacccccacgagcccatcagctacgacgtgttcaagctgttcatgagagcctacctggaggtggacctgccccagcccctgagcacccacctgttcctggccttcagccagaagcccagacacgagaccagcgaccaccccaccgagggcgccagcaacagcgaggccaacagcgccgacaccaacatccagaacgccgacaacgccaccaaggccgacgaggcctgcgcccccgacaccgagagcaacatggccgagaagcaggcccccgccgaggaccaggtggccgccacccccctggagccccccgtgcccagaagcagcagcagcgagagccccgtggtgtacctgaaggacgtggtgtgctacctgagcctgctggagaccggcagaccccaggacaagctggagttcatgttcagactgtacgacagcgacgagaacggcctgctggaccaggccgagatggactgcatcgtgaaccagatgctgcacatcgcccagtacctggagtgggaccccaccgagctgagacccatcctgaaggagatgctgcagggcatggactacgacagagacggcttcgtgagcctgcaggagtgggtgcacggcggcatgaccaccatccccctgctggtgctgctgggcatggacgacagcggcagcaagggcgacggcagacacgcctggaccatgaagcacttcaagaagcccacctactgcaacttctgccacatcatgctgatgggcgtgagaaagcagggcctgtgctgcacctactgcaagtacaccgtgcacgagagatgcgtgagcagaaacatccccggctgcgtgaagacctacagcaaggccaagagaagcggcgagttccacagaaagtgcgagctgagcaccctgtgcgacggcggcgagctgagagaccacatcctgctgcccaccagcatctgccccatcaccagagacagacccggcgagaagagcgacggctgcgtgagcgccaagggcgagctggtgatgcagtacaagatcatccccacccccggcacccaccccctgctggtgctggtgaaccccaagagcggcggcagacagggcgagagaatcctgagaaagttccactacctgctgaaccccaagcaggtgttcaacctggacaacggcggccccacccccggcctgaacttcttcagagacacccccgacttcagagtgctggcctgcggcggcgacggcaccgtgggctggatcctggactgcatcgacaaggccaacttcgccaagcacccccccgtggccgtgctgcccctgggcaccggcaacgacctggccagatgcctgagatggggcggcggctacgagggcggcagcctgaccaagatcctgaaggacatcgagcagagccccctggtgatgctggacagatggcacctggaggtgatccccagagaggaggtggagaacggcgaccaggtgccctacagcatcatgaacaactacttcagcatcggcgtggacgccagcatcgcccacagattccacgtgatgagagagaagcaccccgagaagttcaacagcagaatgaagaacaagctgtggtacttcgagttcggcaccagcgagaccttcgccgccacctgcaagaagctgcacgaccacatcgagctggagtgcgacggcgtgggcgtggacctgagcaacatcttcctggagggcatcgccatcctgaacatccccagcatgtacggcggcaccaacctgtggggcgagaacaagaagaacagagccgtgatcagagagagcagaaagggcgtgaccgaccccaaggagctgaagttctgcgtgcaggacctgagcgaccagctgctggaggtggtgggcctggagggcgccatggagatgggccagatctacaccggcctgaagagcgccggcagaagactggcccagtgcgccagcgtgaccatcagaaccaacaagctgctgcccatgcaggtggacggcgagccctggatgcagccctgctgcaccatcaagatcacccacaagaaccaggcccccatgatgatgggccccccccagaagagcagcttcttcagcctgagaagaaagagcagaagcaaggactag

SEQ ID NO: 37010 - DNA, 1818 bp, Artificial Sequence
  derived and/or modified sequence
agcctgaagatgggcgaggagagatgggtgagcctgacccccgaggagttcgaccagctgcagaagtacagcgagtacagcagcaagaagatcaaggacgccctgaccgagttcaacgagggcggcagcctgaagcagtacgacccccacgagcccatcagctacgacgtgttcaagctgttcatgagagcctacctggaggtggacctgccccagcccctgagcacccacctgttcctggccttcagccagaagcccagacacgagaccagcgaccaccccaccgagggcgccagcaacagcgaggccaacagcgccgacaccaacatccagaacgccgacaacgccaccaaggccgacgaggcctgcgcccccgacaccgagagcaacatggccgagaagcaggcccccgccgaggaccaggtggccgccacccccctggagccccccgtgcccagaagcagcagcagcgagagccccgtggtgtacctgaaggacgtggtgtgctacctgagcctgctggagaccggcagaccccaggacaagctggagttcatgttcagactgtacgacagcgacgagaacggcctgctggaccaggccgagatggactgcatcgtgaaccagatgctgcacatcgcccagtacctggagtgggaccccaccgagctgagacccatcctgaaggagatgctgcagggcatggactacgacagagacggcttcgtgagcctgcaggagtgggtgcacggcggcatgaccaccatccccctgctggtgctgctgggcatggacgacagcggcagcaagggcgacggcagacacgcctggaccatgaagcacttcaagaagcccacctactgcaacttctgccacatcatgctgatgggcgtgagaaagcagggcctgtgctgcacctactgcaagtacaccgtgcacgagagatgcgtgagcagaaacatccccggctgcgtgaagacctacagcaaggccaagagaagcggcgagttccacagaaagtgcgagctgagcaccctgtgcgacggcggcgagctgagagaccacatcctgctgcccaccagcatctgccccatcaccagagacagacccggcgagaagagcgacggctgcgtgagcgccaagggcgagctggtgatgcagtacaagatcatccccacccccggcacccaccccctgctggtgctggtgaaccccaagagcggcggcagacagggcgagagaatcctgagaaagttccactacctgctgaaccccaagcaggtgttcaacctggacaacggcggccccacccccggcctgaacttcttcagagacacccccgacttcagagtgctggcctgcggcggcgacggcaccgtgggctggatcctggactgcatcgacaaggccaacttcgccaagcacccccccgtggccgtgctgcccctgggcaccggcaacgacctggccagatgcctgagatggggcggcggctacgagggcggcagcctgaccaagatcctgaaggacatcgagcagagccccctggtgatgctggacagatggcacctggaggtgatccccagagaggaggtggagaacggcgaccaggtgccctacagcatcatgaacaactacttcagcatcggcgtggacgccagcatcgcccacagattccacgtgatgagagagaagcaccccgagaagttcaacagcagaatgaagaacaagctgtggtacttcgagttcggcaccagcgagaccttcgccgccacctgcaagaagctgcacgaccacatcgagctggagtggtgctag

SEQ ID NO: 37011 - DNA, 2199 bp, Artificial Sequence
  derived and/or modified sequence
atgggcgaggagagatgggtgagcctgacccccgaggagttcgaccagctgcagaagtacagcgagtacagcagcaagaagatcaaggacgccctgaccgagttcaacgagggcggcagcctgaagcagtacgacccccacgagcccatcagctacgacgtgttcaagctgttcatgagagcctacctggaggtggacctgccccagcccctgagcacccacctgttcctggccttcagccagaagcccagacacgagaccagcgaccaccccaccgagggcgccagcaacagcgaggccaacagcgccgacaccaacatccagaacgccgacaacgccaccaaggccgacgaggcctgcgcccccgacaccgagagcaacatggccgagaagcaggcccccgccgaggaccaggtggccgccacccccctggagccccccgtgcccagaagcagcagcagcgagagccccgtggtgtacctgaaggacgtggtgtgctacctgagcctgctggagaccggcagaccccaggacaagctggagttcatgttcagactgtacgacagcgacgagaacggcctgctggaccaggccgagatggactgcatcgtgaaccagatgctgcacatcgcccagtacctggagtgggaccccaccgagctgagacccatcctgaaggagatgctgcagggcatggactacgacagagacggcttcgtgagcctgcaggagtgggtgcacggcggcatgaccaccatccccctgctggtgctgctgggcatggacgacagcggcagcaagggcgacggcagacacgcctggaccatgaagcacttcaagaagcccacctactgcaacttctgccacatcatgctgatgggcgtgagaaagcagggcctgtgctgcacctactgcaagtacaccgtgcacgagagatgcgtgagcagaaacatccccggctgcgtgaagacctacagcaaggccaagagaagcggcgagttccacagaaagtgcgagctgagcaccctgtgcgacggcggcgagctgagagaccacatcctgctgcccaccagcatctgccccatcaccagatacaagatcatccccacccccggcacccaccccctgctggtgctggtgaaccccaagagcggcggcagacagggcgagagaatcctgagaaagttccactacctgctgaaccccaagcaggtgttcaacctggacaacggcggccccacccccggcctgaacttcttcagagacacccccgacttcagagtgctggcctgcggcggcgacggcaccgtgggctggatcctggactgcatcgacaaggccaacttcgccaagcacccccccgtggccgtgctgcccctgggcaccggcaacgacctggccagatgcctgagatggggcggcggctacgagggcggcagcctgaccaagatcctgaaggacatcgagcagagccccctggtgatgctggacagatggcacctggaggtgatccccagagaggaggtggagaacggcgaccaggtgccctacagcatcatgaacaactacttcagcatcggcgtggacgccagcatcgcccacagattccacgtgatgagagagaagcaccccgagaagttcaacagcagaatgaagaacaagctgtggtacttcgagttcggcaccagcgagaccttcgccgccacctgcaagaagctgcacgaccacatcgagctggagtgcgacggcgtgggcgtggacctgagcaacatcttcctggagggcatcgccatcctgaacatccccagcatgtacggcggcaccaacctgtggggcgagaacaagaagaacagagccgtgatcagagagagcagaaagggcgtgaccgaccccaaggagctgaagttctgcgtgcaggacctgagcgaccagctgctggaggtggtgggcctggagggcgccatggagatgggccagatctacaccggcctgaagagcgccggcagaagactggcccagtgcgccagcgtgaccatcagaaccaacaagctgctgcccatgcaggtggacggcgagccctggatgcagccctgctgcaccatcaagatcacccacaagaaccaggcccccatgatgatgggccccccccagaagagcagcttcttcagcctgagaagaaagagcagaagcaaggactag

SEQ ID NO: 37012 - DNA, 3152 bp, Artificial Sequence
  derived and/or modified sequence
ttgcctggtgaggaagagccaggacttctgaatttaccttgaatacagacaggaggatgttgcctaaggaatagcagagatcttgtctcatcttctgagaggtgcctgctgctgctgtatacacttgagtgctcccagaagtctcctgaaaggcttacatcgcaaacctgcaatgagccaggccctgggctgggcctccacttcagcctagtgaacaaaactccatcactgccctttagccactcacataaagtttaaaaatgggtgaagaacggtgggtctccctcactccagaagaatttgaccaactccagaaatattcagaatattcctccaagaagataaaagatgccttgactgaatttaatgagggtgggagcctcaaacaatatgacccacatgagccgattagctatgatgtcttcaagctgttcatgagggcgtacctggaggtggaccttccccagccactgagcactcacctcttcctggccttcagccagaagcccagacacgagacctctgaccacccgacggagggagccagcaacagtgaggccaacagcgcagatactaatatacagaatgcagataatgccaccaaagcagacgaggcctgtgcccctgatactgaatcaaatatggctgagaagcaagcaccagctgaagaccaagtggctgcgacccccctggaaccccccgtccctcggtcttcaagctcggaatccccagtggtatacctgaaggatgttgtgtgctacctgtccctgctggagacggggaggcctcaggataagctggagttcatgtttcgcctctatgattcagatgagaacggtctcctggaccaagcggagatggattgcattgtcaaccaaatgctgcatattgcccagtacctggagtgggatcccacagagctgaggcctatattgaaggagatgctgcaagggatggactacgaccgggacggctttgtgtctctacaggaatgggtccatggagggatgaccaccatcccattgctggtcctcctggggatggatgactctggctccaagggggatgggcggcacgcctggaccatgaagcacttcaagaaaccaacctactgcaacttctgccatatcatgctcatgggcgtccgcaagcaaggcctgtgctgcacttactgtaaatacactgtccacgaacgctgtgtgtccagaaacattcctggttgtgtcaaaacgtactcaaaagccaaaaggagtggtgagtttcaccgcaaatgtgaattatcaacgttgtgtgacggtggggaactcagagaccacatcttactgcccacctccatatgccccatcacccgggacaggccaggtgagaagtctgatggctgcgtgtccgccaagggcgaacttgtcatgcagtataagatcatccccaccccgggtacccaccccctgctggtcttggtgaaccccaagagtggagggagacaaggagaaagaattcttcggaaattccactatctgctcaaccccaaacaagttttcaacctggacaatggggggcctactccagggttgaactttttccgtgatactccagacttccgtgttttggcctgtggtggagatgggacagttggctggattttggattgcattgataaggccaactttgcaaagcatccaccagtggctgtcctgcctcttggaacaggaaatgaccttgcccgttgtctccgctggggaggaggttatgaagggggcagcttgacaaaaatcctgaaagacattgagcagagccccttggtgatgctggaccgctggcatctggaagtcatccccagagaggaagtggaaaacggggaccaggtcccatacagcatcatgaacaactatttctccattggtgtggacgcttccattgcacacagattccatgtgatgagagagaaacatcctgaaaaattcaacagcaggatgaagaacaagctgtggtactttgaatttggcacctcggagacttttgcagcgacctgcaagaaactccacgaccacattgagttggagtgtgatggggttggggtggacctgagcaacatcttcctggaaggcattgccattctcaacattcccagcatgtacggaggcaccaatctctggggagaaaacaagaagaaccgggctgtgatccgggaaagcaggaagggtgtcactgaccccaaagaactgaaattctgcgttcaagacctcagtgaccagctccttgaagtggtggggctagaaggagccatggagatggggcagatctacaccggcctgaagagtgcaggcaggaggctggcccagtgcgcctctgtcaccatcaggacaaacaagctgctgccaatgcaagtggatggagaaccctggatgcagccatgttgcacgattaaaattactcacaagaaccaagcgcccatgatgatggggcctccccagaagagcagcttcttctcgttgagaaggaagagccgttcaaaagactaaacagtgtgccaaacaccagctaaaccaagagagaaagcaagaaactataatgcacactcacacacaatttatgtgcacactcacacatgcacacacacacacacatacacactcttctctaaccagtggaagcaaagccacccttcgggaagaaaacgtcaccttgccatacattctgtttcaacagtgggtacacccctaacagagccagtgccaacaaaacattttgaatggacttagggcccatgaggttgtggctggcttaggcagcaacctccacattcccacaggccttgagcagaattttctgagactgaagggaaatccccctttctttctaccagccctgcaagtttcctcatggacgctcgcgaggagcaggctgcaggtttcctgcctatggtgagatcagatgtggccaagggaaggagctctggttccagagaatttgcacaaagttccctctgtacagagacaaaacggcctccggctctcagagcataatccttggcagggctcagcaggcgcacgttggtttcttggtcgtcctttgagtgacaacttctccgtgaacctgctgaagaggcagaaaggctgtggaaagctgtatttccattcttgggtttctgcgcc

SEQ ID NO: 37013 - DNA, 2343 bp, Artificial Sequence
  derived and/or modified sequence
gcagtgccgtagtagcgggccacggagatagacagctttggagctgctgaactccgagcacagggtgaagaccccggcgctaccaaccacagcctggcagcctggtctccgcggcacccactggggctgcatccccctcccccgagagggctgcgcaggcgggaagacgcccagaggccagcttcggtcccccttctgtctctcggttcctctttcctcccaagtaagggaataaaccgcgaagaaggagcgccccgggccaccgcgcaaccaagtgttgcctggtgaggaagagccaggacttctgaatttaccttgaatacagacaggaggatgttgcctaaggaatagcagagatcttgtctcatcttctgagaggtgcctgctgctgctgtatacacttgagtgctcccagaagtctcctgaaaggcttacatcgcaaacctgcaatgagccaggccctgggctgggcctccacttcagcctagtgaacaaaactccatcactgccctttagccactcacataaagtttaaaaatgggtgaagaacggtgggtctccctcactccagaagaatttgaccaactccagaaatattcagaatattcctccaagaagataaaagatgccttgactgaatttaatgagggtgggagcctcaaacaatatgacccacatgagccgattagctatgatgtcttcaagctgttcatgagggcgtacctggaggtggaccttccccagccactgagcactcacctcttcctggccttcagccagaagcccagacacgagacctctgaccacccgacggagggagccagcaacagtgaggccaacagcgcagatactaatatacagaatgcagataatgccaccaaagcagacgaggcctgtgcccctgatactgaatcaaatatggctgagaagcaagcaccagctgaagaccaagtggctgcgacccccctggaaccccccgtccctcggtcttcaagctcggaatccccagtggtatacctgaaggatgttgtgtgctacctgtccctgctggagacggggaggcctcaggataagctggagttcatgtttcgcctctatgattcagatgagaacggtctcctggaccaagcggagatggattgcattgtcaaccaaatgctgcatattgcccagtacctggagtgggatcccacagagctgaggcctatattgaaggagatgctgcaagggatggactacgaccgggacggctttgtgtctctacaggaatgggtccatggagggatgaccaccatcccattgctggtcctcctggggatggatgactctggctccaagggggatgggcggcacgcctggaccatgaagcacttcaagaaaccaacctactgcaacttctgccatatcatgctcatgggcgtccgcaagcaaggcctgtgctgcacttactgtaaatacactgtccacgaacgctgtgtgtccagaaacattcctggttgtgtcaaaacgtactcaaaagccaaaaggagtggtgagtttcaccgcaaatgtgaattatcaacgttgtgtgacggtggggaactcagagaccacatcttactgcccacctccatatgccccatcacccgggacaggccaggtgagaagtctgatggctgcgtgtccgccaagggcgaacttgtcatgcagtataagatcatccccaccccgggtacccaccccctgctggtcttggtgaaccccaagagtggagggagacaaggagaaagaattcttcggaaattccactatctgctcaaccccaaacaagttttcaacctggacaatggggggcctactccagggttgaactttttccgtgatactccagacttccgtgttttggcctgtggtggagatgggacagttggctggattttggattgcattgataaggccaactttgcaaagcatccaccagtggctgtcctgcctcttggaacaggaaatgaccttgcccgttgtctccgctggggaggaggttatgaagggggcagcttgacaaaaatcctgaaagacattgagcagagccccttggtgatgctggaccgctggcatctggaagtcatccccagagaggaagtggaaaacggggaccaggtcccatacagcatcatgaacaactatttctccattggtgtggacgcttccattgcacacagattccatgtgatgagagagaaacatcctgaaaaattcaacagcaggatgaagaacaagctgtggtactttgaatttggcacctcggagacttttgcagcgacctgcaagaaactccacgaccacattgagttggagtggtgt

SEQ ID NO: 37014 - DNA, 3211 bp, Artificial Sequence
  derived and/or modified sequence
agtgccgtagtagcgggccacggagatagacagctttggagctgctgaactccgagcacagggtgaagaccccggcgctaccaaccacagcctggcagcctggtctccgcggcacccactggggctgcatccccctcccccgagagggctgcgcaggcgggaagacgcccagaggccagcttcggtcccccttctgtctctcggttcctctttcctcccaagtaagggaataaaccgcgaagaaggagcgccccgggccaccgcgcaaccaagtgttgcctggtgaggaagagccaggacttctgaatttaccttgaatacagacaggaggatgttgcctaaggaatagcagagatcttgtctcatcttctgagaggtgcctgctgctgctgtatacacttgagtgctcccagaagtctcctgaaaggcttacatcgcaaacctgcaatgagccaggccctgggctgggcctccacttcagcctagtgaacaaaactccatcactgccctttagccactcacataaagtttaaaaatgggtgaagaacggtgggtctccctcactccagaagaatttgaccaactccagaaatattcagaatattcctccaagaagataaaagatgccttgactgaatttaatgagggtgggagcctcaaacaatatgacccacatgagccgattagctatgatgtcttcaagctgttcatgagggcgtacctggaggtggaccttccccagccactgagcactcacctcttcctggccttcagccagaagcccagacacgagacctctgaccacccgacggagggagccagcaacagtgaggccaacagcgcagatactaatatacagaatgcagataatgccaccaaagcagacgaggcctgtgcccctgatactgaatcaaatatggctgagaagcaagcaccagctgaagaccaagtggctgcgacccccctggaaccccccgtccctcggtcttcaagctcggaatccccagtggtatacctgaaggatgttgtgtgctacctgtccctgctggagacggggaggcctcaggataagctggagttcatgtttcgcctctatgattcagatgagaacggtctcctggaccaagcggagatggattgcattgtcaaccaaatgctgcatattgcccagtacctggagtgggatcccacagagctgaggcctatattgaaggagatgctgcaagggatggactacgaccgggacggctttgtgtctctacaggaatgggtccatggagggatgaccaccatcccattgctggtcctcctggggatggatgactctggctccaagggggatgggcggcacgcctggaccatgaagcacttcaagaaaccaacctactgcaacttctgccatatcatgctcatgggcgtccgcaagcaaggcctgtgctgcacttactgtaaatacactgtccacgaacgctgtgtgtccagaaacattcctggttgtgtcaaaacgtactcaaaagccaaaaggagtggtgagtttcaccgcaaatgtgaattatcaacgttgtgtgacggtggggaactcagagaccacatcttactgcccacctccatatgccccatcacccggtataagatcatccccaccccgggtacccaccccctgctggtcttggtgaaccccaagagtggagggagacaaggagaaagaattcttcggaaattccactatctgctcaaccccaaacaagttttcaacctggacaatggggggcctactccagggttgaactttttccgtgatactccagacttccgtgttttggcctgtggtggagatgggacagttggctggattttggattgcattgataaggccaactttgcaaagcatccaccagtggctgtcctgcctcttggaacaggaaatgaccttgcccgttgtctccgctggggaggaggttatgaagggggcagcttgacaaaaatcctgaaagacattgagcagagccccttggtgatgctggaccgctggcatctggaagtcatccccagagaggaagtggaaaacggggaccaggtcccatacagcatcatgaacaactatttctccattggtgtggacgcttccattgcacacagattccatgtgatgagagagaaacatcctgaaaaattcaacagcaggatgaagaacaagctgtggtactttgaatttggcacctcggagacttttgcagcgacctgcaagaaactccacgaccacattgagttggagtgtgatggggttggggtggacctgagcaacatcttcctggaaggcattgccattctcaacattcccagcatgtacggaggcaccaatctctggggagaaaacaagaagaaccgggctgtgatccgggaaagcaggaagggtgtcactgaccccaaagaactgaaattctgcgttcaagacctcagtgaccagctccttgaagtggtggggctagaaggagccatggagatggggcagatctacaccggcctgaagagtgcaggcaggaggctggcccagtgcgcctctgtcaccatcaggacaaacaagctgctgccaatgcaagtggatggagaaccctggatgcagccatgttgcacgattaaaattactcacaagaaccaagcgcccatgatgatggggcctccccagaagagcagcttcttctcgttgagaaggaagagccgttcaaaagactaaacagtgtgccaaacaccagctaaaccaagagagaaagcaagaaactataatgcacactcacacacaatttatgtgcacactcacacatgcacacacacacacacatacacactcttctctaaccagtggaagcaaagccacccttcgggaagaaaacgtcaccttgccatacattctgtttcaacagtgggtacacccctaacagagccagtgccaacaaaacattttgaatggacttagggcccatgaggttgtggctggcttaggcagcaacctccacattcccacaggccttgagcagaattttctgagactgaagggaaatccccctttctttctaccagccctgcaagtttcctcatggacgctcgcgaggagcaggctgcaggtttcctgcctatggtgagatcagatgtggccaagggaaggagctctggttccagagaatttgcacaaagttccctctgtacagagaca

SEQ ID NO: 37015 - protein, 342 aa, Artificial Sequence
  derived and/or modified sequence
MSMSPTVIILACLGFFLDQSVWAHVGGQDKPFCSAWPSAVVPQGGHVTLRCHCRRGFNIFTLYKKDGVPVPELYNRIFWNSFLISPVTPAHAGTYRCRGFHPHSPTEWSAPSNPLVIMVTGLYEKPSLTARPGPTVRAGENVTLSCSSQSSFDIYHLSREGEAHELRLPAVPSINGTFQADFPLGPATHGETYRCFGSFHGSPYEWSDPSDPLPVSVTGNPSSSWPSPTEPSFKTDAAVMNQEPAGHRTVNREDSDEQDPQEVTYAQLDHCIFTQRKITGPSQRSKRPSTDTSVCIELPNAEPRALSPAHEHHSQALMGSSRETTALSQTQLASSNVPAAGI

SEQ ID NO: 37016 - protein, 342 aa, Artificial Sequence
  derived and/or modified sequence
MSMSPTVIILACLGFFLDQSVWAHVGGQDKPFCSAWPSAVVPQGGHVTLRCHYRRGFNIFTLYKKDGVPVPELYNRIFWNSFLISPVTPAHAGTYRCRGFHPHSPTEWSAPSNPLVIMVTGLYEKPSLTARPGPTVRAGENVTLSCSSQSSFDIYHLSREGEAHELRLPAVPSINGTFQADFPLGPATHGETYRCFGSFHGSPYEWSDPSDPLPVSVTGNPSSSWPSPTEPSFKTDAAVMNQEPAGHRTVNREDSDEQDPQEVTYAQLDHCIFTQRKITGPSQRSKRPSTDTSVCIELPNAEPRALSPAHEHHSQALMGSSRETTALSQTQLASSNVPAAGI

SEQ ID NO: 37017 - protein, 325 aa, Artificial Sequence
  derived and/or modified sequence
MSMSPTVIILACLGFFLDQSVWAHVGGQDKPFCSAWPSAVVPQGGHVTLRCHYRRGFNIFTLYKKDGVPVPELYNRIFWNSFLISPVTPAHAGTYRCRGFHPHSPTEWSAPSNPLVIMVTGLYEKPSLTARPGPTVRAGENVTLSCSSQSSFDIYHLSREGEAHELRLPAVPSINGTFQADFPLGPATHGETYRCFGSFHGSPYEWSDPSDPLPVSVTDAAVMNQEPAGHRTVNREDSDEQDPQEVTYAQLDHCIFTQRKITGPSQRSKRPSTDTSVCIELPNAEPRALSPAHEHHSQALMGSSRETTALSQTQLASSNVPAAGI

SEQ ID NO: 37018 - protein, 230 aa, Artificial Sequence
  derived and/or modified sequence
MSMSPTVIILACLGFFLDQSVWAHVGLYEKPSLTARPGPTVRAGENVTLSCSSQSSFDIYHLSREGEAHELRLPAVPSINGTFQADFPLGPATHGETYRCFGSFHGSPYEWSDPSDPLPVSVTDAAVMNQEPAGHRTVNREDSDEQDPQEVTYAQLDHCIFTQRKITGPSQRSKRPSTDTSVCIELPNAEPRALSPAHEHHSQALMGSSRETTALSQTQLASSNVPAAGI

SEQ ID NO: 37019 - DNA, 1029 bp, Artificial Sequence
  derived and/or modified sequence
atgtccatgagccccaccgtgatcatattagcgtgcctgggattcttcctagaccaaagtgtgtgggcccacgtcggcggccaggacaagcctttttgctcagcttggccctccgccgtcgtacctcagggcgggcatgttacgctacgatgccactgcaggagaggattcaatatctttacgctatacaaaaaagatggcgtgccagtccccgaactgtataacaggatcttttggaattccttcctaataagccccgtaacccctgcacacgctgggacctataggtgccgggggtttcacccacattcacctactgaatggtccgccccctctaatcccctcgttattatggtgacagggctgtacgaaaagccttccctcacggcccgtccgggaccaaccgtgcgcgccggggagaacgtgacgctctcatgtagtagtcagtctagtttcgacatctaccatctttctcgcgaaggggaggctcatgaactgcggctacccgccgtccctagtatcaatggaactttccaggcagatttccccctcggacctgctacgcacggcgagacttatcgttgtttcggttccttccacgggtcaccctatgagtggtcagacccctctgatccgttgcccgtttccgtgacagggaacccctcatcgtcctggccatcccccaccgaacctagctttaagacggacgctgccgtcatgaatcaggaacctgcaggacatcgtaccgtgaacagagaggactccgatgagcaggaccctcaggaagttacttatgcgcaattagatcattgtatttttacgcagcgcaaaattactgggccgagccaaagatcgaaacgcccgtccaccgacacttccgtgtgtatcgagctcccaaatgccgaaccccgggcattgagtccagcccacgaacatcactctcaagctctgatgggatccagcagagagaccacggccttgtcacagactcagctcgcatcatctaatgtcccggctgccgggatttag

SEQ ID NO: 37020 - DNA, 1029 bp, Artificial Sequence
  derived and/or modified sequence
atgagtatgagccccactgtgataatcctcgcctgcctcggcttctttcttgatcagtctgtctgggcccacgtaggtgggcaggacaagcccttttgctctgcttggccctcagccgtggtgcctcaaggaggacacgtgaccttgcgctgccattacaggaggggttttaacatcttcacattgtacaagaaggacggagtgcctgtgcctgaactgtataaccggattttctggaatagtttcttgatttctcccgtgaccccggcacatgctggcacataccggtgtcgtggctttcatccgcacagccccaccgagtggagtgccccttctaatcccttggtcatcatggttaccgggctatacgaaaaaccctccctaaccgctcgcccaggtccaaccgtaagggccggcgagaatgtgaccctgtcttgctcctcccagtcaagcttcgacatctaccacctctcaagggaaggcgaggcacacgagctccgtctgcctgcagtcccgagtattaacggaacctttcaggccgacttccccttaggaccggccacacacggggaaacctacaggtgctttggatctttccacggttctccttatgaatggtccgatcctagtgacccccttcccgtgagtgtgacagggaaccctagttcaagctggccctcccctacagaaccttcctttaagacagacgcagccgtgatgaaccaggaacctgcaggccatcgcacggtaaaccgagaggacagtgacgaacaggacccccaagaggtcacatacgcccagctggaccactgcatttttacgcagaggaaaattacaggaccatctcagaggtcgaagcgcccctccactgacacttccgtctgcatcgagctcccaaatgcggagccccgcgccctgtccccggctcacgagcaccacagccaggcattgatgggctctagcagagaaacgaccgcactgagccagacacagctggcatcctccaacgtcccggccgctggaatatag

SEQ ID NO: 37021 - DNA, 978 bp, Artificial Sequence
  derived and/or modified sequence
atgtctatgtctcccacagtcattatcttagcctgcctcgggtttttcttagatcagtcggtgtgggctcatgttggagggcaagataaacccttttgttccgcctggccatcagcggtcgtaccacagggaggacacgtgactctccgctgtcactacaggcggggctttaacatctttactctgtacaagaaggacggcgtcccagtaccagaactttacaaccgcatcttttggaattccttcctgatctctcccgtgaccccagcccacgcaggcacctacagatgccgcggctttcacccccattctccgaccgagtggagcgccccatccaatccgcttgttattatggttaccggcctgtacgaaaagccttccttaacggcacgtcccggtcctactgtgcgcgctggggaaaacgtgactctcagttgcagttcacagtcatccttcgacatctaccatctgagtcgcgaaggcgaggctcatgaattacgcctcccagccgttcccagcatcaatggcacctttcaggccgattttccccttggtcctgcaacgcatggcgaaacttataggtgcttcggctcgtttcatggctcaccctatgaatggtccgacccgtctgatcccctccccgtctctgtcaccgacgcggccgttatgaatcaggagcccgcaggtcacaggacggttaacagagaggatagcgacgagcaggacccccaggaggtcacttacgcccagctggaccattgcatcttcacccagaggaaaatcacgggcccatcccaaaggagcaagagaccaagcaccgatacatcggtctgtatcgagctgcctaatgctgaaccccgcgccctgtctcccgcgcatgagcaccactctcaagcacttatgggatcgtccagggaaacgaccgccctcagtcagacacaactggcgtcttccaacgttccagcggccggcatttag

SEQ ID NO: 37022 - DNA, 693 bp, Artificial Sequence
  derived and/or modified sequence
atgtccatgtccccaacagtgatcattctagcctgcctcgggtttttccttgatcaaagcgtttgggctcacgtggggttgtatgagaagcctagtctgaccgcccgtcctggccccacggttcgcgccggggagaatgtgaccctttcatgctcgagtcagtcatcctttgacatctatcacctgagccgcgagggcgaagcccacgaactgaggctgcccgccgtgcctagcataaatgggaccttccaggctgattttcccctcggccccgccactcacggcgagacttatagatgctttggaagtttccacggctccccatatgaatggagcgacccttccgaccccctccccgtgtcggtgacagacgcagccgttatgaaccaagagccggcggggcatcgcactgtgaatcgagaagattcagatgaacaagacccccaggaggtgacatatgctcaattagaccattgtatttttactcagaggaaaattacaggaccatcccagaggtcaaagcgcccgtccacagatacttcggtgtgcattgagttgcctaatgctgagccccgcgctctttccccagcacacgagcaccattcccaggccctgatgggcagcagccgagaaaccacggctctgtcacagacacagcttgcctcaagtaacgtgcctgcagctggaatctag

SEQ ID NO: 37023 - DNA, 1475 bp, Artificial Sequence
  derived and/or modified sequence
gtcgagccgagtcactgcgtcctggcagcagaagctgcaccatgtccatgtcacccacggtcatcatcctggcatgtcttgggttcttcttggaccagagtgtgtgggcacacgtgggtggtcaggacaagcccttctgctctgcctggcccagcgctgtggtgcctcaaggaggacacgtgactcttcggtgtcactgtcgtcgtgggtttaacatcttcacgctgtacaagaaagatggggtccctgtccctgagctctacaacagaatattctggaacagtttcctcattagccctgtgaccccagcacacgcagggacctacagatgtcgaggttttcacccgcactcccccactgagtggtcggcacccagcaaccccctggtgatcatggtcacaggtctatatgagaaaccttcgcttacagcccggccgggccccacggttcgcgcaggagagaacgtgaccttgtcctgcagctcccagagctcctttgacatctaccatctatccagggagggggaagcccatgaacttaggctccctgcagtgcccagcatcaatggaacattccaggccgacttccctctgggtcctgccacccacggagagacctacagatgcttcggctctttccatggatctccctacgagtggtcagacccgagtgacccactgcctgtttctgtcacaggaaacccttctagtagttggccttcacccactgaaccaagcttcaaaactgatgctgctgtaatgaaccaagagcctgcgggacacagaacagtgaacagggaggactctgatgaacaagaccctcaggaggtgacatacgcacagttggatcactgcattttcacacagagaaaaatcactggcccttctcagaggagcaagagaccctcaacagataccagcgtgtgtatagaacttccaaatgctgagcccagagcgttgtctcctgcccatgagcaccacagtcaggccttgatgggatcttctagggagacaacagccctgtctcaaacccagcttgccagctctaatgtaccagcagctggaatctgaaggcgtgagtctccatcttagagcatcactcttcctcacaccacaaatctggtgcctgtctcttgcttaccaatgtctaaggtccccactgcctgctgcagagaaaacacactcctttgcttagcccacaattctctatttcacttgacccctgcccacctctccaacctaactggcttacttcctagtctacttgaggctgcaatcacactgaggaactcacaattccaaacatacaagaggctctctcttaacacggcacttagacacgtgctgttccaccttccctcgtgctgttccacctttcctcagactatttttcagccttctggcatcagcaaaccttataaaatttttttgatttcagtgtagttctctcctcttcaaataaacatgtctgccttc

SEQ ID NO: 37024 - DNA, 1447 bp, Artificial Sequence
  derived and/or modified sequence
agaagctgcaccatgtccatgtcacccacggtcatcatcctggcatgtcttgggttcttcttggaccagagtgtgtgggcacacgtgggtggtcaggacaagcccttctgctctgcctggcccagcgctgtggtgcctcaaggaggacacgtgactcttcggtgtcactatcgtcgtgggtttaacatcttcacgctgtacaagaaagatggggtccctgtccctgagctctacaacagaatattctggaacagtttcctcattagccctgtgaccccagcacacgcagggacctacagatgtcgaggttttcacccgcactcccccactgagtggtcggcacccagcaaccccctggtgatcatggtcacaggtctatatgagaaaccttcgcttacagcccggccgggccccacggttcgcgcaggagagaacgtgaccttgtcctgcagctcccagagctcctttgacatctaccatctatccagggagggggaagcccatgaacttaggctccctgcagtgcccagcatcaatggaacattccaggccgacttccctctgggtcctgccacccacggagagacctacagatgcttcggctctttccatggatctccctacgagtggtcagacccgagtgacccactgcctgtttctgtcacaggaaacccttctagtagttggccttcacccactgaaccaagcttcaaaactgatgctgctgtaatgaaccaagagcctgcgggacacagaacagtgaacagggaggactctgatgaacaagaccctcaggaggtgacatacgcacagttggatcactgcattttcacacagagaaaaatcactggcccttctcagaggagcaagagaccctcaacagataccagcgtgtgtatagaacttccaaatgctgagcccagagcgttgtctcctgcccatgagcaccacagtcaggccttgatgggatcttctagggagacaacagccctgtctcaaacccagcttgccagctctaatgtaccagcagctggaatctgaaggcgtgagtctccatcttagagcatcactcttcctcacaccacaaatctggtgcctgtctcttgcttaccaatgtctaaggtccccactgcctgctgcagagaaaacacactcctttgcttagcccacaattctctatttcacttgacccctgcccacctctccaacctaactggcttacttcctagtctacttgaggctgcaatcacactgaggaactcacaattccaaacatacaagaggctctctcttaacacggcacttagacacgtgctgttccaccttccctcgtgctgttccacctttcctcagactatttttcagccttctggcatcagcaaaccttataaaatttttttgatttcagtgtagttctctcctcttcaaataaacatgtctgccttca

SEQ ID NO: 37025 - DNA, 1396 bp, Artificial Sequence
  derived and/or modified sequence
agaagctgcaccatgtccatgtcacccacggtcatcatcctggcatgtcttgggttcttcttggaccagagtgtgtgggcacacgtgggtggtcaggacaagcccttctgctctgcctggcccagcgctgtggtgcctcaaggaggacacgtgactcttcggtgtcactatcgtcgtgggtttaacatcttcacgctgtacaagaaagatggggtccctgtccctgagctctacaacagaatattctggaacagtttcctcattagccctgtgaccccagcacacgcagggacctacagatgtcgaggttttcacccgcactcccccactgagtggtcggcacccagcaaccccctggtgatcatggtcacaggtctatatgagaaaccttcgcttacagcccggccgggccccacggttcgcgcaggagagaacgtgaccttgtcctgcagctcccagagctcctttgacatctaccatctatccagggagggggaagcccatgaacttaggctccctgcagtgcccagcatcaatggaacattccaggccgacttccctctgggtcctgccacccacggagagacctacagatgcttcggctctttccatggatctccctacgagtggtcagacccgagtgacccactgcctgtttctgtcacagatgctgctgtaatgaaccaagagcctgcgggacacagaacagtgaacagggaggactctgatgaacaagaccctcaggaggtgacatacgcacagttggatcactgcattttcacacagagaaaaatcactggcccttctcagaggagcaagagaccctcaacagataccagcgtgtgtatagaacttccaaatgctgagcccagagcgttgtctcctgcccatgagcaccacagtcaggccttgatgggatcttctagggagacaacagccctgtctcaaacccagcttgccagctctaatgtaccagcagctggaatctgaaggcgtgagtctccatcttagagcatcactcttcctcacaccacaaatctggtgcctgtctcttgcttaccaatgtctaaggtccccactgcctgctgcagagaaaacacactcctttgcttagcccacaattctctatttcacttgacccctgcccacctctccaacctaactggcttacttcctagtctacttgaggctgcaatcacactgaggaactcacaattccaaacatacaagaggctctctcttaacacggcacttagacacgtgctgttccaccttccctcgtgctgttccacctttcctcagactatttttcagccttctggcatcagcaaaccttataaaatttttttgatttcagtgtagttctctcctcttcaaataaacatgtctgccttca

SEQ ID NO: 37026 - DNA, 715 bp, Artificial Sequence
  derived and/or modified sequence
gaagctgcaccatgtccatgtcacccacggtcatcatcctggcatgtcttgggttcttcttggaccagagtgtgtgggcacacgtgggtctatatgagaaaccttcgcttacagcccggccgggccccacggttcgcgcaggagagaacgtgaccttgtcctgcagctcccagagctcctttgacatctaccatctatccagggagggggaagcccatgaacttaggctccctgcagtgcccagcatcaatggaacattccaggccgacttccctctgggtcctgccacccacggagagacctacagatgcttcggctctttccatggatctccctacgagtggtcagacccgagtgacccactgcctgtttctgtcacagatgctgctgtaatgaaccaagagcctgcgggacacagaacagtgaacagggaggactctgatgaacaagaccctcaggaggtgacatacgcacagttggatcactgcattttcacacagagaaaaatcactggcccttctcagaggagcaagagaccctcaacagataccagcgtgtgtatagaacttccaaatgctgagcccagagcgttgtctcctgcccatgagcaccacagtcaggccttgatgggatcttctagggagacaacagccctgtctcaaacccagcttgccagctctaatgtaccagcagctggaatctgaaggcgtgagtc

SEQ ID NO: 37027 - DNA, 1029 bp, Artificial Sequence
  derived and/or modified sequence
atgtccatgagccccaccgtcatcatcctggcctgcctgggcttcttcctggaccagagcgtgtgggcccacgtgggcggccaggacaagcccttctgcagcgcctggcccagcgctgtggtgccccagggcggccacgtgaccctgcgctgccactgccggcggggcttcaacatcttcaccctgtacaagaaggatggagtgcctgtgcctgagctgtacaaccgcatcttctggaacagcttcctgatcagccctgtgaccccagcccacgccggcacctaccgctgccggggcttccacccccacagccccacagagtggagcgcccccagcaaccccctggtgatcatggtgacaggcctgtatgagaagcccagcctgacagcccggcccggccccaccgtgcgggccggggagaatgtgaccctgagctgcagcagccagagcagctttgacatctaccacctgagccgggagggggaggcccacgagctgcggctgcctgctgtgcccagcatcaatggcaccttccaggccgacttccccctgggccctgccacccatggagagacctaccgctgcttcggcagcttccacggcagcccctatgagtggagcgaccccagcgaccccctgcctgtgtctgtgacaggcaaccccagcagctcctggcccagccccacagagcccagcttcaagacagatgctgctgtgatgaaccaggagcctgctggccacaggacagtgaacagagaagattctgatgagcaggacccccaggaggtgacctacgcccagctggaccactgcatcttcacccagaggaagatcaccggccccagccagaggagcaagaggcccagcacagacacctctgtgtgcatcgagctgcccaatgctgagccccgggccctgagccctgcccacgagcaccacagccaggccctgatgggcagcagccgggagaccacagccctgagccagacccagctggccagcagcaatgtgcctgctgctggcatctag

SEQ ID NO: 37028 - DNA, 1029 bp, Artificial Sequence
  derived and/or modified sequence
atgtccatgagccccaccgtcatcatcctggcctgcctgggcttcttcctggaccagagcgtgtgggcccacgtgggcggccaggacaagcccttctgcagcgcctggcccagcgctgtggtgccccagggcggccacgtgaccctgcgctgccactaccgccggggcttcaacatcttcaccctgtacaagaaggatggagtgcctgtgcctgagctgtacaaccgcatcttctggaacagcttcctgatcagccctgtgaccccagcccacgccggcacctaccgctgccggggcttccacccccacagccccacagagtggagcgcccccagcaaccccctggtgatcatggtgacaggcctgtatgagaagcccagcctgacagcccggcccggccccaccgtgcgggccggggagaatgtgaccctgagctgcagcagccagagcagctttgacatctaccacctgagccgggagggggaggcccacgagctgcggctgcctgctgtgcccagcatcaatggcaccttccaggccgacttccccctgggccctgccacccatggagagacctaccgctgcttcggcagcttccacggcagcccctatgagtggagcgaccccagcgaccccctgcctgtgtctgtgacaggcaaccccagcagctcctggcccagccccacagagcccagcttcaagacagatgctgctgtgatgaaccaggagcctgctggccacaggacagtgaacagagaagattctgatgagcaggacccccaggaggtgacctacgcccagctggaccactgcatcttcacccagaggaagatcaccggccccagccagaggagcaagaggcccagcacagacacctctgtgtgcatcgagctgcccaatgctgagccccgggccctgagccctgcccacgagcaccacagccaggccctgatgggcagcagccgggagaccacagccctgagccagacccagctggccagcagcaatgtgcctgctgctggcatctag

SEQ ID NO: 37029 - DNA, 978 bp, Artificial Sequence
  derived and/or modified sequence
atgtccatgagccccaccgtcatcatcctggcctgcctgggcttcttcctggaccagagcgtgtgggcccacgtgggcggccaggacaagcccttctgcagcgcctggcccagcgctgtggtgccccagggcggccacgtgaccctgcgctgccactaccgccggggcttcaacatcttcaccctgtacaagaaggatggagtgcctgtgcctgagctgtacaaccgcatcttctggaacagcttcctgatcagccctgtgaccccagcccacgccggcacctaccgctgccggggcttccacccccacagccccacagagtggagcgcccccagcaaccccctggtgatcatggtgacaggcctgtatgagaagcccagcctgacagcccggcccggccccaccgtgcgggccggggagaatgtgaccctgagctgcagcagccagagcagctttgacatctaccacctgagccgggagggggaggcccacgagctgcggctgcctgctgtgcccagcatcaatggcaccttccaggccgacttccccctgggccctgccacccatggagagacctaccgctgcttcggcagcttccacggcagcccctatgagtggagcgaccccagcgaccccctgcctgtgtctgtgacagatgctgctgtgatgaaccaggagcccgccggccacaggacagtgaaccgggaggacagtgatgagcaggacccccaggaggtgacctacgcccagctggaccactgcatcttcacccagaggaagatcaccggccccagccagaggagcaagaggcccagcacagacacctctgtgtgcatcgagctgcccaatgctgagccccgggccctgagccctgcccacgagcaccacagccaggccctgatgggcagcagccgggagaccacagccctgagccagacccagctggccagcagcaatgtgcctgctgctggcatctag

SEQ ID NO: 37030 - DNA, 693 bp, Artificial Sequence
  derived and/or modified sequence
atgtccatgagccccaccgtcatcatcctggcctgcctgggcttcttcctggaccagagcgtgtgggcccacgtgggcctgtatgagaagcccagcctgacagcccggcccggccccaccgtgcgggctggagaaaatgtgaccctgagctgcagcagccagagcagctttgacatctaccacctgagccgggagggggaggcccacgagctgcggctgcctgctgtgcccagcatcaatggcaccttccaggccgacttccccctgggccctgccacccacggggagacctaccgctgcttcggcagcttccacggcagcccctatgagtggagcgaccccagcgaccccctgcctgtgtctgtgacagatgctgctgtgatgaaccaggagcctgctggccacaggacagtgaacagagaagattctgatgagcaggacccccaggaggtgacctacgcccagctggaccactgcatcttcacccagaggaagatcaccggccccagccagaggagcaagaggcccagcacagacacctctgtgtgcatcgagctgcccaatgctgagccccgggccctgagccctgcccacgagcaccacagccaggccctgatgggcagcagccgggagaccacagccctgagccagacccagctggccagcagcaatgtgcctgctgctggcatctag

SEQ ID NO: 37031 - DNA, 1029 bp, Artificial Sequence
  derived and/or modified sequence
atgagcatgagccccaccgtgatcatcctggcctgcctgggcttcttcctggaccaaagcgtgtgggcacacgttgggggacaggacaagccattttgcagtgcgtggccctccgctgtggtcccacagggcggacacgtcacactgcgttgtcattgccggagggggtttaacatttttacactgtacaagaaggacggggtgccagtgcccgaattatacaatcgcatcttctggaactctttcctaatctccccggtcactcctgcccatgccggcacttatcgatgcaggggctttcatccacactcccctacagaatggtccgctccctctaaccctctcgtgatcatggtgaccggcctatacgagaaaccatccctgaccgctaggcccggacccaccgtgcgtgctggcgagaacgtgaccctgagttgctcttctcagtcctcctttgatatctatcacttgagccgggagggggaggctcacgagctgagactgccagccgtgccctctatcaatgggacgtttcaagccgattttcccctggggcctgctacccatggagagacatatagatgctttgggtctttccatggctccccttacgagtggagcgatccctcagatccactgccggtcagtgtgactggaaacccgagctccagctggccttccccaacagaaccatccttcaaaacagacgcggccgtcatgaatcaggagcccgcagggcacaggaccgtgaaccgcgaagattccgatgagcaggatccccaggaggtgacctacgcccagttggatcattgcatttttactcagcgcaaaattaccggcccatctcaaaggagtaagcgacccagtacagatacctcagtctgcattgaacttccaaacgcagagcccagagcactgagtcccgctcacgaacaccactcccaagcactgatgggtagctcccgcgagactactgccttgagccaaacccagcttgcttcctctaacgtgcctgctgcgggcatctag

SEQ ID NO: 37032 - DNA, 1029 bp, Artificial Sequence
  derived and/or modified sequence
atgagcatgagccccaccgtgatcatcctggcctgcctgggcttctttttagatcaaagcgtatgggcacatgtaggcgggcaagacaaacctttttgttccgcatggccaagcgcagtcgtgcctcaggggggtcacgtgaccttaaggtgccactatcggagaggctttaacatatttactctgtataagaaagacggggtccccgttcccgagctatataatcgaattttctggaactctttcctcatctctccggtgactcctgcccatgccgggacatatagatgtcgcggtttccatccccactctcccactgagtggtccgccccgagtaaccccctcgtgattatggtcaccggtctttacgaaaagcctagtctgaccgctaggcccgggccgaccgtccgggccggcgaaaatgtgacactcagctgcagctcgcagagctccttcgatatatatcatttgtcgcgtgagggcgaagcacatgagctaaggttgccagctgtgccttctataaacggaacatttcaggcagatttccctctcggccccgccacacacggcgagacataccgatgttttggcagcttccatgggtcaccctacgaatggtcagatcccagcgaccctctgcccgtcagcgtcactggtaatccatcctcatcctggcctagtcctactgaaccatcttttaaaactgatgccgctgtcatgaaccaagaacccgccggccaccgcaccgttaacagagaggatagtgacgaacaggatccccaggaagtgacatacgcacagttggaccattgcatattcacccagcggaagatcaccggcccctcccagcggtctaagcgtccgtctacggatacaagcgtgtgcatcgagctaccaaacgctgagcctcgagctctgagccctgcccatgaacaccattctcaggcacttatgggatcttcccgcgagactactgctctcagccagacacagctggccagcagcaatgttccagcagcaggcatctag

SEQ ID NO: 37033 - DNA, 978 bp, Artificial Sequence
  derived and/or modified sequence
atgagcatgagccccaccgtgatcatcctggcctgcctgggcttctttctcgatcagagtgtgtgggcgcacgtgggcggccaggataagcccttttgttcagcgtggccgagcgcggtggtgccccaggggggccacgtgaccctcagatgccattatcgaagaggtttcaatatcttcacactgtacaagaaagatggcgtgccagtccccgagttgtataacagaatcttctggaattctttcctcataagcccagtgacccctgcccacgccggtacatatcgatgtcgggggttccaccctcactcaccgaccgaatggagtgcaccaagcaaccccctggtcatcatggttactggattgtatgagaaaccttcactgaccgcgcgtccaggcccaaccgttcgcgccggtgagaacgtaacactgagctgttccagccagagctcctttgacatctatcacctgagtcgtgaaggggaagcccacgagttaagactgcctgccgtaccatccatcaacggaactttccaggccgatttccccctgggaccagccacccacggagaaacttacaggtgttttggatctttccatggctcgccttatgaatggtcagaccctagtgacccattgcccgtgtctgtcactgacgccgccgtcatgaaccaggagcccgccggccaccgtacagtgaacagggaagactcagacgagcaggatccccaggaagtaacctacgctcaacttgaccattgcattttcacccagaggaagatcacaggcccttcacagcgctccaaacggccttccactgatactagcgtgtgcatcgagctaccgaacgcagaaccgcgagccctgagccccgctcacgagcaccactctcaggccctcatgggcagttcacgcgagaccactgcacttagccagactcagttagccagctctaacgtgccagctgcagggatctag

SEQ ID NO: 37034 - DNA, 693 bp, Artificial Sequence
  derived and/or modified sequence
atgagcatgagccccaccgtgatcatcctggcctgcctgggcttctttttagaccagagcgtatgggcccacgtcggactgtacgaaaaaccttccctgaccgcgcgccccggtcccaccgtgcgggcaggggagaacgtgacactgtcctgtagctctcagtcttcctttgatatttatcatctgtcgagagaaggcgaagcacatgagctgcggttgccagccgtcccttcaatcaacgggacgttccaagcggatttcccattaggtcccgccacgcatggggagacttacagatgctttggctcattccatggctccccatatgagtggtcggatcccagtgatcccctgccagtttccgtgacggacgccgccgtgatgaaccaggaacctgctggtcatcggactgtcaatcgcgaagacagtgacgagcaggacccgcaggaggttacgtacgcccagttggaccactgcatttttactcagaggaaaattacaggacctagtcaaagatctaaaagacctagtactgacacttcggtatgcatcgagttgccaaatgctgagccccgagccctcagtccagcacacgagcaccattctcaggcactgatgggctctagcagggaaacaactgcccttagccaaacgcagctagcatcttctaatgtacctgcagctgggatttag

SEQ ID NO: 37035 - DNA, 1029 bp, Artificial Sequence
  derived and/or modified sequence
atgtcaatgtcacctaccgtgattattctggcttgcctgggttttttcttagatcagagtgtctgggcccacgtgggtgggcaggataaacctttttgctccgcttggccctcagccgttgtgcctcaaggaggccatgtgaccctcaggtgtcattgccggaggggctttaacatattcacattgtacaagaaagacggagtgcccgtgcccgagctgtacaatagaattttctggaatagctttctgatcagccccgtaacacctgcacacgcgggaacctataggtgcaggggcttccacccgcacagccctaccgaatggagtgctccaagtaatcccttggtgatcatggtgactgggctttatgagaaaccatcactgacagcgaggccagggccaaccgtgagagccggagaaaacgtgaccctaagctgcagctcgcaatcctccttcgatatctaccacctgagtagggaaggggaagctcacgaactcaggcttcctgcagttccatcaatcaacggcacattccaggcagattttcccttgggccctgcaactcacggcgagacatatcgatgtttcggatcatttcacggttctccttatgagtggtctgatcctagcgatccgttacccgtttctgtcacagggaacccctcgtcaagttggcccagtcccactgaaccgtctttcaagacagatgcagcggttatgaatcaggagcccgctggccaccgtaccgtgaatagggaggactccgacgaacaagatccccaggaggtgacatacgcacagctcgatcattgcatatttacgcagcggaaaataacagggccatctcagcgcagcaagcgtccttcaaccgatacatcagtatgcattgagttaccaaacgcagaaccgagggccctgtcccctgcccatgagcaccattcgcaagccttgatgggatcctcccgggagaccacagcgttgtctcagacgcagctcgccagctcaaacgtccctgccgctggcatctag

SEQ ID NO: 37036 - DNA, 1029 bp, Artificial Sequence
  derived and/or modified sequence
atgtcaatgagccccaccgtgatcatcctagcatgcctaggctttttcttggaccaaagcgtgtgggctcatgtcgggggacaagacaaacccttctgctcagcttggccctcagctgtcgtgccccagggaggccacgtaactctcaggtgccattacaggagaggatttaatatctttaccctgtacaaaaaggacggagttcctgttcctgaactctacaaccggatcttctggaactcttttctgatttcaccggtgactccggcacacgcgggaacgtataggtgcagaggctttcatccgcacagtccgactgagtggagcgctccgtcaaatcccttggttataatggtgacaggtttatacgagaagccctcacttaccgcacggcctggtccgacggtgcgggctggtgagaacgtgaccctgtcctgttcttctcagagcagcttcgacatctaccatctgagcagggagggggaagctcatgaactccggctgcctgccgtgccttcaattaacggaactttccaagccgattttcccctggggccagccacacatggagagacatacagatgctttggttccttccatggttcaccgtatgaatggtctgacccctctgaccctctgcctgtcagcgtgaccggaaaccctagcagctcttggcctagtccaaccgagccttctttcaagaccgacgcagccgttatgaaccaggaacccgcaggtcacaggacagttaatagagaggactcagacgaacaggaccctcaggaggtgacatatgcccagctggaccactgcattttcacacagcggaaaattactgggccttcccagagaagtaaaaggcctagcacagatacttctgtttgtatagaactccccaatgcagaacccagggctctgtctccagctcacgagcatcattcacaggccttgatggggtcttcccgagagacaacagccctgtcccagacacagttggctagttctaatgttcctgcagctggcatttag

SEQ ID NO: 37037 - DNA, 978 bp, Artificial Sequence
  derived and/or modified sequence
atgagcatgtctcccactgtgatcatactggcgtgcttggggttcttcctggatcagagtgtgtgggcccatgtgggtggccaagacaagcccttttgctctgcttggccttctgctgtcgtccctcagggcggacatgtgaccctacggtgccactatcgtcggggattcaatatctttactctctataagaaagacggtgtcccagtacctgagctctacaataggattttttggaattctttcctgatcagcccagtaacacccgctcacgccggaacatacagatgcaggggctttcaccctcactcccctacagaatggtccgccccttccaacccacttgtgatcatggtgactgggttgtatgagaagccctcgctgactgcacgtcccggtcctacggtgcgagcgggtgagaacgtcacgttgtcttgcagcagtcaatcctcttttgacatataccatttatctagggagggggaggctcatgagctcaggctcccagccgtaccgtcgattaacggcacctttcaggcagactttccactgggcccagctacgcacggggaaacgtaccgctgctttggcagcttccacggtagtccttacgaatggagtgacccatcagatccgctcccggtgtcagtaaccgatgccgctgtgatgaatcaggagccagccggtcaccggacagtgaatcgagaagattcagatgaacaggaccctcaggaggtgacttatgcgcagctggaccactgcatttttacccagagaaaaattacgggtcccagtcagcgctccaagagaccttcaacggacacatctgtgtgcattgagctgcccaatgcagaaccgagagcgctctctccagcccacgagcatcattcacaagctctaatggggtcatcccgcgaaacaaccgctctgtcacaaacacaactcgcctcaagtaacgtgcccgcagcagggatttag

SEQ ID NO: 37038 - DNA, 693 bp, Artificial Sequence
  derived and/or modified sequence
atgtcaatgagccccacagtgattattctggcatgcctgggattctttctggatcagagcgtgtgggctcatgttggcctgtatgagaaaccttccttgacggccagacctggccctactgtgcgggcaggggaaaacgtcacccttagctgctcgtcccagagcagcttcgatatctatcatctatcccgtgaaggagaggctcacgagctacgactgcctgccgtaccgtccatcaacggcacgttccaggctgattttccactggggccagcaacgcacggggagacttataggtgtttcggttcttttcacggtagtccttatgagtggtccgaccccagcgacccactgcccgtgtctgtaacagatgcagccgtgatgaatcaagagcctgccggacaccgaactgttaatcgagaagactcagatgagcaggatcctcaagaagtgacatatgcacagctggatcactgcatttttacccagcgcaagattacaggaccgagccagaggagtaagcggccaagcactgacaccagcgtgtgcatcgagctgccgaacgccgagcccagagctttatcacctgcccacgagcaccactcccaggctttgatgggttccagtagagaaacaacggccctgtcacagacacaacttgcatctagtaatgtccccgcagctggcatctag

SEQ ID NO: 37039 - DNA, 1029 bp, Artificial Sequence
  derived and/or modified sequence
atgagcatgagccccaccgtgatcatcctggcctgcctgggcttcttcctggaccagagcgtgtgggcccacgtgggcggccaggacaagcccttctgcagcgcctggcccagcgccgtggtgccccagggcggccacgtgaccctgagatgccactgcagaagaggcttcaacatcttcaccctgtacaagaaggacggcgtgcccgtgcccgagctgtacaacagaatcttctggaacagcttcctgatcagccccgtgacccccgcccacgccggcacctacagatgcagaggcttccacccccacagccccaccgagtggagcgcccccagcaaccccctggtgatcatggtgaccggcctgtacgagaagcccagcctgaccgccagacccggccccaccgtgagagccggcgagaacgtgaccctgagctgcagcagccagagcagcttcgacatctaccacctgagcagagagggcgaggcccacgagctgagactgcccgccgtgcccagcatcaacggcaccttccaggccgacttccccctgggccccgccacccacggcgagacctacagatgcttcggcagcttccacggcagcccctacgagtggagcgaccccagcgaccccctgcccgtgagcgtgaccggcaaccccagcagcagctggcccagccccaccgagcccagcttcaagaccgacgccgccgtgatgaaccaggagcccgccggccacagaaccgtgaacagagaggacagcgacgagcaggacccccaggaggtgacctacgcccagctggaccactgcatcttcacccagagaaagatcaccggccccagccagagaagcaagagacccagcaccgacaccagcgtgtgcatcgagctgcccaacgccgagcccagagccctgagccccgcccacgagcaccacagccaggccctgatgggcagcagcagagagaccaccgccctgagccagacccagctggccagcagcaacgtgcccgccgccggcatctag

SEQ ID NO: 37040 - DNA, 1029 bp, Artificial Sequence
  derived and/or modified sequence
atgagcatgagccccaccgtgatcatcctggcctgcctgggcttcttcctggaccagagcgtgtgggcccacgtgggcggccaggacaagcccttctgcagcgcctggcccagcgccgtggtgccccagggcggccacgtgaccctgagatgccactacagaagaggcttcaacatcttcaccctgtacaagaaggacggcgtgcccgtgcccgagctgtacaacagaatcttctggaacagcttcctgatcagccccgtgacccccgcccacgccggcacctacagatgcagaggcttccacccccacagccccaccgagtggagcgcccccagcaaccccctggtgatcatggtgaccggcctgtacgagaagcccagcctgaccgccagacccggccccaccgtgagagccggcgagaacgtgaccctgagctgcagcagccagagcagcttcgacatctaccacctgagcagagagggcgaggcccacgagctgagactgcccgccgtgcccagcatcaacggcaccttccaggccgacttccccctgggccccgccacccacggcgagacctacagatgcttcggcagcttccacggcagcccctacgagtggagcgaccccagcgaccccctgcccgtgagcgtgaccggcaaccccagcagcagctggcccagccccaccgagcccagcttcaagaccgacgccgccgtgatgaaccaggagcccgccggccacagaaccgtgaacagagaggacagcgacgagcaggacccccaggaggtgacctacgcccagctggaccactgcatcttcacccagagaaagatcaccggccccagccagagaagcaagagacccagcaccgacaccagcgtgtgcatcgagctgcccaacgccgagcccagagccctgagccccgcccacgagcaccacagccaggccctgatgggcagcagcagagagaccaccgccctgagccagacccagctggccagcagcaacgtgcccgccgccggcatctag

SEQ ID NO: 37041 - DNA, 978 bp, Artificial Sequence
  derived and/or modified sequence
atgagcatgagccccaccgtgatcatcctggcctgcctgggcttcttcctggaccagagcgtgtgggcccacgtgggcggccaggacaagcccttctgcagcgcctggcccagcgccgtggtgccccagggcggccacgtgaccctgagatgccactacagaagaggcttcaacatcttcaccctgtacaagaaggacggcgtgcccgtgcccgagctgtacaacagaatcttctggaacagcttcctgatcagccccgtgacccccgcccacgccggcacctacagatgcagaggcttccacccccacagccccaccgagtggagcgcccccagcaaccccctggtgatcatggtgaccggcctgtacgagaagcccagcctgaccgccagacccggccccaccgtgagagccggcgagaacgtgaccctgagctgcagcagccagagcagcttcgacatctaccacctgagcagagagggcgaggcccacgagctgagactgcccgccgtgcccagcatcaacggcaccttccaggccgacttccccctgggccccgccacccacggcgagacctacagatgcttcggcagcttccacggcagcccctacgagtggagcgaccccagcgaccccctgcccgtgagcgtgaccgacgccgccgtgatgaaccaggagcccgccggccacagaaccgtgaacagagaggacagcgacgagcaggacccccaggaggtgacctacgcccagctggaccactgcatcttcacccagagaaagatcaccggccccagccagagaagcaagagacccagcaccgacaccagcgtgtgcatcgagctgcccaacgccgagcccagagccctgagccccgcccacgagcaccacagccaggccctgatgggcagcagcagagagaccaccgccctgagccagacccagctggccagcagcaacgtgcccgccgccggcatctag

SEQ ID NO: 37042 - DNA, 693 bp, Artificial Sequence
  derived and/or modified sequence
atgagcatgagccccaccgtgatcatcctggcctgcctgggcttcttcctggaccagagcgtgtgggcccacgtgggcctgtacgagaagcccagcctgaccgccagacccggccccaccgtgagagccggcgagaacgtgaccctgagctgcagcagccagagcagcttcgacatctaccacctgagcagagagggcgaggcccacgagctgagactgcccgccgtgcccagcatcaacggcaccttccaggccgacttccccctgggccccgccacccacggcgagacctacagatgcttcggcagcttccacggcagcccctacgagtggagcgaccccagcgaccccctgcccgtgagcgtgaccgacgccgccgtgatgaaccaggagcccgccggccacagaaccgtgaacagagaggacagcgacgagcaggacccccaggaggtgacctacgcccagctggaccactgcatcttcacccagagaaagatcaccggccccagccagagaagcaagagacccagcaccgacaccagcgtgtgcatcgagctgcccaacgccgagcccagagccctgagccccgcccacgagcaccacagccaggccctgatgggcagcagcagagagaccaccgccctgagccagacccagctggccagcagcaacgtgcccgccgccggcatctag

SEQ ID NO: 37043 - DNA, 1505 bp, Artificial Sequence
  derived and/or modified sequence
tcgagccgagtcactgcgtcctggcagcagaagctgcaccatgtccatgtcacccacggtcatcatcctggcatgtcttgggttcttcttggaccagagtgtgtgggcacacgtgggtggtcaggacaagcccttctgctctgcctggcccagcgctgtggtgcctcaaggaggacacgtgactcttcggtgtcactatcgtcgtgggtttaacatcttcacgctgtacaagaaagatggggtccctgtccctgagctctacaacagaatattctggaacagtttcctcattagccctgtgaccccagcacacgcagggacctacagatgtcgaggttttcacccgcactcccccactgagtggtcggcacccagcaaccccctggtgatcatggtcacaggtctatatgagaaaccttcgcttacagcccggccgggccccacggttcgcgcaggagagaacgtgaccttgtcctgcagctcccagagctcctttgacatctaccatctatccagggagggggaagcccatgaacttaggctccctgcagtgcccagcatcaatggaacattccaggccgacttccctctgggtcctgccacccacggagagacctacagatgcttcggctctttccatggatctccctacgagtggtcagacccgagtgacccactgcctgtttctgtcacaggaaacccttctagtagttggccttcacccactgaaccaagcttcaaaactgatgctgctgtaatgaaccaagagcctgcgggacacagaacagtgaacagggaggactctgatgaacaagaccctcaggaggtgacatacgcacagttggatcactgcattttcacacagagaaaaatcactggcccttctcagaggagcaagagaccctcaacagataccagcgtgtgtatagaacttccaaatgctgagcccagagcgttgtctcctgcccatgagcaccacagtcaggccttgatgggatcttctagggagacaacagccctgtctcaaacccagcttgccagctctaatgtaccagcagctggaatctgaaggcgtgagtctccatcttagagcatcactcttcctcacaccacaaatctggtgcctgtctcttgcttaccaatgtctaaggtccccactgcctgctgcagagaaaacacactcctttgcttagcccacaattctctatttcacttgacccctgcccacctctccaacctaactggcttacttcctagtctacttgaggctgcaatcacactgaggaactcacaattccaaacatacaagaggctctctcttaacacggcacttagacacgtgctgttccaccttccctcgtgctgttccacctttcctcagactatttttcagccttctggcatcagcaaaccttataaaatttttttgatttcagtgtagttctctcctcttcaaataaacatgtctgccttcaaaaaaaaaaaaaaaaaaaaaaaaaaaaaaa

SEQ ID NO: 37044 - DNA, 822 bp, Artificial Sequence
  derived and/or modified sequence
atgtctatgtctccaaccgtcattattctagcctgccttggctttttcctcgatcagtcagtgtgggcccacgtgggcgggcaggataagcccttttgttctgcctggcctagtgctgtcgttccccaaggcggccatgtaacactgcgctgtcattaccgtcgggggttcaatatctttacgttgtacaaaaaagatggggtccctgtcccggaactgtacaacaggattttctggaattcctttcttattagccctgtgacccccgcgcacgccggtacctacaggtgccgcggcttccatccgcactcacctaccgaatggagtgctcctagcaaccctttagtcataatggtaacgggcctctacgaaaagccttcgttgacagcccgtccaggccctaccgtgagagccggggagaatgtgaccctctcatgctcatcccagtccagcttcgacatttatcatctgtctagggaaggcgaggcccacgaacttcgtcttccagcagttccttcaataaacggcacatttcaagcagacttcccccttggtccagccactcacggtgagacgtacagatgtttcggatcattccatggctcgccttatgagtggagtgatcctagtgaccccctgcccgtgtctgtgactgggaacccaagctcaagctggcctagtccaactgaaccctcttttaagacaggcatcgctcgtcaccttcatgccgtgattcgatactcggtggccatcatcctgttcacgatcctacctttttttttacttcaccggtggtgttcgaaaaagaagatgctgctatag

SEQ ID NO: 37045 - DNA, 822 bp, Artificial Sequence
  derived and/or modified sequence
atgtccatgagccccaccgtcatcatcctggcctgcctgggcttcttcctggaccagagcgtgtgggcccacgtgggcggccaggacaagcccttctgcagcgcctggcccagcgctgtggtgccccagggcggccacgtgaccctgcgctgccactaccgccggggcttcaacatcttcaccctgtacaagaaggatggagtgcctgtgcctgagctgtacaaccgcatcttctggaacagcttcctgatcagccctgtgaccccagcccacgccggcacctaccgctgccggggcttccacccccacagccccacagagtggagcgcccccagcaaccccctggtgatcatggtgacaggcctgtatgagaagcccagcctgacagcccggcccggccccaccgtgcgggccggggagaatgtgaccctgagctgcagcagccagagcagctttgacatctaccacctgagccgggagggggaggcccacgagctgcggctgcctgctgtgcccagcatcaatggcaccttccaggccgacttccccctgggccctgccacccatggagagacctaccgctgcttcggcagcttccacggcagcccctatgagtggagcgaccccagcgaccccctgcctgtgtctgtgacaggcaaccccagcagctcctggcccagccccacagagcccagcttcaagacaggaattgcccggcacctgcatgctgtgatccgctacagcgtggccatcatcctcttcaccatcctgcccttcttcctgctgcaccgctggtgcagcaagaagaagatgctgctgtag

SEQ ID NO: 37046 - DNA, 822 bp, Artificial Sequence
  derived and/or modified sequence
atgagcatgagccccaccgtgatcatcctggcctgcctgggcttcttcctggatcagtcagtatgggcccatgtgggaggtcaggacaagccgttctgctccgcctggccgtccgccgtggtaccgcaaggcgggcacgttactcttcgctgccattacagacgcggatttaacatctttaccctttataagaaagacggtgtgccagtcccagagctctataatcgcatcttttggaacagcttccttatctctcccgtcaccccggcccacgccggaacatatagatgtagagggtttcatcctcactcacctacagaatggagcgcaccttcaaacccgctggttatcatggtgacgggtctctacgaaaagcccagcttgactgccagacctggccctacggtgcgggcgggagagaatgtgactttgagctgcagctcccagtcttcattcgacatataccatctgtcaagggaaggcgaagcccatgaactgcggttacctgccgtgccgtctattaacggtacatttcaggctgactttccacttggtccagccactcacggcgaaacttacagatgttttggatcatttcatgggtcaccctacgagtggagtgatccgtcagatcctcttcccgtatcagtaacagggaatcccagtagttcctggccctcccccaccgagccctccttcaaaactggcattgctagacatctccacgccgtcatccgatacagtgtggccatcattctttttaccatccttcccttcttcctgcttcacaggtggtgtagcaagaaaaagatgctgctgtag

SEQ ID NO: 37047 - DNA, 822 bp, Artificial Sequence
  derived and/or modified sequence
atgagtatgagccctactgtgatcatcctggcttgtttgggcttcttcctggaccagtcggtttgggcccacgtaggtggccaagataagccgttttgctcggcctggccatctgccgtagttccccaaggtgggcatgtgacattgaggtgccactatcgaagaggattcaacatcttcacactctacaaaaaagatggggtgccggtaccggaattgtacaaccgaatcttttggaattcctttcttattagccccgtgacccccgcacatgccggaacatacagatgccgcggttttcaccctcactccccaacagagtggtccgccccttctaaccctctcgttattatggtcactgggctttacgaaaagccatctctgactgcacgaccagggcctactgttagagcgggtgaaaacgtgacactctcttgctctagccagtcctcgttcgacatttatcacttgagccgggagggagaggcacacgaactacgtttgccagctgtgccatcaatcaatggtacctttcaggcagatttcccactgggtccagctactcacggcgagacatatagatgcttcgggagcttccacggaagcccctatgaatggtcagacccgagcgatcctttacctgtaagcgtgactggaaatccatcaagcagctggccttctcctacagagcccagtttcaaaaccggtatcgcgcgacacttgcacgcagtcattcgttactcagttgctataattctgttcaccatattgcctttcttcctgctgcaccgatggtgctccaaaaaaaaaatgctcctgtag

SEQ ID NO: 37048 - DNA, 822 bp, Artificial Sequence
  derived and/or modified sequence
atgagcatgagccccaccgtgatcatcctggcctgcctgggcttcttcctggaccagagcgtgtgggcccacgtgggcggccaggacaagcccttctgcagcgcctggcccagcgccgtggtgccccagggcggccacgtgaccctgagatgccactacagaagaggcttcaacatcttcaccctgtacaagaaggacggcgtgcccgtgcccgagctgtacaacagaatcttctggaacagcttcctgatcagccccgtgacccccgcccacgccggcacctacagatgcagaggcttccacccccacagccccaccgagtggagcgcccccagcaaccccctggtgatcatggtgaccggcctgtacgagaagcccagcctgaccgccagacccggccccaccgtgagagccggcgagaacgtgaccctgagctgcagcagccagagcagcttcgacatctaccacctgagcagagagggcgaggcccacgagctgagactgcccgccgtgcccagcatcaacggcaccttccaggccgacttccccctgggccccgccacccacggcgagacctacagatgcttcggcagcttccacggcagcccctacgagtggagcgaccccagcgaccccctgcccgtgagcgtgaccggcaaccccagcagcagctggcccagccccaccgagcccagcttcaagaccggcatcgccagacacctgcacgccgtgatcagatacagcgtggccatcatcctgttcaccatcctgcccttcttcctgctgcacagatggtgcagcaagaagaagatgctgctgtag

SEQ ID NO: 37049 - protein, 1063 aa, Artificial Sequence
  derived and/or modified sequence
MALQVELVPTGEIIRVVHPHRPCKLALGSDGVRVTMESALTARDRVGVQDFVLLENFTSEAAFIENLRRRFRENLIYTYIGPVLVSVNPYRDLQIYSRQHMERYRGVSFYEVPPHLFAVADTVYRALRTERRDQAVMISGESGAGKTEATKRLLQFYAETCPAPERGGAVRDRLLQSNPVLEAFGNAKTLRNDNSSRFGKYMDVQFDFKGAPVGGHILSYLLEKSRVVHQNHGERNFHIFYQLLEGGEEETLRRLGLERNPQSYLYLVKGQCAKVSSINDKSDWKVVRKALTVIDFTEDEVEDLLSIVASVLHLGNIHFAANEESNAQVTTENQLKYLTRLLSVEGSTLREALTHRKIIAKGEELLSPLNLEQAAYARDALAKAVYSRTFTWLVGKINRSLASKDVESPSWRSTTVLGLLDIYGFEVFQHNSFEQFCINYCNEKLQQLFIELTLKSEQEEYEAEGIAWEPVQYFNNKIICDLVEEKFKGIISILDEECLRPGEATDLTFLEKLEDTVKHHPHFLTHKLADQRTRKSLGRGEFRLLHYAGEVTYSVTGFLDKNNDLLFRNLKETMCSSKNPIMSQCFDRSELSDKKRPETVATQFKMSLLQLVEILQSKEPAYVRCIKPNDAKQPGRFDEVLIRHQVKYLGLLENLRVRRAGFAYRRKYEAFLQRYKSLCPETWPTWAGRPQDGVAVLVRHLGYKPEEYKMGRTKIFIRFPKTLFATEDALEVRRQSLATKIQAAWRGFHWRQKFLRVKRSAICIQSWWRGTLGRRKAAKRKWAAQTIRRLIRGFVLRHAPRCPENAFFLDHVRTSFLLNLRRQLPQNVLDTSWPTPPPALREASELLRELCIKNMVWKYCRSISPEWKQQLQQKAVASEIFKGKKDNYPQSVPRLFISTRLGTDEISPRVLQALGSEPIQYAVPVVKYDRKGYKPRSRQLLLTPNAVVIVEDAKVKQRIDYANLTGISVSSLSDSLFVLHVQRADNKQKGDVVLQSDHVIETLTKTALSANRVNSININQGSITFAGGPGRDGTIDFTPGSELLITKAKNGHLAVVAPRLNSR

SEQ ID NO: 37050 - protein, 1028 aa, Artificial Sequence
  derived and/or modified sequence
MESALTARDRVGVQDFVLLENFTSEAAFIENLRRRFRENLIYTYIGPVLVSVNPYRDLQIYSRQHMERYRGVSFYEVPPHLFAVADTVYRALRTERRDQAVMISGESGAGKTEATKRLLQFYAETCPAPERGGAVRDRLLQSNPVLEAFGNAKTLRNDNSSRFGKYMDVQFDFKGAPVGGHILSYLLEKSRVVHQNHGERNFHIFYQLLEGGEEETLRRLGLERNPQSYLYLVKGQCAKVSSINDKSDWKVVRKALTVIDFTEDEVEDLLSIVASVLHLGNIHFAANEESNAQVTTENQLKYLTRLLSVEGSTLREALTHRKIIAKGEELLSPLNLEQAAYARDALAKAVYSRTFTWLVGKINRSLASKDVESPSWRSTTVLGLLDIYGFEVFQHNSFEQFCINYCNEKLQQLFIELTLKSEQEEYEAEGIAWEPVQYFNNKIICDLVEEKFKGIISILDEECLRPGEATDLTFLEKLEDTVKHHPHFLTHKLADQRTRKSLGRGEFRLLHYAGEVTYSVTGFLDKNNDLLFRNLKETMCSSKNPIMSQCFDRSELSDKKRPETVATQFKMSLLQLVEILQSKEPAYVRCIKPNDAKQPGRFDEVLIRHQVKYLGLLENLRVRRAGFAYRRKYEAFLQRYKSLCPETWPTWAGRPQDGVAVLVRHLGYKPEEYKMGRTKIFIRFPKTLFATEDALEVRRQSLATKIQAAWRGFHWRQKFLRVKRSAICIQSWWRGTLGRRKAAKRKWAAQTIRRLIRGFVLRHAPRCPENAFFLDHVRTSFLLNLRRQLPQNVLDTSWPTPPPALREASELLRELCIKNMVWKYCRSISPEWKQQLQQKAVASEIFKGKKDNYPQSVPRLFISTRLGTDEISPRVLQALGSEPIQYAVPVVKYDRKGYKPRSRQLLLTPNAVVIVEDAKVKQRIDYANLTGISVSSLSDSLFVLHVQRADNKQKGDVVLQSDHVIETLTKTALSANRVNSININQGSITFAGGPGRDGTIDFTPGSELLITKAKNGHLAVVAPRLNSR

SEQ ID NO: 37051 - DNA, 3192 bp, Artificial Sequence
  derived and/or modified sequence
atggctcttcaggtggagcttgtccctacaggagagattatccgggtcgttcacccacatagaccatgtaaactggcactggggtcggacggtgtgagggttacaatggaatcagcgcttactgctcgagaccgggtgggcgtgcaagatttcgtcctgctggagaacttcacgagcgaagcagctttcattgagaatctcaggcggcgctttcgcgagaacctgatctacacctacattggcccagtcctggtgagtgtaaacccataccgtgaccttcagatctacagtaggcagcacatggaacgctataggggtgtttccttttacgaagtgcctccacacttgttcgccgtggccgacaccgtttaccgggccttgcggaccgagagacgggaccaggccgtgatgatctccggggagagcggggctggtaaaacagaagcaacgaaaaggctccttcaattttacgctgagacctgccccgcccccgagcggggcggggcagtcagagataggctgttacagtccaatcctgtccttgaagccttcggaaatgcgaaaacactgcggaacgacaatagctcccgtttcggtaaatatatggatgtgcaatttgacttcaaaggggcccctgtgggtggtcacatactttcttacctgctcgagaagagccgggtggtgcaccagaatcacggcgagcggaactttcacattttttaccagctcttggagggaggagaagaggagacactccgcaggctcggcctggagcggaatccacagagttacctttacctggtaaaaggccagtgtgccaaggtgtcctccatcaacgataaatctgactggaaagtggtgaggaaggcgttaactgtcatcgattttacggaggacgaggtggaggatttactgtctattgtggcgagcgtcttgcatctaggaaacatacatttcgctgccaatgaagaatccaacgcgcaggtcaccaccgagaaccaattaaaatatctgacccgcttactgtctgtggaagggtctaccctacgagaggcacttacacaccgaaagattattgcgaagggagaggagttactgtcccctctgaatttggagcaggcagcttacgctagagatgctttggctaaggccgtctactcacgcaccttcacttggttagtgggcaagatcaatcgcagtctcgcctccaaagatgtcgaaagtccttcctggcggtcaactaccgtgctgggactcctggatatctacggattcgaagtgtttcagcataactcttttgagcagttctgcattaactattgcaacgaaaagctgcagcaactcttcatcgagctgacattgaagagtgaacaggaagagtacgaggccgaaggaatagcctgggaacccgtgcagtacttcaacaacaagattatctgtgacttagtggaagagaaatttaaaggcatcatcagcatcttggacgaggagtgcctgagaccgggggaagcaaccgaccttaccttcttggagaagcttgaggacaccgtgaaacaccacccacatttcctgacccacaaactggccgatcagcgcaccaggaaaagcctgggcaggggagagttccgacttctgcactatgctggcgaggtgacctatagcgtaactggcttcctcgacaagaataacgacctcttattcagaaacttaaaggagaccatgtgctcttccaagaatcctattatgtcccagtgcttcgataggtccgaactgtctgataagaaaaggccagaaactgtcgcaacgcagtttaagatgtcccttttgcagttggtggagatcctgcagagcaaggaacctgcctacgtgcgatgtataaagcctaatgatgccaaacagccggggcgttttgacgaggttctgattagacaccaggtaaagtatctgggcctgttggagaacctgcgcgtccgcagggccggctttgcataccgccgaaagtacgaagcattcctgcagaggtataaatcactatgtccagagacgtggccaacttgggcaggcaggccccaggatggcgtggcggtgttagtgaggcatctcggatacaaaccagaggagtacaaaatgggcagaacaaagatcttcatccggtttcccaaaactttgtttgccacagaagacgcgctggaagtgaggagacagtctctggctacaaaaatccaggccgcatggagaggatttcactggaggcagaagttcctgcgggtcaaaagaagcgctatctgtatacaatcctggtggagaggaacattaggtcgacggaaagccgctaaacgcaagtgggcagcccagacgattcggcggctgattagagggttcgtgcttagacatgcaccacgctgtccagaaaacgcattctttctggatcatgtgcggaccagttttctcttgaacctgcgtcgccagttgccgcagaatgtattggacacaagttggcccaccccgcctcccgccctcagggaagctagcgaactcctgcgggaactctgtatcaaaaacatggtgtggaaatattgtaggagtatttcccccgagtggaaacagcaactgcagcaaaaggccgtggccagtgagatctttaagggcaaaaaggataattatccccagtcagttccgaggttatttatcagcactaggctgggaactgacgagatctctcctagagtgctgcaggcgcttggaagtgaacccattcaatatgcggtgccggtggtaaagtatgacaggaagggatataaaccacggagccgccagcttttgctcacaccgaacgctgtagtgatcgtagaagacgcaaaggtcaaacagaggatcgattatgctaaccttactggcataagcgtttcgagtttatctgacagtctttttgtactgcacgtacagagagccgacaacaagcagaagggcgatgtggtgctacagagcgatcatgtgatagagactttgactaagactgccctgagcgccaaccgggtcaatagcatcaatattaatcagggttcaatcacgttcgccggaggacccggccgggacgggacaattgactttacaccgggatcagagctgctcataactaaagctaaaaatggccacttggccgtggtagcgccaaggctgaattctcgctag

SEQ ID NO: 37052 - DNA, 3087 bp, Artificial Sequence
  derived and/or modified sequence
atggagagtgcgctcaccgctagagatcgggttggcgttcaggactttgtattgctggaaaacttcacaagcgaggctgcgttcatcgagaacctccgtaggcggttccgggagaatctcatctacacatacattggccccgtgcttgtctctgtcaacccatatcgggacctgcagatatactctagacagcatatggagcggtatcggggcgtctctttttacgaggtacctcctcatctgttcgcggttgccgatacagtgtatagagcactgcggactgagaggcgagatcaggccgtgatgatctcaggcgaatccggcgccgggaaaaccgaagctacaaaaaggctgttgcagttctacgccgaaacctgtcccgcccctgaaaggggcggggcagtcagagatagactcctccagagcaatcccgttctcgaagctttcggaaatgcgaaaactcttcggaatgacaactcttcccgttttggtaagtatatggatgttcagttcgacttcaaaggggcacctgtgggtggacatatcttgagttaccttctggagaagtcccgagtggtgcaccaaaaccacggcgaacgcaatttccacattttttaccaactgctggaggggggggaagaagagacactcaggcggttgggactggagagaaacccgcagtcttatctctatttggtgaaaggccaatgcgccaaggtcagttctatcaatgacaagtccgattggaaggttgtgcggaaggccctcactgtgattgattttaccgaagatgaagtggaggacctcctaagcattgtagccagtgttctccacctaggtaacattcattttgccgcaaatgaggaatcgaatgctcaggttaccactgaaaaccaactgaaatacctgactcggctgctatccgtcgagggcagcacactccgggaagctctcacccatcgaaagatcatcgcaaagggggaagagctgctctcaccccttaatcttgagcaggcagcctatgcccgcgatgccctggctaaggccgtgtattctcgtacctttacctggctcgtgggaaagattaatcggtcacttgcaagcaaagatgtcgaatctccgagctggcgctcaaccacagtcctcggtctgctggacatctacggtttcgaggtcttccagcacaatagctttgagcagttttgcattaattactgcaacgagaagctgcagcagctgtttatcgagttgactctgaagtcagagcaggaagagtacgaggcagaaggcattgcatgggaaccggtgcagtacttcaataataaaataatatgtgacttagtagaggagaagttcaaaggcatcatcagtatacttgatgaggagtgtctgagaccaggcgaagccacagatctaaccttccttgaaaagctggaagacaccgtgaagcatcaccctcatttcttgacccataagctggctgaccagagaacccggaaaagcctgggcagaggcgagttccgcctgctgcattatgctggcgaggttacgtattccgtcaccggtttcctagataaaaacaatgaccttttgtttagaaacttgaaggagacgatgtgttcatccaaaaatcccatcatgagccagtgctttgatcgatccgaactgtctgataaaaagagaccagagacagttgccacccagtttaagatgtctctgcttcagctagtggaaatcctgcaatctaaggaaccggcctacgtgcgttgtattaagcctaatgatgcaaagcagcccgggcgatttgatgaagtgttgatcaggcatcaggtgaaatacctgggattgctagagaaccttcgcgtgaggcgggctggtttcgcctacaggcggaagtatgaggcctttctgcaacggtacaagtccttatgccctgaaacgtggccaacctgggctggacggccacaagacggggtggccgtgcttgtgcgtcacctgggatataagccagaagagtataaaatgggcagaacgaagatcttcattagattccccaaaacactcttcgcgactgaggacgcactggaagtccggaggcaaagtcttgcgacaaaaattcaggccgcttggagaggattccattggcggcagaaatttttaagagtaaaaaggagcgcaatctgcattcagtcttggtggaggggaaccctcgggagacgaaaggccgcaaagcggaaatgggctgcacagacaattcggcggctaataagggggttcgtccttcggcacgccccccggtgtcccgaaaatgcatttttcttggaccatgtcaggactagcttcctcctaaatttgaggagacagctgccccagaacgttctagatacctcgtggcccacacctccccccgctcttagggaggcctccgaactgttgcgcgagctgtgcattaagaatatggtttggaagtattgcagaagcattagtcccgaatggaagcagcaactccagcaaaaggcagtggcctcagagatctttaaggggaaaaaggacaattatccccagtctgtgccaaggttattcatatccactcgcctggggacagatgagattagcccaagagtactgcaggccctcggctctgaacccatacaatatgcggtgccagtggtgaagtacgacagaaaaggatacaagcctaggtcccggcagttgctcctcacgcccaatgctgtcgtgatcgtcgaagatgccaaagtgaaacagcgaattgactatgctaatctgacaggaataagcgtttcctccttatccgattccttatttgttttgcacgttcagcgggccgataataagcagaaaggtgacgtagtgcttcaaagtgatcacgtaatcgagaccctgactaagacagcgttatccgcgaaccgcgtgaacagcattaacatcaatcagggcagcatcacattcgccggcgggccaggccgggatggcacgattgacttcactcccgggtccgagcttctgatcaccaaggccaaaaacggccatcttgctgtggtagcacctagattaaactccagatag

SEQ ID NO: 37053 - DNA, 2418 bp, Artificial Sequence
  derived and/or modified sequence
atggaaagcgctctgaccgcacgtgatagggttggtgtgcaggacttcgttctcctggaaaactttacctcggaggctgcttttatcgaaaatctgcgcaggagatttcgagagaacctcatttatacttatatcggccccgtcttggtgagcgttaatccatatagggacctgcagatttactcccggcaacacatggagagataccgcggcgtgtctttctatgaggtgcctccgcacctatttgctgtcgcagatacggtgtacagagccctcaggactgaacgccgagaccaggctgtcatgattagcggggagtcgggcgctggcaaaacagaggccacaaaacgactactccagttctacgctgagacctgccctgctcctgaaaggggcggggcagtccgggaccgtctcctacagtcaaatcctgtcctggaagcctttggtaacgctaagacactgaggaacgataattcttctcgctttggcaagtacatggatgttcagttcgactttaaaggggcccccgtcggagggcacatcctctcatatctattggagaaatcaagggtggtacaccagaatcatggagaaaggaatttccatatcttttatcagctgctcgagggcggagaggaagagaccctccggagattgggactcgaaaggaaccctcagagctacctgtacctcgtgaaaggccaatgcgctaaggtgtcctccataaatgataagagcgactggaaagtcgttaggaaagctctgacggtgatagatttcacagaggatgaagttgaggacttgttgagtatagtagcttcagtcctgcacttaggaaacattcatttcgctgctaacgaggagagtaatgcccaggtgaccaccgagaaccaactgaagtacctcaccagactgctgtctgtggagggatccacactgcgcgaagcacttacccatcgcaaaatcattgccaaaggagaggagttgctttcccccttgaatttagaacaggctgcatacgcacgggatgcgctggcaaaggccgtgtactctagaacattcacttggctggttggcaaaattaacagaagccttgccagcaaggatgtggagagccctagctggaggtcaaccaccgtgctggggcttttggacatctatggatttgaggtgttccagcataactcatttgagcagttttgcattaactactgcaacgaaaagctgcagcagctttttatagaactgacattgaaaagcgaacaggaggagtacgaggccgaggggatcgcctgggaacccgtgcagtacttcaataacaaaatcatctgcgacctcgtggaggagaagttcaagggcattatctcgatcctggatgaagagtgtcttcggcccggggaggctacggacctgactttcctggagaaattagaagatactgtgaaacatcacccccacttcctgactcacaagctcgcagaccagcgcacacgcaagagcttgggcaggggcgaattccggttgctgcactatgctggagaggtgacttactctgttactggctttctcgataaaaataacgacttgttatttaggaacctaaaggagacaatgtgcagttcgaagaacccgataatgtcgcaatgctttgataggtcggaactgagcgataaaaagaggcccgaaacggtcgccacccaattcaagatgagccttctgcagctggtggaaatcctgcagtctaaagaaccagcttatgtgcggtgcattaaacccaatgatgctaagcagcccggccggttcgatgaagtcttgattaggcaccaggtgaagtacttggggctcctcgagaatttgcgggtgcgaagggcgggctttgcgtaccgacggaagtacgaggccttcctccagagatacaaatcgttgtgccccgagacttggcccacttgggccggacggccccaggatggagtagcggtcctggtccgtcacctgggctacaaacctgaagagtacaagatggggagaaccaaaatttttatcaggttccccaaaacactgttcgccaccgaggatgctctggaggtgagacggcaatcgctcgcgaccaaaatccaggcagcctggcgggggtttcactggaggcagaaatttctccgtgtaaagaggtccgcgatttgtatccagagctggtggcgcggaacgctgggacgaagaaaggccgccaaagaggtgggaggaacagaccatcccgcagcccatccacgcctgcggccggcacctcgccccccactgccacgggagagattactccccggaccctgtgcgcacttgtttttcgccaagcctgaggcagctgccgcgcccgagtgccctgggcatctggtggcacacgcccccacatgccctgcatag

SEQ ID NO: 37054 - DNA, 3120 bp, Artificial Sequence
  derived and/or modified sequence
atggccctgggatccgacggcgtgcgcgtcaccatggaatctgccctgacagctagggatcgtgttggggtccaagactttgtccttctcgaaaacttcacatctgaagcagcgttcatcgagaatctgagacgtcggtttcgcgaaaacctcatctacacatacatcggtcctgtgctggtcagtgttaatccttatagagatctacagatctactcacgacagcacatggaacgataccgaggcgtctctttctacgaggtcccgcctcatctctttgcggtggccgacacagtttatcgggcacttcgcactgaaaggcgcgaccaggccgtgatgatcagcggtgaatcgggtgccggcaagacggaagccaccaaaagactgctgcaattctatgcggagacttgtcctgctcccgagcgcggaggcgcggttcgagataggctgctgcaatctaacccagtgttagaagctttcgggaacgcgaaaacgctacgcaatgacaactcaagtaggttcgggaaatatatggacgtccaattcgatttcaaaggcgcacctgtgggaggacacatcctgtcctacctccttgagaaatccagggtcgttcatcagaaccacggggagaggaattttcatattttttaccagcttttggagggcggagaagaagaaacactcagacggttgggcctggagcgaaacccgcagtcatatctctacctcgttaaaggtcagtgcgcaaaagtcagtagcatcaacgacaagtccgattggaaggtggtgagaaaggccctcactgtcatcgactttactgaggacgaggtcgaggaccttctgtccatcgtggcatctgtgttgcatctcggtaacattcacttcgccgcaaatgaagagtccaacgcccaagtgacaactgagaaccagctgaagtatctgacgagactccttagcgttgagggctctaccttgcgtgaagccttaactcatcgcaaaatcattgccaaaggcgaggagctccttagccctctgaaccttgagcaagctgcctatgcccgggacgctctagcaaaggccgtatactctaggacctttacctggcttgtagggaaaatcaatcgctcgctcgctagtaaagacgtggaatccccaagttggaggtcgacaactgttctcgggctgcttgatatttatggctttgaggtttttcagcacaacagtttcgagcagttttgtatcaattattgtaacgaaaagcttcagcagttgtttatcgagctcaccctcaagtcagagcaggaggagtatgaggctgaagggatcgcgtgggagcctgtgcaatactttaataataaaataatttgtgacctggtcgaggagaaatttaaaggtatcatcagcatcttagacgaggagtgcctcaggcccggggaggccacggatctcaccttcctggaaaaactggaagacaccgtgaaacaccatccccattttctcacccacaagcttgctgatcagcggaccaggaagagcctaggtcgcggagagtttcggctgctccattatgctggagaggtaacctatagcgtaaccgggtttttggacaagaataatgatctgttatttcgcaatctgaaagaaacaatgtgtagttccaagaacccgatcatgtctcaatgctttgacaggtcagagctgagcgataaaaaacgcccggagacagtggctactcaatttaaaatgagcctcctgcagctggttgagatattgcagtccaaggaaccggcgtacgtccgctgtatcaaacctaacgacgccaagcaacctggcaggttcgacgaggtactcatacggcatcaagtaaagtatttgggcctcttagagaatctcagggtccgtcgcgccggattcgcctacaggagaaaatatgaggcctttctccaacggtataaatcactgtgtcctgaaacttggcctacctgggcgggaaggccacaggacggggtcgcagtgttagtgcgtcacctgggatataagcctgaggagtacaagatgggccgcacaaagatatttattcggttcccaaagacactctttgcgacggaagatgccctggaagtcagaaggcagtccctggccactaagattcaagcagcctggcggggctttcactggcgtcagaagtttctgagagtgaagcgaagcgccatctgtatccaatcttggtggcggggcaccctgggcagacggaaagccgctaagaggaaatgggctgcgcagaccatccgtaggttgataagagggttcgtcctgcgccatgcaccacgttgccctgagaacgctttctttctcgatcacgtccggacaagcttcctcctaaacctgcggcggcagttaccccagaacgtcctagacactagctggcctacaccgcctcccgcactgagggaagctagcgagctacttagggagctgtgcataaaaaatatggtgtggaaatattgccggtccatttctcctgagtggaaacagcaactacagcagaaggccgtggcgagtgagatcttcaaggggaaaaaggacaattacccacagtccgtgcctcgtctgttcatttcgacaaggctcggcaccgacgaaataagccctcgagtccttcaagcactgggctccgaacccatccagtatgcggtcccggtggtgaagtacgaccgcaaaggctataaaccacggtcaaggcagctgctcctgacccctaatgccgtggtgatcgtcgaggacgcgaaggtcaagcagcgaatcgactatgccaacctcaccggaatctctgtgagctcactgagcgactccctgttcgtcctccacgtgcaaagagccgacaacaagcagaaaggcgacgtggtgctgcaatctgaccacgtgattgaaaccctgacaaagaccgctcttagtgccaaccgcgtcaattcaatcaatatcaatcagggcagcattaccttcgccggcggtcccgggcgagacggaactatagatttcactcctggttctgagcttttaattacaaaggccaagaatggccaccttgccgtagtggcgccccggctgaactccagatag

SEQ ID NO: 37055 - DNA, 3192 bp, Artificial Sequence
  derived and/or modified sequence
atggccctgcaggtggagctggtgcccaccggggagatcatccgggtggtgcacccccaccggccctgcaagctggccctgggcagtgatggagtgcgggtgaccatggagagcgccctgacagcccgggacagagtgggcgtgcaggactttgtgctgctggagaacttcaccagcgaggccgccttcatcgagaacctgcggcggcgcttcagagaaaatctcatctacacctacatcggccctgtgctggtgtctgtgaacccctacagagacctgcagatctacagccggcagcacatggagcgctaccggggcgtgtccttctatgaggtgcccccccacctgtttgctgtggccgacacagtgtaccgggccctgaggacagaaagaagagaccaggccgtgatgatctctggagagagcggggccggcaagacagaggccaccaagaggctgctgcagttctacgccgagacctgcccagcccctgagcggggcggcgctgtgcgggaccggctgctgcagagcaaccctgtgctggaggcctttggaaatgccaagaccctgagaaatgacaacagcagcagatttgggaagtacatggatgtgcagtttgacttcaagggggcccctgtgggcggccacatcctgagctacctgctggagaagagccgggtggtgcaccagaaccacggggagaggaacttccacatcttctaccagctgctggagggcggggaggaggagaccctgcggcggctgggcctggagaggaacccccagagctacctgtacctggtgaagggccagtgtgccaaggtgagcagcatcaatgacaagagtgactggaaggtggtgaggaaggccctgaccgtcatcgacttcacagaagatgaggtggaggacctgctgagcatcgtggcctctgtgctgcacctgggcaacatccactttgctgccaatgaggagagcaatgcccaggtgaccacagagaaccagctgaagtacctgacccggctgctgtctgtggagggcagcaccctgcgggaggccctgacccacaggaagatcatcgccaagggggaggagctgctgagccccctgaacctggagcaggccgcctatgccagagatgccctggccaaggctgtgtacagcaggaccttcacctggctggtgggcaagatcaacagaagcctggccagcaaggatgtggagagccccagctggaggagcaccaccgtgctgggcctgctggacatctacggctttgaggtgttccagcacaacagctttgagcagttctgcatcaactactgcaatgagaagctgcagcagctgttcatcgagctgaccctgaagtctgagcaggaggagtatgaagctgagggcatcgcctgggagcctgtgcagtacttcaacaacaagatcatctgtgacctggtggaggagaagttcaagggcatcatcagcatcctggatgaagaatgtctgcggcctggagaggccacagacctgaccttcctggagaagctggaggacacagtgaagcaccacccccacttcctgacccacaagctggccgaccagaggaccaggaagagcctgggccgcggggagttccggctgctgcactacgccggggaggtgacctacagcgtgacaggcttcctggacaagaacaatgacctgctcttcaggaacctgaaggagaccatgtgcagcagcaagaaccccatcatgagccagtgctttgacagaagtgagctgagtgacaagaagaggcctgagaccgtggccacccagttcaagatgagcctgctgcagctggtggagatcctgcagagcaaggagcccgcctacgtgcgctgcatcaagcccaatgatgccaagcagcccggccgctttgatgaggtgctgatccgccaccaggtgaagtacctgggcctgctggagaacctgcgggtgcggcgggccggctttgcctacagaagaaaatatgaggccttcctgcagcgctacaagagcctgtgcccagagacctggcccacctgggccggccggccccaggatggagtggccgtgctggtgcgccacctgggctacaagccagaggagtacaagatgggccgcaccaagatcttcatccgcttccccaagaccctgtttgccacagaagatgccctggaggtgcggcggcagagcctggccaccaagatccaggccgcctggaggggcttccactggaggcagaagttcctgcgggtgaagaggtctgccatctgcatccagagctggtggaggggcaccctgggccgcaggaaggccgccaagaggaagtgggccgcccagaccatccggcggctcatccggggctttgtgctgcggcatgccccccgctgcccagaaaatgccttcttcctggaccacgtgaggaccagcttcctgctgaacctgcggcggcagctgccccagaatgtgctggacacctcctggcccaccccacctccagccctgcgggaggccagcgagctgctgcgggagctgtgcatcaagaacatggtgtggaagtactgccgcagcatcagccctgagtggaagcagcagctgcagcagaaggctgtggccagcgagatcttcaagggcaagaaggacaactacccccagagcgtgcccaggctcttcatcagcacccggctgggcacagatgagatcagcccccgggtgctgcaggccctgggcagcgagcccatccagtatgctgtgcctgtggtgaagtatgacaggaagggctacaagcccaggagccggcagctgctgctgaccccaaatgctgtggtgattgtggaggatgccaaggtgaagcagagaattgattatgccaacctgaccggcatctctgtgagcagcctgagtgacagcctgtttgtgctgcacgtgcagagagctgacaacaagcagaagggagatgtggtgctgcagagcgaccacgtgattgagaccctgaccaagacagccctgagcgccaacagagtgaacagcatcaacatcaaccagggcagcatcacctttgctgggggccctggaagagatggcaccatcgacttcaccccaggcagcgagctgctgatcaccaaggccaagaatggccacctggccgtggtggccccccggctgaacagcaggtag

SEQ ID NO: 37056 - DNA, 3087 bp, Artificial Sequence
  derived and/or modified sequence
atggagagcgccctgacagcccgggacagagtgggcgtgcaggactttgtgctgctggagaacttcaccagcgaggccgccttcatcgagaacctgcggcggcgcttccgggagaacctgatctacacctacatcggccctgtgctggtgtctgtgaacccctacagagacctgcagatctacagccggcagcacatggagcgctacagaggagtgtccttctatgaggtgcccccccacctgtttgctgtggccgacacagtgtaccgggccctgaggacagagcggcgggaccaggccgtgatgatcagcggggagagcggggccggcaagacagaggccaccaagaggctgctgcagttctatgcagagacctgcccagcccctgagcggggcggcgctgtgcgggaccggctgctgcagagcaaccctgtgctggaggcctttggaaatgccaagaccctgagaaatgacaacagcagcagatttgggaagtacatggatgtgcagtttgacttcaagggggcccctgtgggcggccacatcctgagctacctgctggagaagagccgggtggtgcaccagaaccacggggagaggaacttccacatcttctaccagctgctggagggcggggaggaggagaccctgcggcggctgggcctggagaggaacccccagagctacctgtacctggtgaagggccagtgtgccaaggtgagcagcatcaatgacaagagtgactggaaggtggtgaggaaggccctgactgtgattgacttcacagaagatgaggtggaggacctgctgagcatcgtggcctctgtgctgcacctgggcaacatccactttgctgccaatgaggagagcaatgcccaggtgaccacagagaaccagctgaagtacctgacccggctgctgtctgtggagggcagcaccctgcgggaggccctgacccacaggaagatcatcgccaagggggaggagctgctgagccccctgaacctggagcaggccgcctatgccagagatgccctggccaaggctgtgtacagcaggaccttcacctggctggtgggcaagatcaacagaagcctggccagcaaggatgtggagagccccagctggaggagcaccaccgtgctgggcctgctggacatctacggctttgaggtgttccagcacaacagctttgagcagttctgcatcaactactgcaatgagaagctgcagcagctgttcatcgagctgaccctgaagtctgagcaggaggagtatgaggccgagggcatcgcctgggagcctgtgcagtacttcaacaacaagatcatctgtgacctggtggaggagaagttcaagggcatcatcagcatcctggatgaggagtgcctgcggcctggagaggccacagacctgaccttcctggagaagctggaggacacagtgaagcaccacccccacttcctgacccacaagctggccgaccagaggaccaggaagagcctgggccgcggggagttccggctgctgcactacgccggggaggtgacctacagcgtgacaggcttcctggacaagaacaatgacctgctcttcaggaacctgaaggagaccatgtgcagcagcaagaaccccatcatgagccagtgctttgacagaagtgagctgagtgacaagaagaggcctgagaccgtggccacccagttcaagatgagcctgctgcagctggtggagatcctgcagagcaaggagcccgcctacgtgcgctgcatcaagcccaatgatgccaagcagcccggccgctttgatgaggtgctgatccgccaccaggtgaagtacctgggcctgctggagaacctgcgggtgagaagagctggctttgcctacagaagaaaatatgaggccttcctgcagcgctacaagagcctgtgcccagagacctggcccacctgggccggccggccccaggatggagtggccgtgctggtgcgccacctgggctacaagccagaggagtacaagatgggccgcaccaagatcttcatccgcttccccaagaccctgtttgccacagaagatgccctggaggtgcggcggcagagcctggccaccaagatccaggccgcctggaggggcttccactggaggcagaagttcctgcgggtgaagaggtctgccatctgcatccagagctggtggaggggcaccctgggccgcaggaaggccgccaagaggaagtgggccgcccagaccatcagaagactcatccggggctttgtgctgcggcatgccccccgctgcccagaaaatgccttcttcctggaccacgtgaggaccagcttcctgctgaacctgcggcggcagctgccccagaatgtgctggacacctcctggcccaccccacctccagccctgcgggaggccagcgagctgctgcgggagctgtgcatcaagaacatggtgtggaagtactgccgcagcatcagccctgagtggaagcagcagctgcagcagaaggctgtggccagcgagatcttcaagggcaagaaggacaactacccccagagcgtgcccaggctcttcatcagcacccggctgggcacagatgagatcagcccccgggtgctgcaggccctgggcagcgagcccatccagtatgctgtgcctgtggtgaagtatgacaggaagggctacaagcccaggagccggcagctgctgctgaccccaaatgctgtggtgattgtggaggatgccaaggtgaagcagagaattgattatgccaacctgaccggcatctctgtgagcagcctgagtgacagcctgtttgtgctgcacgtgcagagagctgacaacaagcagaagggagatgtggtgctgcagagcgaccacgtgattgagaccctgaccaagacagccctgagcgccaacagagtgaacagcatcaacatcaaccagggcagcatcacctttgctgggggccctggaagagatggcaccatcgacttcaccccaggcagcgagctgctgatcaccaaggccaagaatggccacctggccgtggtggccccccggctgaacagcaggtag

SEQ ID NO: 37057 - DNA, 2418 bp, Artificial Sequence
  derived and/or modified sequence
atggagagcgccctgacagcccgggacagagtgggcgtgcaggactttgtgctgctggagaacttcaccagcgaggccgccttcatcgagaacctgcggcggcgcttccgggagaacctgatctacacctacatcggccctgtgctggtgtctgtgaacccctacagagacctgcagatctacagccggcagcacatggagcgctacagaggagtgtccttctatgaggtgcccccccacctgtttgctgtggccgacacagtgtaccgggccctgaggacagagcggcgggaccaggccgtgatgatcagcggggagagcggggccggcaagacagaggccaccaagaggctgctgcagttctatgcagagacctgcccagcccctgagcggggcggcgctgtgcgggaccggctgctgcagagcaaccctgtgctggaggcctttggaaatgccaagaccctgagaaatgacaacagcagcagatttgggaagtacatggatgtgcagtttgacttcaagggggcccctgtgggcggccacatcctgagctacctgctggagaagagccgggtggtgcaccagaaccacggggagaggaacttccacatcttctaccagctgctggagggcggggaggaggagaccctgcggcggctgggcctggagaggaacccccagagctacctgtacctggtgaagggccagtgtgccaaggtgagcagcatcaatgacaagagtgactggaaggtggtgaggaaggccctgactgtgattgacttcacagaagatgaggtggaggacctgctgagcatcgtggcctctgtgctgcacctgggcaacatccactttgctgccaatgaggagagcaatgcccaggtgaccacagagaaccagctgaagtacctgacccggctgctgtctgtggagggcagcaccctgcgggaggccctgacccacaggaagatcatcgccaagggggaggagctgctgagccccctgaacctggagcaggccgcctatgccagagatgccctggccaaggctgtgtacagcaggaccttcacctggctggtgggcaagatcaacagaagcctggccagcaaggatgtggagagccccagctggaggagcaccaccgtgctgggcctgctggacatctacggctttgaggtgttccagcacaacagctttgagcagttctgcatcaactactgcaatgagaagctgcagcagctgttcatcgagctgaccctgaagtctgagcaggaggagtatgaggccgagggcatcgcctgggagcctgtgcagtacttcaacaacaagatcatctgtgacctggtggaggagaagttcaagggcatcatcagcatcctggatgaggagtgcctgcggcctggagaggccacagacctgaccttcctggagaagctggaggacacagtgaagcaccacccccacttcctgacccacaagctggccgaccagaggaccaggaagagcctgggccgcggggagttccggctgctgcactacgccggggaggtgacctacagcgtgacaggcttcctggacaagaacaatgacctgctcttcaggaacctgaaggagaccatgtgcagcagcaagaaccccatcatgagccagtgctttgacagaagtgagctgagtgacaagaagaggcctgagaccgtggccacccagttcaagatgagcctgctgcagctggtggagatcctgcagagcaaggagcccgcctacgtgcgctgcatcaagcccaatgatgccaagcagcccggccgctttgatgaggtgctgatccgccaccaggtgaagtacctgggcctgctggagaacctgcgggtgagaagagctggctttgcctacagaagaaaatatgaggccttcctgcagcgctacaagagcctgtgcccagagacctggcccacctgggccggccggccccaggatggagtggccgtgctggtgcgccacctgggctacaagccagaggagtacaagatgggccgcaccaagatcttcatccgcttccccaagaccctgtttgccacagaagatgccctggaggtgcggcggcagagcctggccaccaagatccaggccgcctggaggggcttccactggaggcagaagttcctgcgggtgaagaggtctgccatctgcatccagagctggtggaggggcaccctgggccgcaggaaggccgccaaggaggtgggcggcacagaccaccctgctgcccacccccggctgcggcctgccccccggccccccctgccccgggagcggctgctgcccggcccctgtgcccacctgttctttgccaagccagaggccgccgccgccccagaatgtcctggccacctggtggcccacgcccccacctgcccagcctag

SEQ ID NO: 37058 - DNA, 3120 bp, Artificial Sequence
  derived and/or modified sequence
atggccctgggcagtgatggagtgcgggtgaccatggagagcgccctgacagcccgggacagagtgggcgtgcaggactttgtgctgctggagaacttcaccagcgaggccgccttcatcgagaacctgcggcggcgcttcagagaaaatctcatctacacctacatcggccctgtgctggtgtctgtgaacccctacagagacctgcagatctacagccggcagcacatggagcgctaccggggcgtgtccttctatgaggtgcccccccacctgtttgctgtggccgacacagtgtaccgggccctgaggacagaaagaagagaccaggccgtgatgatctctggagagagcggggccggcaagacagaggccaccaagaggctgctgcagttctacgccgagacctgcccagcccctgagcggggcggcgctgtgcgggaccggctgctgcagagcaaccctgtgctggaggcctttggaaatgccaagaccctgagaaatgacaacagcagcagatttgggaagtacatggatgtgcagtttgacttcaagggggcccctgtgggcggccacatcctgagctacctgctggagaagagccgggtggtgcaccagaaccacggggagaggaacttccacatcttctaccagctgctggagggcggggaggaggagaccctgcggcggctgggcctggagaggaacccccagagctacctgtacctggtgaagggccagtgtgccaaggtgagcagcatcaatgacaagagtgactggaaggtggtgaggaaggccctgaccgtcatcgacttcacagaagatgaggtggaggacctgctgagcatcgtggcctctgtgctgcacctgggcaacatccactttgctgccaatgaggagagcaatgcccaggtgaccacagagaaccagctgaagtacctgacccggctgctgtctgtggagggcagcaccctgcgggaggccctgacccacaggaagatcatcgccaagggggaggagctgctgagccccctgaacctggagcaggccgcctatgccagagatgccctggccaaggctgtgtacagcaggaccttcacctggctggtgggcaagatcaacagaagcctggccagcaaggatgtggagagccccagctggaggagcaccaccgtgctgggcctgctggacatctacggctttgaggtgttccagcacaacagctttgagcagttctgcatcaactactgcaatgagaagctgcagcagctgttcatcgagctgaccctgaagtctgagcaggaggagtatgaagctgagggcatcgcctgggagcctgtgcagtacttcaacaacaagatcatctgtgacctggtggaggagaagttcaagggcatcatcagcatcctggatgaagaatgtctgcggcctggagaggccacagacctgaccttcctggagaagctggaggacacagtgaagcaccacccccacttcctgacccacaagctggccgaccagaggaccaggaagagcctgggccgcggggagttccggctgctgcactacgccggggaggtgacctacagcgtgacaggcttcctggacaagaacaatgacctgctcttcaggaacctgaaggagaccatgtgcagcagcaagaaccccatcatgagccagtgctttgacagaagtgagctgagtgacaagaagaggcctgagaccgtggccacccagttcaagatgagcctgctgcagctggtggagatcctgcagagcaaggagcccgcctacgtgcgctgcatcaagcccaatgatgccaagcagcccggccgctttgatgaggtgctgatccgccaccaggtgaagtacctgggcctgctggagaacctgcgggtgcggcgggccggctttgcctacagaagaaaatatgaggccttcctgcagcgctacaagagcctgtgcccagagacctggcccacctgggccggccggccccaggatggagtggccgtgctggtgcgccacctgggctacaagccagaggagtacaagatgggccgcaccaagatcttcatccgcttccccaagaccctgtttgccacagaagatgccctggaggtgcggcggcagagcctggccaccaagatccaggccgcctggaggggcttccactggaggcagaagttcctgcgggtgaagaggtctgccatctgcatccagagctggtggaggggcaccctgggccgcaggaaggccgccaagaggaagtgggccgcccagaccatccggcggctcatccggggctttgtgctgcggcatgccccccgctgcccagaaaatgccttcttcctggaccacgtgaggaccagcttcctgctgaacctgcggcggcagctgccccagaatgtgctggacacctcctggcccaccccacctccagccctgcgggaggccagcgagctgctgcgggagctgtgcatcaagaacatggtgtggaagtactgccgcagcatcagccctgagtggaagcagcagctgcagcagaaggctgtggccagcgagatcttcaagggcaagaaggacaactacccccagagcgtgcccaggctcttcatcagcacccggctgggcacagatgagatcagcccccgggtgctgcaggccctgggcagcgagcccatccagtatgctgtgcctgtggtgaagtatgacaggaagggctacaagcccaggagccggcagctgctgctgaccccaaatgctgtggtgattgtggaggatgccaaggtgaagcagagaattgattatgccaacctgaccggcatctctgtgagcagcctgagtgacagcctgtttgtgctgcacgtgcagagagctgacaacaagcagaagggagatgtggtgctgcagagcgaccacgtgattgagaccctgaccaagacagccctgagcgccaacagagtgaacagcatcaacatcaaccagggcagcatcacctttgctgggggccctggaagagatggcaccatcgacttcaccccaggcagcgagctgctgatcaccaaggccaagaatggccacctggccgtggtggccccccggctgaacagcaggtag

SEQ ID NO: 37059 - DNA, 4946 bp, Artificial Sequence
  derived and/or modified sequence
agaggcctcccagtcagacctggacggctccagccgtgtcctgaggagctggaccagccacatcccctggggctgcagttgaagcagaaccaagtggccatcccggcgttagaccgtaggttcctggtcccggagtggtcggagcccgccagtgggcaggcagctcttgctcacaggccgcggtgcccaggccgctggctctccgcagggcggaatggcgctgcaagtggagctggtacccaccggggagatcatccgcgtggttcatccccacaggccctgcaagcttgccctgggcagtgacggggttcgggtgaccatggagagtgcgctcaccgcccgtgaccgggtgggggtgcaggatttcgtgctgctggagaacttcaccagcgaggccgccttcatcgagaacctgcggcggcgatttcgggagaatctcatctacacctacattggccccgtcctggtctctgtcaatccctaccgggacctgcagatctacagccggcagcatatggagcgttaccgtggcgtcagcttctatgaagtgccccctcacctgtttgccgtggcggacactgtgtaccgagcactgcgcacggagcgtcgggaccaggctgtgatgatctctggggagagcggggcaggcaagaccgaggccaccaagaggctgctgcagttctatgcagagacctgcccagcccccgagcgcggaggtgccgtgcgggaccggctgctacagagcaacccggtgctggaggcctttggaaatgccaagaccctccggaacgataactccagcaggttcgggaagtacatggatgtgcagtttgacttcaagggtgcccccgtgggtggccacatcctcagttacctcctggaaaagtcacgagtggtgcaccagaatcatggggagcggaacttccacatcttctaccagctgctggaggggggtgaggaggagactcttcgcaggctgggcttggaacggaacccccagagctacctgtacctggtgaagggccagtgtgccaaagtctcctccatcaacgacaagagtgactggaaggtcgtcaggaaggctctgacagtcattgatttcaccgaggatgaagtggaggacctgctgagcatcgtggccagcgtccttcatttgggcaacatccactttgctgccaacgaggagagcaatgcccaggtcaccaccgagaaccagctcaagtatctgaccaggctcctcagcgtggaaggctcgacgctgcgagaagccctgacacacaggaagatcatcgccaagggggaggagctcctgagcccgctgaacctggagcaggccgcgtacgcacgagacgccctcgccaaggctgtgtacagccgcacttttacctggctcgtcgggaagatcaacaggtcgctggcctccaaggacgtggagagccccagctggcggagcaccacggttctcgggctcctggatatttatggctttgaagtgtttcagcataacagctttgagcagttctgcatcaattactgcaacgagaagctgcagcagctcttcatcgagctcacgctcaagtcggagcaggaggagtacgaggcagagggcatcgcgtgggagcccgtccagtatttcaacaacaaaatcatctgtgatctggtggaggagaagtttaagggcatcatctcgattttggatgaggagtgtctgcgccccggggaggccacagacctgaccttcctggagaagctggaggatactgtcaagcaccatccacacttcctgacgcacaagctggctgaccagcggaccaggaaatctctgggccgaggggaattccgccttctgcactatgcgggggaggtgacctacagcgtgaccgggtttctggacaaaaacaatgaccttctcttccggaaccttaaggagaccatgtgtagctcaaagaatcccattatgagccagtgctttgaccggagcgagctcagtgacaagaagcggccagagacggtcgccacccagttcaagatgagcctcctgcagctggtggagatcctgcagtctaaggagcccgcctacgtccgctgcatcaaacccaatgatgccaaacagcccggccgctttgacgaggtgctgatccgccaccaggtgaagtacctggggctgttggaaaacctgcgcgtgcgcagagccggctttgcctatcgccgcaaatacgaagctttcctgcaaaggtacaagtcactgtgcccagagacgtggcccacgtgggcaggacggccgcaggatggggtggctgtgctggtccgacacctgggctacaagccagaagagtacaagatgggcaggaccaagatcttcatccgcttccccaagaccctgtttgccacagaggatgccctggaggtccggcggcagagcctggccacaaagatccaagctgcctggaggggctttcactggcggcagaaattcctccgggtgaagagatcagccatctgcatccagtcgtggtggcgtggaacactgggccggaggaaggcagccaagaggaagtgggcggcacagaccatccggcggctcatccgaggcttcgtcctgcgccacgccccccgctgccccgagaacgccttcttcctggaccatgtgcgcacctcttttttgctaaacctgaggcggcagctgccccagaatgtcctggacacctcgtggcccacgcccccacctgccctgcgtgaggcctcagagcttctgcgggagttgtgcataaagaacatggtgtggaaatactgccggagtatcagccctgagtggaagcagcagctgcagcagaaggccgtggctagtgagatcttcaagggcaagaaggataattaccctcagagtgtacccaggctcttcatcagcactcggcttggtacagatgagatcagcccccgagtgctgcaggccttgggctctgagcccattcagtatgcggtgcctgttgtgaaatacgaccgcaagggctacaagcctcgctcccggcagctgctgctcacgcccaacgccgtcgtcatcgtggaggacgccaaagtcaagcagaggattgattacgccaacctgaccggaatctctgtcagcagcctgagcgacagtctttttgtgcttcatgtacagcgtgcggacaataagcaaaagggagatgtggtgctgcagagtgaccacgtgattgagacgctgaccaagacagccctcagtgccaaccgcgtgaacagcatcaacatcaaccagggcagcatcacgtttgcagggggccccggcagggatggcaccattgacttcacacccggctcggagctgctcatcaccaaggccaagaacgggcacctggctgtggtcgccccacggctgaattctcggtgataaaggcgcccactggaccctcccaacgcccaatgctttgcttttctcctcctccccttcccagttaccaaagactcgaacttccagacagggacccagggacaccccgaagcccacctgcaatctcccacctcctgcccatccctctcttgagggagcagcaggggccaggagctaccccaggagtgggccaggccgggccacagcaataggaaagccagggccagagcgagccatgccagccctactgccgatgccaaatatttgagagaagggaacttttgctgaggttttctctgaggtttttttgatgctttataggaaactattttttaaaaaaagccatttcccacccaaggacacagtggatgtgttttccctgactccagcagggcaaggaatgtagccgagaggttgtgtgggctgggctctggtgccctcttccctggccaggacacctctcctcctgattcccttggcaccttgtctttctgtctgtttacctgtctccctgcctgcccatctgcatcttttgcagcccactctgacttccatctgggggctgagaccacccttgcctgcccccttctttctgccttaagaatgtccttttaggctgggcatggtggctcacgcctgtaaccccagcactttgggaggcggagacgggcagataacctgaggtcaggatttcgagaccaacctgacctacatggagaaactccgcctctagtaaaaatacaaaattagccgggcatggtggtgcacgcctctaatcccagctactcgggaggctgaggcaggagaatcacttgaacccgggaagtggaggttgcagtgagccaagagtacaccactgcactccagcctgggcaacagagcgagactccgtcttaaaaaaaaaaaaaaagaacgcccttttactgtcctcatcatcccagtttgaggcagtgctggagtggggaaggccgtcttagaccatagaggttggaagacgctgagagatcatccagcccagccccttgatgttacagagcagaagacagatgcccaaacaggagaaggcacttgcccacggtcatacggcaggttgccacaaaaccaagatggcagcccttcctcagcgtgcctcactgccactcccagagccagggagccccataaaacccacatcatgtcttaagagtatatctggctccttgaccagcaatcggccctgggagccaccaggtgggaaaagcgcctctgccagagtccaggccttgggatgacagacagcttgcccgcacactcgggccccactcaaggatgtagggccttttctggcccctgacccctccctggcatgggagcgtggggacggggctggccttgggaggagcggcaggggcatcacctccttctgctgcttctccctgctcctaccctcaagggcctgggggctgcccagctgcctctatgcccttctgggggtctcagcccactgctgacacttctgcaatccagagaaacactaaataaagcaatacgtgtttgccaa

SEQ ID NO: 37060 - DNA, 4734 bp, Artificial Sequence
  derived and/or modified sequence
agagtgcgcccgggccgcggatccccaagcccgccacgccgcccagcccggccccgcccgcgccggaagagccacgccggccctgggcagtgacggggttcgggtgaccatggagagtgcgctcaccgcccgtgaccgggtgggggtgcaggatttcgtgctgctggagaacttcaccagcgaggccgccttcatcgagaacctgcggcggcgatttcgggagaatctcatctacacctacattggccccgtcctggtctctgtcaatccctaccgggacctgcagatctacagccggcagcatatggagcgttaccgtggcgtcagcttctatgaagtgccccctcacctgtttgccgtggcggacactgtgtaccgagcactgcgcacggagcgtcgggaccaggctgtgatgatctctggggagagcggggcaggcaagaccgaggccaccaagaggctgctgcagttctatgcagagacctgcccagcccccgagcgcggaggtgccgtgcgggaccggctgctacagagcaacccggtgctggaggcctttggaaatgccaagaccctccggaacgataactccagcaggttcgggaagtacatggatgtgcagtttgacttcaagggtgcccccgtgggtggccacatcctcagttacctcctggaaaagtcacgagtggtgcaccagaatcatggggagcggaacttccacatcttctaccagctgctggaggggggtgaggaggagactcttcgcaggctgggcttggaacggaacccccagagctacctgtacctggtgaagggccagtgtgccaaagtctcctccatcaacgacaagagtgactggaaggtcgtcaggaaggctctgacagtcattgatttcaccgaggatgaagtggaggacctgctgagcatcgtggccagcgtccttcatttgggcaacatccactttgctgccaacgaggagagcaatgcccaggtcaccaccgagaaccagctcaagtatctgaccaggctcctcagcgtggaaggctcgacgctgcgagaagccctgacacacaggaagatcatcgccaagggggaggagctcctgagcccgctgaacctggagcaggccgcgtacgcacgagacgccctcgccaaggctgtgtacagccgcacttttacctggctcgtcgggaagatcaacaggtcgctggcctccaaggacgtggagagccccagctggcggagcaccacggttctcgggctcctggatatttatggctttgaagtgtttcagcataacagctttgagcagttctgcatcaattactgcaacgagaagctgcagcagctcttcatcgagctcacgctcaagtcggagcaggaggagtacgaggcagagggcatcgcgtgggagcccgtccagtatttcaacaacaaaatcatctgtgatctggtggaggagaagtttaagggcatcatctcgattttggatgaggagtgtctgcgccccggggaggccacagacctgaccttcctggagaagctggaggatactgtcaagcaccatccacacttcctgacgcacaagctggctgaccagcggaccaggaaatctctgggccgaggggaattccgccttctgcactatgcgggggaggtgacctacagcgtgaccgggtttctggacaaaaacaatgaccttctcttccggaaccttaaggagaccatgtgtagctcaaagaatcccattatgagccagtgctttgaccggagcgagctcagtgacaagaagcggccagagacggtcgccacccagttcaagatgagcctcctgcagctggtggagatcctgcagtctaaggagcccgcctacgtccgctgcatcaaacccaatgatgccaaacagcccggccgctttgacgaggtgctgatccgccaccaggtgaagtacctggggctgttggaaaacctgcgcgtgcgcagagccggctttgcctatcgccgcaaatacgaagctttcctgcaaaggtacaagtcactgtgcccagagacgtggcccacgtgggcaggacggccgcaggatggggtggctgtgctggtccgacacctgggctacaagccagaagagtacaagatgggcaggaccaagatcttcatccgcttccccaagaccctgtttgccacagaggatgccctggaggtccggcggcagagcctggccacaaagatccaagctgcctggaggggctttcactggcggcagaaattcctccgggtgaagagatcagccatctgcatccagtcgtggtggcgtggaacactgggccggaggaaggcagccaagaggaagtgggcggcacagaccatccggcggctcatccgaggcttcgtcctgcgccacgccccccgctgccccgagaacgccttcttcctggaccatgtgcgcacctcttttttgctaaacctgaggcggcagctgccccagaatgtcctggacacctcgtggcccacgcccccacctgccctgcgtgaggcctcagagcttctgcgggagttgtgcataaagaacatggtgtggaaatactgccggagtatcagccctgagtggaagcagcagctgcagcagaaggccgtggctagtgagatcttcaagggcaagaaggataattaccctcagagtgtacccaggctcttcatcagcactcggcttggtacagatgagatcagcccccgagtgctgcaggccttgggctctgagcccattcagtatgcggtgcctgttgtgaaatacgaccgcaagggctacaagcctcgctcccggcagctgctgctcacgcccaacgccgtcgtcatcgtggaggacgccaaagtcaagcagaggattgattacgccaacctgaccggaatctctgtcagcagcctgagcgacagtctttttgtgcttcatgtacagcgtgcggacaataagcaaaagggagatgtggtgctgcagagtgaccacgtgattgagacgctgaccaagacagccctcagtgccaaccgcgtgaacagcatcaacatcaaccagggcagcatcacgtttgcagggggccccggcagggatggcaccattgacttcacacccggctcggagctgctcatcaccaaggccaagaacgggcacctggctgtggtcgccccacggctgaattctcggtgataaaggcgcccactggaccctcccaacgcccaatgctttgcttttctcctcctccccttcccagttaccaaagactcgaacttccagacagggacccagggacaccccgaagcccacctgcaatctcccacctcctgcccatccctctcttgagggagcagcaggggccaggagctaccccaggagtgggccaggccgggccacagcaataggaaagccagggccagagcgagccatgccagccctactgccgatgccaaatatttgagagaagggaacttttgctgaggttttctctgaggtttttttgatgctttataggaaactattttttaaaaaaagccatttcccacccaaggacacagtggatgtgttttccctgactccagcagggcaaggaatgtagccgagaggttgtgtgggctgggctctggtgccctcttccctggccaggacacctctcctcctgattcccttggcaccttgtctttctgtctgtttacctgtctccctgcctgcccatctgcatcttttgcagcccactctgacttccatctgggggctgagaccacccttgcctgcccccttctttctgccttaagaatgtccttttaggctgggcatggtggctcacgcctgtaaccccagcactttgggaggcggagacgggcagataacctgaggtcaggatttcgagaccaacctgacctacatggagaaactccgcctctagtaaaaatacaaaattagccgggcatggtggtgcacgcctctaatcccagctactcgggaggctgaggcaggagaatcacttgaacccgggaagtggaggttgcagtgagccaagagtacaccactgcactccagcctgggcaacagagcgagactccgtcttaaaaaaaaaaaaaaagaacgcccttttactgtcctcatcatcccagtttgaggcagtgctggagtggggaaggccgtcttagaccatagaggttggaagacgctgagagatcatccagcccagccccttgatgttacagagcagaagacagatgcccaaacaggagaaggcacttgcccacggtcatacggcaggttgccacaaaaccaagatggcagcccttcctcagcgtgcctcactgccactcccagagccagggagccccataaaacccacatcatgtcttaagagtatatctggctccttgaccagcaatcggccctgggagccaccaggtgggaaaagcgcctctgccagagtccaggccttgggatgacagacagcttgcccgcacactcgggccccactcaaggatgtagggccttttctggcccctgacccctccctggcatgggagcgtggggacggggctggccttgggaggagcggcaggggcatcacctccttctgctgcttctccctgctcctaccctcaagggcctgggggctgcccagctgcctctatgcccttctgggggtctcagcccactgctgacacttctgcaatccagagaaacactaaataaagcaatacgtgtttgcc

SEQ ID NO: 37061 - DNA, 3013 bp, Artificial Sequence
  derived and/or modified sequence
aactttcccgggactcgagttcgggggttgggggaggaaaatcccgcttcctctgggacccgcaggcctcggtgcccgcccagcgcccaggcccgccgcggagtgtagtcccaggcccggaagccctgggcagtgacggggttcgggtgaccatggagagtgcgctcaccgcccgtgaccgggtgggggtgcaggatttcgtgctgctggagaacttcaccagcgaggccgccttcatcgagaacctgcggcggcgatttcgggagaatctcatctacacctacattggccccgtcctggtctctgtcaatccctaccgggacctgcagatctacagccggcagcatatggagcgttaccgtggcgtcagcttctatgaagtgccccctcacctgtttgccgtggcggacactgtgtaccgagcactgcgcacggagcgtcgggaccaggctgtgatgatctctggggagagcggggcaggcaagaccgaggccaccaagaggctgctgcagttctatgcagagacctgcccagcccccgagcgcggaggtgccgtgcgggaccggctgctacagagcaacccggtgctggaggcctttggaaatgccaagaccctccggaacgataactccagcaggttcgggaagtacatggatgtgcagtttgacttcaagggtgcccccgtgggtggccacatcctcagttacctcctggaaaagtcacgagtggtgcaccagaatcatggggagcggaacttccacatcttctaccagctgctggaggggggtgaggaggagactcttcgcaggctgggcttggaacggaacccccagagctacctgtacctggtgaagggccagtgtgccaaagtctcctccatcaacgacaagagtgactggaaggtcgtcaggaaggctctgacagtcattgatttcaccgaggatgaagtggaggacctgctgagcatcgtggccagcgtccttcatttgggcaacatccactttgctgccaacgaggagagcaatgcccaggtcaccaccgagaaccagctcaagtatctgaccaggctcctcagcgtggaaggctcgacgctgcgagaagccctgacacacaggaagatcatcgccaagggggaggagctcctgagcccgctgaacctggagcaggccgcgtacgcacgagacgccctcgccaaggctgtgtacagccgcacttttacctggctcgtcgggaagatcaacaggtcgctggcctccaaggacgtggagagccccagctggcggagcaccacggttctcgggctcctggatatttatggctttgaagtgtttcagcataacagctttgagcagttctgcatcaattactgcaacgagaagctgcagcagctcttcatcgagctcacgctcaagtcggagcaggaggagtacgaggcagagggcatcgcgtgggagcccgtccagtatttcaacaacaaaatcatctgtgatctggtggaggagaagtttaagggcatcatctcgattttggatgaggagtgtctgcgccccggggaggccacagacctgaccttcctggagaagctggaggatactgtcaagcaccatccacacttcctgacgcacaagctggctgaccagcggaccaggaaatctctgggccgaggggaattccgccttctgcactatgcgggggaggtgacctacagcgtgaccgggtttctggacaaaaacaatgaccttctcttccggaaccttaaggagaccatgtgtagctcaaagaatcccattatgagccagtgctttgaccggagcgagctcagtgacaagaagcggccagagacggtcgccacccagttcaagatgagcctcctgcagctggtggagatcctgcagtctaaggagcccgcctacgtccgctgcatcaaacccaatgatgccaaacagcccggccgctttgacgaggtgctgatccgccaccaggtgaagtacctggggctgttggaaaacctgcgcgtgcgcagagccggctttgcctatcgccgcaaatacgaagctttcctgcaaaggtacaagtcactgtgcccagagacgtggcccacgtgggcaggacggccgcaggatggggtggctgtgctggtccgacacctgggctacaagccagaagagtacaagatgggcaggaccaagatcttcatccgcttccccaagaccctgtttgccacagaggatgccctggaggtccggcggcagagcctggccacaaagatccaagctgcctggaggggctttcactggcggcagaaattcctccgggtgaagagatcagccatctgcatccagtcgtggtggcgtggaacactgggccggaggaaggcagccaaggaagtgggcggcacagaccatccggcggctcatccgaggcttcgtcctgcgccacgccccccgctgccccgagaacgccttcttcctggaccatgtgcgcacctcttttttgctaaacctgaggcggcagctgccccagaatgtcctggacacctcgtggcccacgcccccacctgccctgcgtgaggcctcagagcttctgcgggagttgtgcataaagaacatggtgtggaaatactgccggagtatcagccctgagtggaagcagcagctgcagcagaaggccgtggctagtgagatcttcaagggcaagaaggataattaccctcagagtgtacccaggctcttcatcagcactcggcttggtacagatgagatcagcccccgagtgctgcaggccttgggctctgagcccattcagtatgcggtgcctgttgtgaaatacgaccgcaagggctacaagcctcgctcccggcagctgctgctcacgcccaacgccgtcgtcatcgtggaggacgccaaagtcaagcagaggattgattacgccaacctgaccggaatctctgtcagcagcctgagcgacagtctttttgtgcttcatgtacagcgtgcggacaataagcaaaagg

SEQ ID NO: 37062 - DNA, 3664 bp, Artificial Sequence
  derived and/or modified sequence
aaatctgggcctttcgtggtcagaggacaccggcggcccctttgggatccacccccaatcaccaccaccttgttcttctctgaccctggatactctgggtgtccattttttggagccctgagaccctgtttgaagagggatccatctcagccctggttgtggggcgagggtcttgctcagcctgcaccaccctccaccctccagtaggacccagaggcagctgggctttccatggccctgggcagtgacggggttcgggtgaccatggagagtgcgctcaccgcccgtgaccgggtgggggtgcaggatttcgtgctgctggagaacttcaccagcgaggccgccttcatcgagaacctgcggcggcgatttcgggagaatctcatctacacctacattggccccgtcctggtctctgtcaatccctaccgggacctgcagatctacagccggcagcatatggagcgttaccgtggcgtcagcttctatgaagtgccccctcacctgtttgccgtggcggacactgtgtaccgagcactgcgcacggagcgtcgggaccaggctgtgatgatctctggggagagcggggcaggcaagaccgaggccaccaagaggctgctgcagttctatgcagagacctgcccagcccccgagcgcggaggtgccgtgcgggaccggctgctacagagcaacccggtgctggaggcctttggaaatgccaagaccctccggaacgataactccagcaggttcgggaagtacatggatgtgcagtttgacttcaagggtgcccccgtgggtggccacatcctcagttacctcctggaaaagtcacgagtggtgcaccagaatcatggggagcggaacttccacatcttctaccagctgctggaggggggtgaggaggagactcttcgcaggctgggcttggaacggaacccccagagctacctgtacctggtgaagggccagtgtgccaaagtctcctccatcaacgacaagagtgactggaaggtcgtcaggaaggctctgacagtcattgatttcaccgaggatgaagtggaggacctgctgagcatcgtggccagcgtccttcatttgggcaacatccactttgctgccaacgaggagagcaatgcccaggtcaccaccgagaaccagctcaagtatctgaccaggctcctcagcgtggaaggctcgacgctgcgagaagccctgacacacaggaagatcatcgccaagggggaggagctcctgagcccgctgaacctggagcaggccgcgtacgcacgagacgccctcgccaaggctgtgtacagccgcacttttacctggctcgtcgggaagatcaacaggtcgctggcctccaaggacgtggagagccccagctggcggagcaccacggttctcgggctcctggatatttatggctttgaagtgtttcagcataacagctttgagcagttctgcatcaattactgcaacgagaagctgcagcagctcttcatcgagctcacgctcaagtcggagcaggaggagtacgaggcagagggcatcgcgtgggagcccgtccagtatttcaacaacaaaatcatctgtgatctggtggaggagaagtttaagggcatcatctcgattttggatgaggagtgtctgcgccccggggaggccacagacctgaccttcctggagaagctggaggatactgtcaagcaccatccacacttcctgacgcacaagctggctgaccagcggaccaggaaatctctgggccgaggggaattccgccttctgcactatgcgggggaggtgacctacagcgtgaccgggtttctggacaaaaacaatgaccttctcttccggaaccttaaggagaccatgtgtagctcaaagaatcccattatgagccagtgctttgaccggagcgagctcagtgacaagaagcggccagagacggtcgccacccagttcaagatgagcctcctgcagctggtggagatcctgcagtctaaggagcccgcctacgtccgctgcatcaaacccaatgatgccaaacagcccggccgctttgacgaggtgctgatccgccaccaggtgaagtacctggggctgttggaaaacctgcgcgtgcgcagagccggctttgcctatcgccgcaaatacgaagctttcctgcaaaggtacaagtcactgtgcccagagacgtggcccacgtgggcaggacggccgcaggatggggtggctgtgctggtccgacacctgggctacaagccagaagagtacaagatgggcaggaccaagatcttcatccgcttccccaagaccctgtttgccacagaggatgccctggaggtccggcggcagagcctggccacaaagatccaagctgcctggaggggctttcactggcggcagaaattcctccgggtgaagagatcagccatctgcatccagtcgtggtggcgtggaacactgggccggaggaaggcagccaagaggaagtgggcggcacagaccatccggcggctcatccgaggcttcgtcctgcgccacgccccccgctgccccgagaacgccttcttcctggaccatgtgcgcacctcttttttgctaaacctgaggcggcagctgccccagaatgtcctggacacctcgtggcccacgcccccacctgccctgcgtgaggcctcagagcttctgcgggagttgtgcataaagaacatggtgtggaaatactgccggagtatcagccctgagtggaagcagcagctgcagcagaaggccgtggctagtgagatcttcaagggcaagaaggataattaccctcagagtgtacccaggctcttcatcagcactcggcttggtacagatgagatcagcccccgagtgctgcaggccttgggctctgagcccattcagtatgcggtgcctgttgtgaaatacgaccgcaagggctacaagcctcgctcccggcagctgctgctcacgcccaacgccgtcgtcatcgtggaggacgccaaagtcaagcagaggattgattacgccaacctgaccggaatctctgtcagcagcctgagcgacagtctttttgtgcttcatgtacagcgtgcggacaataagcaaaagggagatgtggtgctgcagagtgaccacgtgattgagacgctgaccaagacagccctcagtgccaaccgcgtgaacagcatcaacatcaaccagggcagcatcacgtttgcagggggccccggcagggatggcaccattgacttcacacccggctcggagctgctcatcaccaaggccaagaacgggcacctggctgtggtcgccccacggctgaattctcggtgataaaggcgcccactggaccctcccaacgcccaatgctttgcttttctcctcctccccttcccagttaccaaagactcgaacttccagacagggacccagggacaccccgaagcccacctgcaatctcccacctcctgcccatccctctcttgagggagcagcaggggccaggagctaccccaggagtgggccaggccgggccacagcaataggaaagccagggccagagcgagccatgccagccctactgccgatgccaaatatttgagagaagggaacttttgctgaggttttctctgaggtttttttgatg

SEQ ID NO: 37063 - DNA, 3192 bp, Artificial Sequence
  derived and/or modified sequence
atggccctgcaggtggagctggtgcccaccggcgagatcatccgggtggtgcacccccaccgaccctgcaaattggcgctaggcagcgatggcgtgagagttacaatggagagtgcattaacggcccgggatagagttggggtccaggatttcgtcctgctggagaatttcactagcgaagctgcatttatcgaaaacctgcgccgaaggtttagggaaaatttgatatacacatatatcggacctgtgctggtgagcgtcaatccctatcgggatctgcaaatatattctcgacagcatatggagcggtaccgtggtgtttctttttacgaggtccctccccacttgttcgccgtggccgacactgtgtatcgcgccttgagaactgaacggagagaccaggccgtgatgatttccggtgagagcggcgccggtaaaacggaggccacaaagagactcctccagttctacgctgagacctgccccgcaccagaacgaggtggcgcagtgcgcgaccgcctgctgcagagcaaccctgtcctagaagctttcggcaatgccaaaactctgcgtaacgacaactcctctagattcgggaagtatatggatgtacagttcgatttcaaaggcgcacctgttggaggacatattctgagttacctgttagagaagagcagggtggtgcaccagaaccacggggaaaggaatttccatatcttttatcaactcttagaagggggtgaggaggaaactctgcgccgcttgggactggagcgtaatcctcagtcctacctgtatctggtgaagggacagtgtgcaaaagtctcctccatcaatgacaaatccgattggaaagttgtgcgtaaagctctgactgtaattgactttaccgaggatgaggtagaggatctgctcagtatcgtcgctagcgtgctgcacctgggcaatatccactttgccgcaaacgaggagtcaaatgctcaggttactaccgagaatcaactgaagtacttgacccggcttctgtctgtagagggctccactctgcgggaggctctgacacatcggaagataatagcgaagggtgaagagttactaagtcctctcaatctcgagcaggccgcttacgctagagacgccctcgcaaaagccgtttattctcgcacatttacatggttggttgggaagataaaccggtcactggctagcaaggatgtggaaagcccctcttggcgcagcaccactgtccttggtctactagatatctacggctttgaggtattccagcacaattcttttgagcagttttgcatcaactattgtaacgaaaagttacagcagctgttcattgaattgactctaaagtctgagcaggaagagtatgaggccgaaggtatcgcctgggagccggtgcagtactttaataacaagattatttgcgatcttgtggaagaaaagtttaagggtatcatcagcattctcgatgaggagtgtttgcgtccaggcgaagcgacggacctcaccttcttggagaaactggaggacactgtgaagcatcacccccatttcctgacgcataaactggctgaccagcgcactcggaagtctctgggaaggggtgaatttcgtcttttgcattatgctggtgaggtcacttactccgtgactggcttcctggacaaaaacaatgatctattgttccgcaacttgaaagaaacaatgtgttccagtaagaacccgattatgtcacagtgtttcgaccggtctgagttaagtgacaagaaacgccccgaaactgttgcaacacaatttaaaatgtcccttctccagctagtggagatcctgcagagtaaagagcctgcctacgtgaggtgcattaagccaaacgatgctaagcaacctgggcgattcgatgaggtgctcattagacatcaggtcaagtatctggggctcctggaaaatctgagggtgaggcgggccggcttcgcttataggaggaagtatgaggcttttcttcagcgctacaagagcctatgtcccgagacttggcccacttgggccggtaggccgcaggacggggtggccgtgctcgtgcgacatttggggtacaaaccggaagagtataaaatgggaagaacgaagatctttatccggtttcccaaaaccctctttgccactgaagacgctctggaagtgcggagacagagccttgctacaaaaatccaagctgcctggcgcgggtttcactggaggcagaagttcctccgcgttaagcgttctgccatctgcatccaatcttggtggcggggcacgttaggacgcaggaaagctgccaaacgcaagtgggcggcccaaaccatccgacgcctgattaggggattcgtgttgcgccacgcacccaggtgtcccgagaacgccttctttttagatcacgtgcgcacatcattcctgctgaatctccgccggcagctcccgcaaaatgtgctcgataccagctggccaactcccccccccgcactgcgcgaagcatccgagctgttgagagagctctgcattaagaatatggtctggaagtattgtaggagcatctcgcccgaatggaagcagcaattgcaacagaaggctgtggccagcgagatcttcaaaggcaagaaggacaactatccgcagagtgtaccacgactgttcatttcaaccagactggggactgatgagatcagtcccagagtattacaggcactcgggtcggagcctatccaatatgctgttccagtggtgaagtacgatcgcaagggctacaagcctaggtcacggcagttactcctaacccccaacgcagtggtgatagtcgaggatgctaaggtgaagcagagaattgattatgctaatctgaccgggatttccgtgtcatctctcagcgactctctttttgtcctgcatgttcagagagctgacaataaacagaagggcgatgtcgttcttcaatccgaccacgtcattgaaacgctgaccaaaacagctctgagcgccaaccgcgtgaacagtatcaatatcaaccagggtagcatcaccttcgctggaggaccaggcagggatgggaccattgatttcacaccagggtccgagctgctgataaccaaggcgaagaatggacacctggcagtagttgcaccgaggctcaacagccgctag

SEQ ID NO: 37064 - DNA, 3087 bp, Artificial Sequence
  derived and/or modified sequence
atggagagcgccctgaccgcccgggaccgggtgggcgtgcaggacttcgtgttactggaaaattttacgtccgaagccgcattcatagagaatctgcggcggcgttttagagagaacctgatatacacctacattggtcctgttttggtttctgtgaacccgtaccgggatctgcaaatctacagccgtcagcatatggaacgctatcgcggagttagcttctatgaggtccccccccacttgtttgccgtcgcagacacagtgtaccgcgctttacgaacggaaagacgagatcaggctgtaatgatctctggggagagcggtgcaggcaagaccgaggcaacaaagcgtctgctacagttctatgctgaaacttgtccagctccagaacggggtggcgctgttagggatagacttctccagtctaatccggtgctggaagccttcggaaacgcaaaaactttgcgcaatgataacagctcccggtttggcaaatatatggacgtgcaatttgacttcaagggcgctccagtgggcgggcacattctaagctatctcttagagaagtcccgggtggtgcatcagaaccacggagaacgaaactttcacattttttatcagctgttggagggcggcgaagaggagactctgcggcgccttggactcgagcggaacccccagtcttatctctacctggtaaaggggcagtgtgccaaagtgtcttctattaacgacaaaagtgactggaaagtggtgcgtaaagcacttacagtcatcgatttcacggaggacgaggttgaagacctactgtctatcgtggccagcgtcttgcatttgggcaacatccactttgccgctaacgaagaatctaacgcacaagtgaccactgagaaccaactgaaatacctgacccggcttctgtcggtcgagggctctaccctgagggaggctttaacccacaggaagattatcgcaaaaggagaggagcttctgtctcccctcaatttagagcaggcagcatatgcccgggatgcactcgctaaggctgtctattctaggaccttcacatggctggtggggaaaatcaatcgttccttggctagcaaggatgttgaaagtccctcatggcgtagcaccacagtactcggcctgttagacatttatggctttgaagtgtttcagcataacagtttcgagcagttttgtatcaactactgcaacgaaaagcttcagcagctttttattgagctcaccctcaagtcggaacaggaggagtatgaagcagaggggattgcttgggaacccgtacagtattttaataacaaaatcatctgtgatcttgtcgaggaaaagtttaaagggatcatctctatattggacgaagagtgtttgcgtcccggtgaagcgacggaccttaccttcctagaaaagctggaggatacggttaaacaccatccccacttcctgactcacaagctcgccgatcagcggacccggaagagtttgggtagaggcgagtttcgcttgctccactacgccggcgaggttacatactctgtgaccggttttctggataagaacaacgatttactcttccggaatctgaaagagaccatgtgcagttctaagaatcctatcatgagccagtgtttcgaccggtcagaactgtcagacaaaaagaggcccgagaccgttgccactcagttcaagatgagcctactgcagctggtggaaatcctgcagagcaaagaaccggcctatgtccgctgtattaaaccaaacgatgctaaacagccaggcaggttcgatgaggttcttatccgacaccaggtgaagtacctgggactcctcgaaaatttgcgggtgagacgtgcaggttttgcttaccgaagaaagtacgaggcgtttttgcagaggtacaaatccttatgtcccgagacgtggcccacctgggccgggcggcctcaggacggagttgcagtgttggtacgccacctgggttataaacccgaagaatacaagatgggccggaccaaaattttcattcggtttccaaagactctgttcgccacagaggatgcgttggaggtcagacgccagtcattggctacgaagatccaggccgcctggaggggattccattggcggcagaagttcctacgcgtgaagcgctcagcaatatgcatccagagctggtggagagggactctgggccgtaggaaggccgctaagaggaagtgggctgcgcagaccatacgccgcctgatcaggggattcgtccttcgacatgccccccggtgccctgaaaatgctttttttttggatcacgtccggacaagttttctcttgaatcttagaagacagttaccccagaacgttttggatacatcctggccaacaccacctcccgctctccgcgaagcaagcgagctgttgagagagttatgtatcaaaaatatggtctggaagtattgccggtccattagcccggaatggaaacagcagttgcagcaaaaggcagtagccagtgaaatattcaaagggaaaaaagataattatccacaaagcgtgccacggctgtttatctctacacgcctgggcaccgatgaaatcagcccccgggtattacaggctttgggaagtgaacctatacagtatgccgtgccagtcgttaaatatgatcgaaagggatacaaacctcgatcacggcagctgcttctaacaccaaatgccgtggtgatagtggaagacgccaaggtcaaacagcgcattgactatgcaaatctgacagggatatccgtgtccagcttgagtgactccctgtttgtactccacgttcagagggcggacaacaaacagaagggggatgtggtcctgcagtcggaccacgttatagagaccctcactaagacagctctgagcgctaatagggtcaatagtatcaacatcaatcagggctctattacatttgccgggggaccagggagggacgggaccatcgatttcacacctggttctgagctgctaattacaaaggccaaaaatggacatctggctgttgtggccccacggctgaactcacggtag

SEQ ID NO: 37065 - DNA, 2418 bp, Artificial Sequence
  derived and/or modified sequence
atggagagcgccctgaccgcccgggaccgggtgggcgtgcaggactttgttcttcttgagaattttactagcgaagccgccttcatcgagaatttgagacgtcgctttcgggagaacctaatctacacttacatcggacccgttctggtctcagtcaatccctatcgagatctgcagatctatagtcgacagcacatggagcgatacaggggcgtcagcttttacgaagtcccaccccacctgttcgctgtggcggacaccgtctatcgcgcactaagaacagaacgaagggatcaggccgtgatgatttcgggggagagcggtgctggcaaaacagaagcaacaaagcgtctcctgcagttttatgccgagacgtgccctgcgccggagagaggcggggctgtacgggaccggctgttgcagagtaaccccgtgttggaggccttcggcaacgccaagacccttcgtaatgataattcatcaagatttggcaaatacatggacgtgcagtttgactttaaaggcgctcctgtcggaggccacatcttgtcgtatctgctggagaaatcgcgggtggtccatcagaaccacggagagcgcaattttcacattttttaccagctattggagggtggagaggaggagacactgcggaggctgggtctcgaaaggaacccccagagttatctgtacctcgtcaaaggccagtgcgctaaagtgtcttcgataaacgataaaagcgactggaaggttgtgcgaaaggccttgaccgtcattgatttcaccgaggacgaggtcgaggatctcctcagtattgtggcatccgtgttgcacttgggaaacatacattttgccgccaatgaagaatccaatgctcaggtcacaactgaaaaccagttgaaatatctcaccaggctgttatctgtggagggatctacattacgcgaggccctgacccatcgcaaaataatcgccaagggagaggaattactctcccctctgaacctggagcaggctgcttacgcccgcgacgccctggcaaaagccgtgtattcaaggacttttacctggctggtgggcaagatcaataggtctctggccagtaaagacgttgaatctccatcttggcgctctacaacagtcctcggcctgcttgacatctatggcttcgaggtctttcagcataacagctttgaacagttctgcataaactattgtaacgagaagctccagcaactgtttatcgagctgacactgaagagcgagcaagaagaatacgaggccgaaggaatcgcgtgggagcctgttcaatatttcaataataaaattatttgcgaccttgtggaagagaaattcaagggcatcatctccatcttggacgaagagtgcttgaggcctggcgaggcaacggatctgaccttccttgaaaagttggaggatactgtaaagcaccatccccacttccttacacacaagctagctgatcaacgtaccagaaaaagcctcggacggggagagtttcgcctgctgcactatgccggggaggttacctactctgtgacggggtttcttgacaaaaacaacgatctcctgtttaggaacctgaaggaaacaatgtgttcctcaaagaatccgatcatgagccagtgcttcgaccggtcagaacttagcgacaagaagcgaccagaaaccgtggcaactcagttcaagatgagccttctgcaattggtcgaaatcctgcagtccaaagagccggcctatgtgagatgtattaaacccaacgatgctaaacagcctggaaggttcgacgaagtcctgattcgccatcaggtgaagtatctcggtcttctcgaaaacctgcgagtgaggcgtgcgggtttcgcctacaggaggaagtacgaggcatttctacagagatacaaatcgctctgtcctgaaacatggcccacttgggcaggtagaccccaagatggcgtggccgtgctcgtcagacatctggggtataaaccagaggaatataagatgggaagaacgaaaattttcattagatttcccaagacgttatttgccaccgaagacgccttggaggtgcgcagacagtccttggctacgaagatccaggccgcgtggaggggatttcattggcgccagaaatttctgagggtgaaacgctccgccatctgtatccagtcatggtggagaggcacactgggcagaaggaaagccgccaaggaagtgggtgggacagaccatcccgcggcccaccctcggctccgccctgcccctcggccaccattgcccagggaacggttgctgcccgggccatgtgcccacctgttcttcgccaaacctgaggccgccgccgcacccgaatgccctgggcaccttgttgcccacgcccccacctgccctgcctag

SEQ ID NO: 37066 - DNA, 3120 bp, Artificial Sequence
  derived and/or modified sequence
atggccctgggcagcgacggcgtgcgggtgaccatggagagcgccctgacagcccgggacagagtgggagtccaggactttgtgctccttgagaattttacgtcagaggcagcctttatcgaaaacctgagaagaagattcagagaaaatcttatctacacctacataggccctgtcctcgtttccgtaaatccctaccgtgatttgcagatttatagcagacagcacatggagaggtatcgcggcgtctccttctatgaggtgccaccacatctgttcgctgtggctgacacagtgtaccgggctctgagaaccgagagacgggaccaagcagtgatgatatccggtgagagcggggccggaaagacagaggcaacaaaaaggcttctccagttctacgctgagacatgtcccgctcctgagcggggcggggccgtacgcgatcgactgctgcaatctaatcccgtgttggaggcatttggaaatgctaagactctgagaaatgataattcctcacgctttggcaaatacatggatgttcagttcgatttcaaaggcgctccggtgggcgggcacatactgagctacttgttggaaaagtcacgggtggtccatcagaaccatggggaacggaatttccacattttctatcagctgcttgagggaggggaggaggaaacactgcggcgtctagggctggagcggaatcctcaaagttacctgtatttagtaaagggccagtgcgctaaggtgagcagcatcaatgacaagagcgattggaaggtggtgcggaaagccttgacagttattgattttacagaggatgaggttgaagacctactttctatcgtcgcctcggttctgcacttgggaaacatacatttcgcggccaacgaggaatctaacgctcaggtgacgaccgagaatcaacttaaataccttaccaggctcctgtcagtggaagggtccactctgcgcgaagccctaactcatagaaaaattatcgccaaaggagaagaacttttatccccactgaacctagaacaggccgcgtatgctcgtgatgccctggctaaggccgtgtacagtcgcacttttacttggctcgtgggtaagataaatcggagtctggcctctaaggatgtggaatctcctagttggagaagcacaacagtgttgggcctgctggacatttacggcttcgaggtctttcagcacaactccttcgagcaattctgtatcaattattgtaatgaaaaactacaacagctttttattgagcttactcttaaaagtgagcaggaagaatacgaggcagagggaattgcctgggagccagtccagtatttcaacaacaagattatctgtgacctcgttgaagaaaagttcaaagggattatctctatcctcgatgaagagtgcctgagacccggcgaggccactgacctgaccttccttgagaagctggaggacacagtgaagcatcatccccacttccttactcacaagctcgctgatcagcgaactaggaaaagtctcgggagaggggaattccgactactgcactatgccggagaagtgacttattccgtcactggtttcctggataagaataacgacctacttttcaggaatttgaaggagactatgtgcagcagtaaaaacccaatcatgtcacagtgttttgatcggtccgagctgagtgataagaaacgccccgaaaccgtggcaacccagtttaagatgtccctactgcagctggtcgaaatcctgcagtcaaaagagcctgcctacgtccggtgcattaagcctaacgatgcaaagcagcccggccgcttcgatgaggtcctgattagacaccaggtcaagtacctgggcttgcttgagaacctcagggtgcggagggcagggttcgcatacaggaggaagtatgaggccttcctccagaggtataaaagtttgtgccccgagacgtggcccacatgggctggtaggcctcaggacggcgtagccgtgctcgtgagacacctcggatataaacccgaggaatataagatgggaagaacgaagatctttatcaggttccctaaaactctattcgctactgaggacgctctggaggtcagaagacagtctctggcaactaaaattcaggccgcttggcgggggttccactggcggcaaaagttcctcagagtcaaacgctccgcgatttgcatacaaagttggtggagaggcaccctgggaagacggaaagcagccaagagaaaatgggctgcacaaacaatccggcggctgattagaggcttcgtgctgagacatgcgcctcgatgtcccgagaacgcgtttttccttgatcacgtccgcacatcttttctcttaaacttaaggcgccagctaccccaaaacgtcttggacacttcctggccgactccgccgccagcattaagagaagcctccgagttgcttcgggaactctgcattaagaacatggtttggaagtactgccgctccatcagtccagaatggaaacaacagctgcagcagaaggctgttgcttcagagattttcaagggcaagaaagacaactatccacagtccgttccacggctgtttatatctacccggctaggcaccgatgaaatatctccccgagtgctgcaggctctgggaagcgagcccattcagtatgccgttcccgtggtgaagtacgataggaaggggtataaaccgcgctccaggcagctgctgcttactcccaacgcggtggtaatcgtggaagacgcaaaagttaaacagcgcatcgactatgccaacctgacaggcatcagcgtctcctccctgtctgattcactatttgtccttcacgttcagcgcgccgacaataaacagaagggagatgtggtgctgcaaagcgatcacgtgattgaaaccctgacaaagacagctttgagtgcaaacagggtcaactccataaacattaaccaagggtctatcacctttgccggaggcccggggcgtgacggaaccatcgactttacccccggaagcgaactcctgattaccaaagcaaagaatggccacctggccgttgttgctccacgcctgaattcccgttag

SEQ ID NO: 37067 - DNA, 3192 bp, Artificial Sequence
  derived and/or modified sequence
atggccctccaagtggaactggtgcccactggagaaataattagagtcgtgcatcctcacaggccgtgtaaactagccttgggcagcgacggcgttcgcgtgactatggaatcagcgctgaccgctcgcgatcgcgtgggggtgcaggattttgtgctgctggaaaattttacttccgaggcggcttttatagaaaatcttcggcgacgattccgcgaaaatctgatctatacctatattgggccagtgctggtaagcgttaatccataccgggatttgcagatttatagccggcagcatatggagaggtaccggggagtgtcattttatgaagtgcccccacaccttttcgccgtagcagatacagtctacagggcattaagaactgagcgacgggatcaagctgttatgatctctggtgaaagcggcgctggaaagactgaagcgactaagcggcttctgcagttctacgccgagacctgccctgccccagagcgaggaggcgcagtgcgtgatcgcctcctccagtcaaatcccgtgcttgaggcattcgggaatgcgaagactttacgcaacgataactccagtaggttcggcaaatatatggatgtgcagttcgattttaagggagcacctgtaggtggacatattctgtcctacttactcgagaagtccagagttgtccatcagaatcatggggaaaggaattttcacattttctaccagctgcttgagggcggtgaggaggagaccctgcgaaggcttggccttgagcgcaacccccaaagttacctgtatttagttaaggggcaatgcgcaaaggtatcctcaattaatgacaaaagtgattggaaggtggtccgtaaagccctgacggtcatcgactttaccgaggacgaagtggaggatttattgtcgatcgtcgcctcagtgctgcatctgggcaacattcacttcgccgcaaacgaggagagcaatgctcaagtgacgacagagaatcagctgaagtatttgacgcgccttctgtccgtcgaagggtccactctaagggaggctttaactcacagaaagattatcgctaaaggcgaggaactgctgagccctcttaatctcgagcaggccgcttatgccagagatgccctcgccaaggccgtttacagtagaactttcacatggttagtgggtaaaattaatcgttctctcgccagcaaggatgtcgaatccccttcatggagaagtaccactgtgttaggacttctcgatatttatggctttgaagtgttccagcataactcattcgagcagttctgcatcaattactgtaacgagaagcttcagcagttgttcatcgaactcacgctgaaaagtgaacaggaagaatacgaggccgaagggatcgcctgggaacccgtccagtactttaataacaaaatcatttgtgacctggtggaggagaaatttaagggaatcatctctatactggacgaggaatgcctgaggccaggtgaggccacggatctgacttttctcgagaaattggaggacacggttaaacaccacccccacttccttacacacaagttggccgaccagcgcacccggaagagcctcgggaggggcgaattccggctgctgcactacgcaggcgaagttacttatagcgtgaccgggttcctcgacaaaaacaacgaccttcttttcagaaatctgaaagaaactatgtgttccagtaaaaatccaatcatgtcccaatgttttgatagaagtgaactctctgacaagaaacggcctgaaacagtcgccacacagttcaagatgagcttattacaactggtggagatcctccagtccaaagaaccagcctacgtgcgatgcatcaagcccaacgatgccaagcagcccggtcggttcgatgaggtcttgattcgccaccaggttaaatatttaggactgttggaaaatctgcgcgtgcgcagggccggtttcgcgtatagaaggaaatacgaggctttcctacagcggtataaatccttgtgtcctgagacgtggcctacttgggccggacggcctcaagacggcgttgccgttctggttcgccacctcgggtacaaaccagaggagtataagatggggaggacaaaaattttcattcgatttcccaagactctgtttgctacagaggacgcattagaggttcgccgacagagcctcgccacaaaaatacaggccgcttggcgcggtttccactggagacagaagttcctgcgagtcaagagaagcgccatatgtattcaatcttggtggcggggaacattaggccgacgcaaagctgccaaaagaaaatgggccgctcaaaccattagaaggctgatccggggatttgttcttaggcatgcgcctaggtgcccagagaacgctttctttcttgatcatgtacgaacttctttcttgctcaatctaaggcgccagctgccccaaaacgtgttagacacaagctggccgaccccacctccagccctcagggaggcctccgagctgttgagagaattatgtataaaaaacatggtgtggaaatattgtcgatcaattagtcccgagtggaaacagcagctacaacagaaggcagtggcatccgaaatctttaagggcaagaaggataattatcctcagtctgtcccacgcctgtttatctcgacccggcttggcacggacgaaatatcccccagggtcttgcaagctttaggatcagagcctatccaatacgccgtacctgtcgtgaaatacgaccgcaagggctacaaacccaggtccaggcagttacttttgacaccaaatgctgtggtgattgtggaggacgcaaaagtgaagcaacgcatcgattacgccaatcttacagggattagtgtgtcgagcttaagtgatagtctctttgtgcttcatgtccaacgggcagataacaagcagaaaggagacgtggtgctccagagtgatcatgtgatcgagacattaactaaaaccgccctgtcggcaaatagagtgaactccatcaatataaaccaaggaagcataacattcgcaggcggtccaggacgtgatggcactatcgatttcacacccggatctgaattgctgattaccaaggcaaagaacggccatctcgccgtggtggcaccacgcttgaacagccggtag

SEQ ID NO: 37068 - DNA, 3087 bp, Artificial Sequence
  derived and/or modified sequence
atggagagcgcacttacagcgagagaccgggtgggagtgcaggatttcgtacttttggagaacttcacatcagaagccgctttcattgagaacctgagaaggcggtttagggagaatcttatctatacttacatcgggcctgttctggtctcagtgaacccttaccgggacctgcagatatatagtcggcagcatatggagcggtacaggggcgtgagtttttatgaggtgcctccacacctgtttgctgtggcagacacagtttatagagccctgaggacagaaaggcgcgatcaggccgtgatgatcagcggggagagtggcgcaggaaagaccgaggcaactaagcgtcttctccagttttatgctgagacctgtccagctcccgagcgaggtggtgccgtgcgcgatagacttctgcaatccaatcccgtcctggaggctttcgggaacgccaaaaccctaaggaacgataatagctctcggtttggaaagtacatggacgtgcagtttgattttaaaggcgcaccggtgggcggacatatcctctcctacttgttggaaaagtcccgcgtagttcatcaaaaccacggagagcggaacttccacatcttctatcagctgctggagggtggcgaagaggaaactcttcgcagactcggcctggagaggaacccacagagctatctatacctggttaagggccagtgcgccaaagtcagctctattaatgacaaatccgattggaaggttgtgcgcaaggcactgacagttattgactttactgaagatgaggtggaggacttactctctatcgtcgctagtgtgctgcatcttggcaatatacactttgcagccaatgaagaatctaacgcacaggtgactacagagaaccagcttaagtatctgacacgtctcttaagcgtggaaggtagcaccctgagggaggctctgacccatcgcaagatcattgccaaaggagaagagctgctgtcacccctaaacctggagcaagccgcttatgccagagacgcgctggcaaaagccgtgtactccaggactttcacatggctggttggcaagatcaaccggtctctggcctctaaagatgtggaaagtccctcttggaggagtacaactgtactcggcctacttgacatttatgggtttgaagtgttccaacataacagcttcgaacagttctgcatcaactactgcaatgagaagctgcagcagcttttcattgagcttaccctgaagagcgagcaggaggagtacgaggccgaaggcattgcatgggagcctgtgcagtattttaacaacaagattatttgcgatttagtggaagaaaagttcaaggggattatttcaatcctggacgaggaatgcttgcgtcccggagaagccactgatcttacttttctggagaagcttgaggataccgtgaagcaccacccacacttcctgacacacaaactggcagatcagcgcactaggaagagcttaggtcgcggtgagtttaggctgctgcactacgccggtgaggtgacctactccgtcacgggttttctggacaagaacaatgacctgctctttcggaacctaaaggagacaatgtgttcatccaaaaacccaataatgagtcagtgttttgatcgctcggagctctctgataaaaagcgacctgaaaccgttgctacgcaatttaaaatgtcattgctgcagctggtggagatcctccaatcaaaggagcctgcatacgtgaggtgcattaaaccaaatgacgctaagcagcctgggcgttttgacgaggtgcttattaggcaccaagtcaaatacctgggactattggagaacctgcgtgtacggagagcgggttttgcgtaccgcaggaagtacgaagcatttctgcagcggtataagagtctgtgccccgagacatggcccacttgggcaggaagacctcaggatggtgtagcggtactggttcgccatctaggctataagcctgaagagtataaaatgggacgaacaaaaatctttatacgctttcccaaaacattatttgctacagaggatgctctggaagtacggaggcaatcactggctacaaaaatccaggcggcatggcggggattccattggcgccagaagttcctgagagttaagagatctgccatatgcatacagagctggtggagggggaccctcggtagaagaaaggctgccaagagaaagtgggccgcacaaacgatccgtcggctcatccggggatttgttcttaggcatgcaccaagatgccctgaaaacgcctttttcctggatcacgtgcgtacctcctttttgctgaatttgcgccgacagttgccccaaaatgttctcgatacctcatggccgaccccacctcctgccctgagagaggcttcagagctgcttcgggaactgtgcattaaaaatatggtgtggaaatattgcaggtctatcagtcctgagtggaagcagcagctacagcagaaagctgtcgcctcagaaatcttcaaaggaaagaaagacaattatccacagtcagtgccgagactgtttatttcaacaaggctgggcacagatgagattagtcccagggtccttcaagcactgggttcagaacctatacagtacgctgtccccgtcgtcaaatacgacaggaaggggtataaacccagatccaggcaacttctcctcaccccaaatgccgtagtaatagtcgaggacgccaaagttaagcagagaatcgattatgccaacctgaccggcatatcagtctcctcgctctctgattccctattcgtcttacatgtccagagagccgacaacaaacagaagggggacgtcgtgctgcagagcgatcatgtgatagagaccctgaccaagactgccctttcagccaacagggtcaactcgattaacattaatcaggggtctattacgtttgccggagggccaggacgggacggaactatagacttcactccgggttccgagctgctcattacaaaagccaagaacggacacctcgctgtggtggcgcctagacttaattcccgctag

SEQ ID NO: 37069 - DNA, 2418 bp, Artificial Sequence
  derived and/or modified sequence
atggaatccgctctgacagccagggatagggtaggggtgcaggacttcgtattgttagaaaactttacatctgaagcagccttcattgaaaatctccggaggaggtttcgcgaaaacctcatctacacatacataggccctgtcctcgtgagcgtgaatccctacagggatcttcagatctactccaggcagcacatggaaagataccggggtgtgagcttctacgaggtccctccccatctttttgccgtggctgatacagtttatcgcgctcttcggaccgagagaagagatcaagcagtcatgatatctggagaatcaggggctggtaagacagaagccactaagcgcctgctgcaattttacgccgagacctgccctgcacctgagagaggcggagcagtcagagatagactcttgcagtccaaccctgtgctggaagcctttggaaatgccaagacactcaggaacgataactccagcagatttggcaaatacatggatgtccagtttgatttcaagggggctcccgttggcggacatattctctcgtatctgctggagaaatcaagggttgttcatcagaaccacggggaaaggaacttccatatattttaccagcttctggaaggaggagaagaagagacgctgagaaggcttggattagagcgtaacccacagtcttatttatatctcgtgaaggggcagtgcgcaaaggtttcatccattaacgataagagcgactggaaggtcgtgcgtaaagccctaacagtcattgactttaccgaagatgaggttgaagacctgttgtcaatcgttgcctctgtgctgcacctcgggaacatccattttgcggctaatgaagagtccaacgcccaggttacaacagaaaaccagctaaagtacttgaccaggctgctgtcggtcgaaggttctaccttgagggaggctctgacccaccggaagatcatcgccaaaggcgaagaactgctttcacccctgaacctggagcaggctgcctacgccagggacgccctcgctaaggctgtttatagcagaaccttcacttggctcgtgggcaagataaatagaagcctggcatcaaaagatgtagaatctccatcttggcgttccaccacagtgctggggttactggatatttacggctttgaggtgtttcaacataattctttcgaacagttttgtatcaactattgtaacgaaaagcttcaacagctgttcattgaacttactcttaagtcagagcaggaggaatacgaggcggaggggattgcctgggaacctgtgcagtatttcaataataaaatcatctgtgacctggtcgaggagaagtttaagggcattatcagtatcctggacgaggaatgcttgcggcctggtgaggccacagatttaacattcttggaaaagcttgaagataccgtgaaacaccacccccactttttgactcacaagctcgctgaccagagaacccgcaaatctctgggacgcggagagtttcgcttgctgcactatgccggagaggtcacctattcagtcactggttttttggacaagaacaacgacctactgttccgtaatctgaaggaaaccatgtgctccagcaagaacccaatcatgagccagtgcttcgaccgcagcgaactgtctgacaagaagaggcctgagacggtagctactcagttcaaaatgtctctgctgcaactggtggagattctacagtctaaggagcccgcatatgtgcgctgcatcaagcctaatgatgccaagcagcctggcagattcgacgaggtactcattcggcaccaggtgaaatacttgggactgctggagaaccttcgcgtcaggagggccggatttgcataccgtaggaaatacgaggcatttcttcaaagatataaatcactgtgccctgagacatggcccacctgggccggtaggcctcaggatggcgtggccgtactggtgcgacatctgggatacaaaccagaggaatataagatggggagaaccaaaatatttattagattcccaaaaacccttttcgcaactgaggatgctctggaggtacgccgacaaagtttagctactaagattcaggccgcttggcgcggtttccactggaggcaaaaattcctacgggtgaaacggtctgccatctgcatccagtcgtggtggagaggtacactgggacggagaaaagcagcaaaggaggtcggaggtacggatcaccccgcagcccatccaagattgcggccagcgcctcgaccccctctgcctcgggagcgattactgcccggaccctgcgctcacctctttttcgctaaacccgaggccgcagccgctcctgagtgtcccggtcaccttgttgcgcatgcgcctacttgccccgcatag

SEQ ID NO: 37070 - DNA, 3120 bp, Artificial Sequence
  derived and/or modified sequence
atggccctaggctccgacggggtaagggtgacaatggaaagcgccctcacagcgcgagacagggttggggttcaggattttgtcctgctggagaacttcacttctgaggccgcattcattgaaaatctgcggaggcgatttcgcgagaacttgatctacacctacatcggcccagtgctcgtgtctgtcaacccctatcgggatcttcagatctatagccggcagcatatggaacggtaccggggtgtctcattctacgaggttcctccgcacctttttgcagttgctgacaccgtataccgggcactgaggactgaaagaagggaccaggccgtaatgatctcaggagagtccggagccggtaaaaccgaggccacgaaacggttactgcagttctacgcagagacctgtcccgcacctgagaggggaggtgccgttcgggacagattgctgcaaagtaacccagtcctggaggcttttggcaatgccaagaccctgagaaacgacaacagctcacggtttggaaagtatatggatgtgcaattcgactttaaaggggctccggtgggcggacacatcttaagctaccttctcgagaaatcccgggtcgtgcatcagaaccatggagagaggaactttcatatcttttaccagctgctagaaggaggcgaggaggagaccttaaggcgcctgggcctagagcggaacccccaatcatatttgtatcttgtgaagggccagtgtgccaaagtgtcgtccataaacgataaatcagactggaaggtcgttcggaaagcactgaccgtgatagacttcaccgaggacgaggtagaagatttgctctccatcgtcgcatccgtgctgcatctggggaacatccactttgctgcaaatgaggagtcaaatgcacaagtgacaacagagaaccagcttaaatacctgacccggctccttagcgttgagggatctacgctccgcgaagcactgacacaccgaaagatcattgcgaagggggaggagctgctgtctccattgaaccttgagcaggctgcctacgctcgcgatgctctggcaaaggctgtgtactctagaacctttacctggttggtgggaaagattaaccgaagtcttgcatctaaagacgtagaaagtcctagttggcgctcaacaacggtgctgggactgctggatatttatgggttcgaggtgtttcagcataactcattcgagcagttctgcattaactattgcaatgaaaagctccagcagttgttcatcgaactgacgttgaagagtgagcaggaggaatatgaggcagagggcattgcctgggaacctgtgcagtacttcaacaataaaatcatctgcgaccttgttgaggaaaagtttaagggcatcatcagcatcctggacgaagagtgtctcaggccaggagaggccaccgatctgacatttttggagaaactagaggatactgtgaagcaccaccctcattttttgacacacaagctggcagaccaacggacaagaaaaagcctcggtcggggagaattccggctgctgcattacgctggagaggttacttatagcgtaacgggattcctcgacaaaaacaacgatctactgtttagaaacctgaaagagaccatgtgctcatccaagaacccgatcatgtctcagtgctttgaccgttcggaactgagcgataagaaaaggcccgagaccgtcgctactcagtttaagatgagtctgctgcagcttgtagagatactgcagagcaaggaaccggcttatgtgaggtgtataaagcctaacgacgccaaacaaccaggtcggttcgatgaggtactgattcgccatcaggtcaaataccttggattactcgagaacctgcgggtgagaagggctggctttgcatacaggaggaaatacgaagccttcctgcagcgctataagtctctatgccctgagacctggcccacttgggcaggcaggccacaagacggagtggcagtgctggtgagacacttaggttacaaacccgaggagtataaaatgggacggacgaagatcttcatcagatttcctaaaactttgtttgctactgaggacgcactggaagtgcgaaggcagtcattagccactaaaattcaggcggcatggagggggttccactggagacagaaattcctccgtgtgaagcggtctgcaatttgtatccagtcctggtggcgcggaaccctgggtaggcgaaaggccgcaaaaagaaagtgggcggctcaaaccatcagacgtttaattcggggattcgtccttcggcacgcccctcggtgccccgagaacgcctttttcttagatcatgtcagaacctccttcctgctgaatttgcgtcgccaattaccgcaaaacgttttggacacctcttggcccacaccccctccagccctgagggaagctagtgagctacttcgcgagctgtgcatcaagaacatggtgtggaagtactgcagaagcatttctcctgaatggaaacagcagctccagcagaaggcggttgcttcagaaatctttaaaggtaagaaggataattatccccagagcgtccctcggttatttatcagcaccagacttgggactgacgagataagtcccagggtgctgcaggcacttggtagcgagcccatccagtatgcggttccagtcgtgaaatacgataggaagggttataagccgcgttctcgacaactcctactgactcctaacgctgtggtgatcgtggaagacgctaaggtgaagcaacgcatagactacgctaacttgactggaattagcgtgtccagtctgtcagactctctgtttgtgttgcacgtgcagcgcgctgataacaaacagaaaggcgacgtggttttacaatctgatcatgtcattgagacattgacaaagacagcactctccgctaatcgagtcaacagcattaacattaatcaaggatctatcacgtttgctggcggacccggaagagacgggaccatcgatttcacgccaggcagcgagcttttgatcaccaaagctaagaacgggcacctggccgtcgtggcccctcggctcaactcccgctag

SEQ ID NO: 37071 - DNA, 3192 bp, Artificial Sequence
  derived and/or modified sequence
atggccctgcaggtggagctggtgcccaccggcgagatcatcagagtggtgcacccccacagaccctgcaagctggccctgggcagcgacggcgtgagagtgaccatggagagcgccctgaccgccagagacagagtgggcgtgcaggacttcgtgctgctggagaacttcaccagcgaggccgccttcatcgagaacctgagaagaagattcagagagaacctgatctacacctacatcggccccgtgctggtgagcgtgaacccctacagagacctgcagatctacagcagacagcacatggagagatacagaggcgtgagcttctacgaggtgcccccccacctgttcgccgtggccgacaccgtgtacagagccctgagaaccgagagaagagaccaggccgtgatgatcagcggcgagagcggcgccggcaagaccgaggccaccaagagactgctgcagttctacgccgagacctgccccgcccccgagagaggcggcgccgtgagagacagactgctgcagagcaaccccgtgctggaggccttcggcaacgccaagaccctgagaaacgacaacagcagcagattcggcaagtacatggacgtgcagttcgacttcaagggcgcccccgtgggcggccacatcctgagctacctgctggagaagagcagagtggtgcaccagaaccacggcgagagaaacttccacatcttctaccagctgctggagggcggcgaggaggagaccctgagaagactgggcctggagagaaacccccagagctacctgtacctggtgaagggccagtgcgccaaggtgagcagcatcaacgacaagagcgactggaaggtggtgagaaaggccctgaccgtgatcgacttcaccgaggacgaggtggaggacctgctgagcatcgtggccagcgtgctgcacctgggcaacatccacttcgccgccaacgaggagagcaacgcccaggtgaccaccgagaaccagctgaagtacctgaccagactgctgagcgtggagggcagcaccctgagagaggccctgacccacagaaagatcatcgccaagggcgaggagctgctgagccccctgaacctggagcaggccgcctacgccagagacgccctggccaaggccgtgtacagcagaaccttcacctggctggtgggcaagatcaacagaagcctggccagcaaggacgtggagagccccagctggagaagcaccaccgtgctgggcctgctggacatctacggcttcgaggtgttccagcacaacagcttcgagcagttctgcatcaactactgcaacgagaagctgcagcagctgttcatcgagctgaccctgaagagcgagcaggaggagtacgaggccgagggcatcgcctgggagcccgtgcagtacttcaacaacaagatcatctgcgacctggtggaggagaagttcaagggcatcatcagcatcctggacgaggagtgcctgagacccggcgaggccaccgacctgaccttcctggagaagctggaggacaccgtgaagcaccacccccacttcctgacccacaagctggccgaccagagaaccagaaagagcctgggcagaggcgagttcagactgctgcactacgccggcgaggtgacctacagcgtgaccggcttcctggacaagaacaacgacctgctgttcagaaacctgaaggagaccatgtgcagcagcaagaaccccatcatgagccagtgcttcgacagaagcgagctgagcgacaagaagagacccgagaccgtggccacccagttcaagatgagcctgctgcagctggtggagatcctgcagagcaaggagcccgcctacgtgagatgcatcaagcccaacgacgccaagcagcccggcagattcgacgaggtgctgatcagacaccaggtgaagtacctgggcctgctggagaacctgagagtgagaagagccggcttcgcctacagaagaaagtacgaggccttcctgcagagatacaagagcctgtgccccgagacctggcccacctgggccggcagaccccaggacggcgtggccgtgctggtgagacacctgggctacaagcccgaggagtacaagatgggcagaaccaagatcttcatcagattccccaagaccctgttcgccaccgaggacgccctggaggtgagaagacagagcctggccaccaagatccaggccgcctggagaggcttccactggagacagaagttcctgagagtgaagagaagcgccatctgcatccagagctggtggagaggcaccctgggcagaagaaaggccgccaagagaaagtgggccgcccagaccatcagaagactgatcagaggcttcgtgctgagacacgcccccagatgccccgagaacgccttcttcctggaccacgtgagaaccagcttcctgctgaacctgagaagacagctgccccagaacgtgctggacaccagctggcccacccccccccccgccctgagagaggccagcgagctgctgagagagctgtgcatcaagaacatggtgtggaagtactgcagaagcatcagccccgagtggaagcagcagctgcagcagaaggccgtggccagcgagatcttcaagggcaagaaggacaactacccccagagcgtgcccagactgttcatcagcaccagactgggcaccgacgagatcagccccagagtgctgcaggccctgggcagcgagcccatccagtacgccgtgcccgtggtgaagtacgacagaaagggctacaagcccagaagcagacagctgctgctgacccccaacgccgtggtgatcgtggaggacgccaaggtgaagcagagaatcgactacgccaacctgaccggcatcagcgtgagcagcctgagcgacagcctgttcgtgctgcacgtgcagagagccgacaacaagcagaagggcgacgtggtgctgcagagcgaccacgtgatcgagaccctgaccaagaccgccctgagcgccaacagagtgaacagcatcaacatcaaccagggcagcatcaccttcgccggcggccccggcagagacggcaccatcgacttcacccccggcagcgagctgctgatcaccaaggccaagaacggccacctggccgtggtggcccccagactgaacagcagatag

SEQ ID NO: 37072 - DNA, 3087 bp, Artificial Sequence
  derived and/or modified sequence
atggagagcgccctgaccgccagagacagagtgggcgtgcaggacttcgtgctgctggagaacttcaccagcgaggccgccttcatcgagaacctgagaagaagattcagagagaacctgatctacacctacatcggccccgtgctggtgagcgtgaacccctacagagacctgcagatctacagcagacagcacatggagagatacagaggcgtgagcttctacgaggtgcccccccacctgttcgccgtggccgacaccgtgtacagagccctgagaaccgagagaagagaccaggccgtgatgatcagcggcgagagcggcgccggcaagaccgaggccaccaagagactgctgcagttctacgccgagacctgccccgcccccgagagaggcggcgccgtgagagacagactgctgcagagcaaccccgtgctggaggccttcggcaacgccaagaccctgagaaacgacaacagcagcagattcggcaagtacatggacgtgcagttcgacttcaagggcgcccccgtgggcggccacatcctgagctacctgctggagaagagcagagtggtgcaccagaaccacggcgagagaaacttccacatcttctaccagctgctggagggcggcgaggaggagaccctgagaagactgggcctggagagaaacccccagagctacctgtacctggtgaagggccagtgcgccaaggtgagcagcatcaacgacaagagcgactggaaggtggtgagaaaggccctgaccgtgatcgacttcaccgaggacgaggtggaggacctgctgagcatcgtggccagcgtgctgcacctgggcaacatccacttcgccgccaacgaggagagcaacgcccaggtgaccaccgagaaccagctgaagtacctgaccagactgctgagcgtggagggcagcaccctgagagaggccctgacccacagaaagatcatcgccaagggcgaggagctgctgagccccctgaacctggagcaggccgcctacgccagagacgccctggccaaggccgtgtacagcagaaccttcacctggctggtgggcaagatcaacagaagcctggccagcaaggacgtggagagccccagctggagaagcaccaccgtgctgggcctgctggacatctacggcttcgaggtgttccagcacaacagcttcgagcagttctgcatcaactactgcaacgagaagctgcagcagctgttcatcgagctgaccctgaagagcgagcaggaggagtacgaggccgagggcatcgcctgggagcccgtgcagtacttcaacaacaagatcatctgcgacctggtggaggagaagttcaagggcatcatcagcatcctggacgaggagtgcctgagacccggcgaggccaccgacctgaccttcctggagaagctggaggacaccgtgaagcaccacccccacttcctgacccacaagctggccgaccagagaaccagaaagagcctgggcagaggcgagttcagactgctgcactacgccggcgaggtgacctacagcgtgaccggcttcctggacaagaacaacgacctgctgttcagaaacctgaaggagaccatgtgcagcagcaagaaccccatcatgagccagtgcttcgacagaagcgagctgagcgacaagaagagacccgagaccgtggccacccagttcaagatgagcctgctgcagctggtggagatcctgcagagcaaggagcccgcctacgtgagatgcatcaagcccaacgacgccaagcagcccggcagattcgacgaggtgctgatcagacaccaggtgaagtacctgggcctgctggagaacctgagagtgagaagagccggcttcgcctacagaagaaagtacgaggccttcctgcagagatacaagagcctgtgccccgagacctggcccacctgggccggcagaccccaggacggcgtggccgtgctggtgagacacctgggctacaagcccgaggagtacaagatgggcagaaccaagatcttcatcagattccccaagaccctgttcgccaccgaggacgccctggaggtgagaagacagagcctggccaccaagatccaggccgcctggagaggcttccactggagacagaagttcctgagagtgaagagaagcgccatctgcatccagagctggtggagaggcaccctgggcagaagaaaggccgccaagagaaagtgggccgcccagaccatcagaagactgatcagaggcttcgtgctgagacacgcccccagatgccccgagaacgccttcttcctggaccacgtgagaaccagcttcctgctgaacctgagaagacagctgccccagaacgtgctggacaccagctggcccacccccccccccgccctgagagaggccagcgagctgctgagagagctgtgcatcaagaacatggtgtggaagtactgcagaagcatcagccccgagtggaagcagcagctgcagcagaaggccgtggccagcgagatcttcaagggcaagaaggacaactacccccagagcgtgcccagactgttcatcagcaccagactgggcaccgacgagatcagccccagagtgctgcaggccctgggcagcgagcccatccagtacgccgtgcccgtggtgaagtacgacagaaagggctacaagcccagaagcagacagctgctgctgacccccaacgccgtggtgatcgtggaggacgccaaggtgaagcagagaatcgactacgccaacctgaccggcatcagcgtgagcagcctgagcgacagcctgttcgtgctgcacgtgcagagagccgacaacaagcagaagggcgacgtggtgctgcagagcgaccacgtgatcgagaccctgaccaagaccgccctgagcgccaacagagtgaacagcatcaacatcaaccagggcagcatcaccttcgccggcggccccggcagagacggcaccatcgacttcacccccggcagcgagctgctgatcaccaaggccaagaacggccacctggccgtggtggcccccagactgaacagcagatag

SEQ ID NO: 37073 - DNA, 2418 bp, Artificial Sequence
  derived and/or modified sequence
atggagagcgccctgaccgccagagacagagtgggcgtgcaggacttcgtgctgctggagaacttcaccagcgaggccgccttcatcgagaacctgagaagaagattcagagagaacctgatctacacctacatcggccccgtgctggtgagcgtgaacccctacagagacctgcagatctacagcagacagcacatggagagatacagaggcgtgagcttctacgaggtgcccccccacctgttcgccgtggccgacaccgtgtacagagccctgagaaccgagagaagagaccaggccgtgatgatcagcggcgagagcggcgccggcaagaccgaggccaccaagagactgctgcagttctacgccgagacctgccccgcccccgagagaggcggcgccgtgagagacagactgctgcagagcaaccccgtgctggaggccttcggcaacgccaagaccctgagaaacgacaacagcagcagattcggcaagtacatggacgtgcagttcgacttcaagggcgcccccgtgggcggccacatcctgagctacctgctggagaagagcagagtggtgcaccagaaccacggcgagagaaacttccacatcttctaccagctgctggagggcggcgaggaggagaccctgagaagactgggcctggagagaaacccccagagctacctgtacctggtgaagggccagtgcgccaaggtgagcagcatcaacgacaagagcgactggaaggtggtgagaaaggccctgaccgtgatcgacttcaccgaggacgaggtggaggacctgctgagcatcgtggccagcgtgctgcacctgggcaacatccacttcgccgccaacgaggagagcaacgcccaggtgaccaccgagaaccagctgaagtacctgaccagactgctgagcgtggagggcagcaccctgagagaggccctgacccacagaaagatcatcgccaagggcgaggagctgctgagccccctgaacctggagcaggccgcctacgccagagacgccctggccaaggccgtgtacagcagaaccttcacctggctggtgggcaagatcaacagaagcctggccagcaaggacgtggagagccccagctggagaagcaccaccgtgctgggcctgctggacatctacggcttcgaggtgttccagcacaacagcttcgagcagttctgcatcaactactgcaacgagaagctgcagcagctgttcatcgagctgaccctgaagagcgagcaggaggagtacgaggccgagggcatcgcctgggagcccgtgcagtacttcaacaacaagatcatctgcgacctggtggaggagaagttcaagggcatcatcagcatcctggacgaggagtgcctgagacccggcgaggccaccgacctgaccttcctggagaagctggaggacaccgtgaagcaccacccccacttcctgacccacaagctggccgaccagagaaccagaaagagcctgggcagaggcgagttcagactgctgcactacgccggcgaggtgacctacagcgtgaccggcttcctggacaagaacaacgacctgctgttcagaaacctgaaggagaccatgtgcagcagcaagaaccccatcatgagccagtgcttcgacagaagcgagctgagcgacaagaagagacccgagaccgtggccacccagttcaagatgagcctgctgcagctggtggagatcctgcagagcaaggagcccgcctacgtgagatgcatcaagcccaacgacgccaagcagcccggcagattcgacgaggtgctgatcagacaccaggtgaagtacctgggcctgctggagaacctgagagtgagaagagccggcttcgcctacagaagaaagtacgaggccttcctgcagagatacaagagcctgtgccccgagacctggcccacctgggccggcagaccccaggacggcgtggccgtgctggtgagacacctgggctacaagcccgaggagtacaagatgggcagaaccaagatcttcatcagattccccaagaccctgttcgccaccgaggacgccctggaggtgagaagacagagcctggccaccaagatccaggccgcctggagaggcttccactggagacagaagttcctgagagtgaagagaagcgccatctgcatccagagctggtggagaggcaccctgggcagaagaaaggccgccaaggaggtgggcggcaccgaccaccccgccgcccaccccagactgagacccgcccccagaccccccctgcccagagagagactgctgcccggcccctgcgcccacctgttcttcgccaagcccgaggccgccgccgcccccgagtgccccggccacctggtggcccacgcccccacctgccccgcctag

SEQ ID NO: 37074 - DNA, 3120 bp, Artificial Sequence
  derived and/or modified sequence
atggccctgggcagcgacggcgtgagagtgaccatggagagcgccctgaccgccagagacagagtgggcgtgcaggacttcgtgctgctggagaacttcaccagcgaggccgccttcatcgagaacctgagaagaagattcagagagaacctgatctacacctacatcggccccgtgctggtgagcgtgaacccctacagagacctgcagatctacagcagacagcacatggagagatacagaggcgtgagcttctacgaggtgcccccccacctgttcgccgtggccgacaccgtgtacagagccctgagaaccgagagaagagaccaggccgtgatgatcagcggcgagagcggcgccggcaagaccgaggccaccaagagactgctgcagttctacgccgagacctgccccgcccccgagagaggcggcgccgtgagagacagactgctgcagagcaaccccgtgctggaggccttcggcaacgccaagaccctgagaaacgacaacagcagcagattcggcaagtacatggacgtgcagttcgacttcaagggcgcccccgtgggcggccacatcctgagctacctgctggagaagagcagagtggtgcaccagaaccacggcgagagaaacttccacatcttctaccagctgctggagggcggcgaggaggagaccctgagaagactgggcctggagagaaacccccagagctacctgtacctggtgaagggccagtgcgccaaggtgagcagcatcaacgacaagagcgactggaaggtggtgagaaaggccctgaccgtgatcgacttcaccgaggacgaggtggaggacctgctgagcatcgtggccagcgtgctgcacctgggcaacatccacttcgccgccaacgaggagagcaacgcccaggtgaccaccgagaaccagctgaagtacctgaccagactgctgagcgtggagggcagcaccctgagagaggccctgacccacagaaagatcatcgccaagggcgaggagctgctgagccccctgaacctggagcaggccgcctacgccagagacgccctggccaaggccgtgtacagcagaaccttcacctggctggtgggcaagatcaacagaagcctggccagcaaggacgtggagagccccagctggagaagcaccaccgtgctgggcctgctggacatctacggcttcgaggtgttccagcacaacagcttcgagcagttctgcatcaactactgcaacgagaagctgcagcagctgttcatcgagctgaccctgaagagcgagcaggaggagtacgaggccgagggcatcgcctgggagcccgtgcagtacttcaacaacaagatcatctgcgacctggtggaggagaagttcaagggcatcatcagcatcctggacgaggagtgcctgagacccggcgaggccaccgacctgaccttcctggagaagctggaggacaccgtgaagcaccacccccacttcctgacccacaagctggccgaccagagaaccagaaagagcctgggcagaggcgagttcagactgctgcactacgccggcgaggtgacctacagcgtgaccggcttcctggacaagaacaacgacctgctgttcagaaacctgaaggagaccatgtgcagcagcaagaaccccatcatgagccagtgcttcgacagaagcgagctgagcgacaagaagagacccgagaccgtggccacccagttcaagatgagcctgctgcagctggtggagatcctgcagagcaaggagcccgcctacgtgagatgcatcaagcccaacgacgccaagcagcccggcagattcgacgaggtgctgatcagacaccaggtgaagtacctgggcctgctggagaacctgagagtgagaagagccggcttcgcctacagaagaaagtacgaggccttcctgcagagatacaagagcctgtgccccgagacctggcccacctgggccggcagaccccaggacggcgtggccgtgctggtgagacacctgggctacaagcccgaggagtacaagatgggcagaaccaagatcttcatcagattccccaagaccctgttcgccaccgaggacgccctggaggtgagaagacagagcctggccaccaagatccaggccgcctggagaggcttccactggagacagaagttcctgagagtgaagagaagcgccatctgcatccagagctggtggagaggcaccctgggcagaagaaaggccgccaagagaaagtgggccgcccagaccatcagaagactgatcagaggcttcgtgctgagacacgcccccagatgccccgagaacgccttcttcctggaccacgtgagaaccagcttcctgctgaacctgagaagacagctgccccagaacgtgctggacaccagctggcccacccccccccccgccctgagagaggccagcgagctgctgagagagctgtgcatcaagaacatggtgtggaagtactgcagaagcatcagccccgagtggaagcagcagctgcagcagaaggccgtggccagcgagatcttcaagggcaagaaggacaactacccccagagcgtgcccagactgttcatcagcaccagactgggcaccgacgagatcagccccagagtgctgcaggccctgggcagcgagcccatccagtacgccgtgcccgtggtgaagtacgacagaaagggctacaagcccagaagcagacagctgctgctgacccccaacgccgtggtgatcgtggaggacgccaaggtgaagcagagaatcgactacgccaacctgaccggcatcagcgtgagcagcctgagcgacagcctgttcgtgctgcacgtgcagagagccgacaacaagcagaagggcgacgtggtgctgcagagcgaccacgtgatcgagaccctgaccaagaccgccctgagcgccaacagagtgaacagcatcaacatcaaccagggcagcatcaccttcgccggcggccccggcagagacggcaccatcgacttcacccccggcagcgagctgctgatcaccaaggccaagaacggccacctggccgtggtggcccccagactgaacagcagatag

SEQ ID NO: 37075 - protein, 456 aa, Artificial Sequence
  derived and/or modified sequence
MSPWSWFLLQTLCLLPTGAASRRGAPGTANCELKPQQSELNSFLWTIKRDPPSYFFGTIHVPYTRVWDFIPDNSKEAFLQSSIVYFELDLTDPYTISALTSCQMLPQGENLQDVLPRDIYCRLKRHLEYVKLMMPLWMTPDQRGKGLYADYLFNAIAGNWERKRPVWVMLMVNSLTEVDIKSRGVPVLDLFLAQEAERLRKQTGAVEKVEEQCHPLNGLNFSQVPNFINATLPPQERITAQEIDSYLRRELIYKRNERIGKRVKALLEEFPDKGFFFAFGAGHFMGNNTVLDVLRREGYEVEHAPAGRPIHKGKSKKTSTRPTLSTIFAPKVPTLEVPAPEAVSSGHSTLPPLVSRPGSADTPSEAEQRFRKKRRRSQRRPRLRQFSDLWVRLEESDIVPQLQVPVLDRHISTELRLPRRGHSHHSQMVASSACLSLWTPVFWVLVLAFQTETPLL

SEQ ID NO: 37076 - DNA, 1844 bp, Artificial Sequence
  derived and/or modified sequence
ctccgctgccgcctaggcgcggggctgacctgcgggggtggggtggggggagggaggtcgaggcccggccccacgtggccgctgctgccgggctcaccccagccccgcccggaggcgccccgcggccccggctagccagggcgggcggccacctctgccctactccttccctccgcgttccgggcctcggagccgccttgaggaggatgagtccctggagctggttcctgctgcagaccctctgcctcctgcccacgggcgcagcttcgcggcgcggggcgcccggcaccgccaactgcgagctcaagccccaacaaagcgagctgaattccttcttgtggaccattaagcgagacccaccatcttacttctttggcacaatccatgtcccgtacacccgagtttgggacttcatccccgacaactctaaggaggctttcctgcagagcagcattgtgtactttgagttggatctcacagacccctataccatctcagctctcaccagctgtcagatgctgccacagggcgagaacctccaagatgtgctccccagggacatctactgccgcctcaagcgccacctggagtatgtcaagctcatgatgcccttgtggatgaccccagaccagcgcggcaaggggctctacgcagactacctcttcaatgctattgccggaaactgggagcgcaagaggcctgtctgggtgatgctcatggtcaactccctgactgaagtggacattaagtcccgtggagtgcctgtcttagacctgttccttgcccaggaggctgagcggctgaggaaacagactggggcagtggaaaaggtggaagagcagtgccatccattgaatgggttgaacttttcacaggttcccaattttattaatgccacgctaccacctcaggagcgcatcactgctcaggagattgacagctacttacgccgggagctgatctacaagcggaatgagagaatagggaagcgggtgaaggcccttttggaggagttccctgacaaaggcttcttctttgcctttggagctggtcatttcatgggcaacaacacagtgctggatgttttgcggcgtgaaggctatgaggtagaacacgcccctgctggacgacccatccacaaagggaagagtaaaaagacctccacacggcccactctgtccaccatctttgctccaaaagtccctaccctggaagtaccggcaccagaagccgtatcctcagggcactcaacgctgcctccccttgtgtcccggcctggaagtgccgacacgcccagtgaggccgaacagaggttccggaagaagcggaggcggtcacagcggaggccgcgactccggcaattcagcgatctgtgggtccgcctggaggagagtgacatagtcccgcaactccaggtccctgtcctggacaggcacatctccactgaactgcggctccctcgccgtgggcattcccaccacagccagatggtggccagcagtgcctgcctgtctctctggactcctgtgttctgggtgctggtgctggctttccaaacagagacacccctcctgtaacgactggaagcaccaggctaagaacctgacccctcggacttgaagaatggccattcctgtactccacattctggtctagccttgttgggcccaatccagaagagactgctcttgaaaaagcggcccagtgttgattcttctctttccaaggaatgtgactttgggttatccaactttgggggcaggtgtacagttttgtaacatagtgagttgtgtgaaaataaattataaatgagttgtatgaaaataaatacctttttttgtata

SEQ ID NO: 37077 - DNA, 1371 bp, Artificial Sequence
  derived and/or modified sequence
atgagcccctggagctggttcctgctgcagaccctgtgcctgctgcccaccggcgccgccagcagaagaggcgcccccggcaccgccaactgcgagctgaagccccagcagagcgagctgaacagcttcctgtggaccatcaagagagacccccccagctacttcttcggcaccatccacgtgccctacaccagagtgtgggacttcatccccgacaacagcaaggaggccttcctgcagagcagcatcgtgtacttcgagctggacctgaccgacccctacaccatcagcgccctgaccagctgccagatgctgccccagggcgagaacctgcaggacgtgctgcccagagacatctactgcagactgaagagacacctggagtacgtgaagctgatgatgcccctgtggatgacccccgaccagagaggcaagggcctgtacgccgactacctgttcaacgccatcgccggcaactgggagagaaagagacccgtgtgggtgatgctgatggtgaacagcctgaccgaggtggacatcaagagcagaggcgtgcccgtgctggacctgttcctggcccaggaggccgagagactgagaaagcagaccggcgccgtggagaaggtggaggagcagtgccaccccctgaacggcctgaacttcagccaggtgcccaacttcatcaacgccaccctgcccccccaggagagaatcaccgcccaggagatcgacagctacctgagaagagagctgatctacaagagaaacgagagaatcggcaagagagtgaaggccctgctggaggagttccccgacaagggcttcttcttcgccttcggcgccggccacttcatgggcaacaacaccgtgctggacgtgctgagaagagagggctacgaggtggagcacgcccccgccggcagacccatccacaagggcaagagcaagaagaccagcaccagacccaccctgagcaccatcttcgcccccaaggtgcccaccctggaggtgcccgcccccgaggccgtgagcagcggccacagcaccctgccccccctggtgagcagacccggcagcgccgacacccccagcgaggccgagcagagattcagaaagaagagaagaagaagccagagaagacccagactgagacagttcagcgacctgtgggtgagactggaggagagcgacatcgtgccccagctgcaggtgcccgtgctggacagacacatcagcaccgagctgagactgcccagaagaggccacagccaccacagccagatggtggccagcagcgcctgcctgagcctgtggacccccgtgttctgggtgctggtgctggccttccagaccgagacccccctgctgtag

SEQ ID NO: 37078 - DNA, 1371 bp, Artificial Sequence
  derived and/or modified sequence
atgtctccctggtcctggttcctcttgcagacattgtgtttactgcccacaggcgcagctagccgtaggggagcccccggaacggccaactgcgagttgaagccccagcaaagcgaactaaactcattcctgtggacgatcaagcgggatcccccctcctattttttcggcaccatccatgtgccctatacgcgtgtgtgggactttatccccgataattcaaaagaagccttcctgcagtcttccatagtctacttcgagctggacttgacagacccgtacacgattagtgcactgacctcctgccagatgcttccacaaggcgagaacctgcaggatgttcttccacgggacatttattgtagacttaaacgccatctcgaatatgtgaagttgatgatgcctctgtggatgacacccgatcaacgtggaaaagggctgtatgccgactatctgtttaacgccatagccgggaactgggagcggaaacggcccgtatgggtgatgctgatggtgaactccctaacagaagtcgacattaaaagccggggggttccagtgttagatctatttctcgcccaggaggcagaacgtttgcggaagcaaacaggtgccgtggagaaggtggaagagcagtgccatccacttaacggtctcaacttttcccaggtgcctaattttatcaacgccaccctgcccccacaagagcgcattactgcccaagaaattgactcctacctacgcagagaactaatctataagaggaacgagagaatagggaagagggtgaaagccctgcttgaggagttccctgataaaggtttcttttttgcgtttggcgccggccatttcatggggaacaacacggtcttagacgtccttcgccgggagggttacgaagtggagcatgctcctgccggcagaccaattcacaagggaaagtccaagaaaaccagcacacgtccaacactctccacaatattcgcaccaaaggtacctaccctggaggtccctgccccagaggctgtgtctagtggacacagtacgctgcccccactggtgtccaggcctggcagcgcagacactccaagcgaggccgagcagcgcttccgcaaaaaacgtcgaaggtcccagcggagaccacgcctgaggcaattctccgatttgtgggtaagactggaagagagcgacattgtaccgcagttacaagtgcctgtgctggacaggcacatctctactgaactccgcctgcccagacggggacactctcatcactcacagatggtcgcgtcttccgcctgcctcagcttgtggacacctgtgttctgggtgttggtccttgccttccaaactgagacgcctttactgtag

SEQ ID NO: 37079 - DNA, 1371 bp, Artificial Sequence
  derived and/or modified sequence
atgagcccctggagctggttcctgctgcagaccctgtgcctgctgcccactggagctgccagccggcggggggcccctggaacagccaactgtgagctgaagccccagcagagcgagctgaacagcttcctgtggaccatcaagagggaccccccatcctacttcttcggcaccatccacgtgccctacaccagggtgtgggacttcatcccagacaacagcaaggaggccttcctgcagagcagcatcgtgtactttgagctggacctgacagacccctacaccatcagcgccctgaccagctgccagatgctgccccagggcgagaacctgcaggatgtgctgccccgggacatctactgccgcctgaagaggcacctggagtatgtgaagctgatgatgcccctgtggatgaccccagaccagaggggcaagggcctgtatgctgactacctgttcaatgccatcgccggcaactgggagaggaagaggcctgtgtgggtgatgctgatggtgaacagcctgacagaggtggacatcaagagccggggcgtgcctgtgctggacctcttcctggcccaggaggccgagcggctgaggaagcagacaggagctgtggagaaggtggaggagcagtgccaccccctgaatggcctgaacttcagccaggtgcccaacttcatcaatgccaccctgcccccccaggagcgcatcacagcccaggagattgacagctacctgcggcgggagctgatctacaagagaaatgaaagaattggcaagagggtgaaggccctgctggaggagttcccagacaagggcttcttctttgcctttggagctggccacttcatgggcaacaacacagtgctggatgtgctgcggcgggagggctatgaggtggagcacgccccagctggccggcccatccacaagggcaagagcaagaagaccagcacccggcccaccctgagcaccatctttgcccccaaggtgcccaccctggaggtgcctgcccctgaggccgtgagcagcggccacagcaccctgccccccctggtgtccaggcctggcagcgctgacacccccagcgaggccgagcagcgcttcaggaagaagagaagaagaagccagaggcggccccggctgcggcagttcagtgacctgtgggtgcggctggaggagagtgacatcgtgccccagctgcaggtgcctgtgctggacagacacatcagcacagagctgcggctgccccggcggggccacagccaccacagccagatggtggccagcagcgcctgcctgagcctgtggacccctgtgttctgggtgctggtgctggccttccagacagagacccccctgctgtag

SEQ ID NO: 37080 - DNA, 1371 bp, Artificial Sequence
  derived and/or modified sequence
atgagcccctggagctggttcctgctgcagaccctgtgcctgctgccaaccggcgcggctagtcgcagaggagcccccgggaccgctaattgtgagttgaagccccagcaatctgagctgaatagctttctctggacaatcaagcgggacccgccgtcctatttcttcggaacgattcatgtcccttacactagagtctgggattttatcccggacaatagtaaggaagctttcctccaatctagtatagtatacttcgagttagatctgacggacccctataccatctctgccctgacaagttgtcagatgctgccgcagggagaaaatctacaggatgtcctcccaagggacatttattgcagacttaagagacacttagagtatgtgaagttgatgatgcccctgtggatgacaccagatcagagaggtaagggattatacgctgactaccttttcaatgcgatcgctggaaattgggagcgtaaacggccagtgtgggtaatgctgatggttaattctcttaccgaagtggatatcaagtcgaggggcgtccccgtgctggatctgtttcttgcgcaggaggccgaaagactacgaaagcagaccggggctgtggaaaaagtggaagagcagtgccaccccttgaacgggctcaacttcagtcaagtacctaattttattaatgcaaccctgcctccacaagaacgtattacagctcaggagatagatagttatctccgacgagagctgatatataaacgcaatgagagaatcggaaagcgcgtgaaagctctgctggaagagttccccgacaagggcttcttctttgcttttggtgccggccacttcatgggcaataacactgtcctggatgttctgaggcgcgaggggtacgaagtcgagcatgcccccgccgggcgtcctatccataaaggcaagagcaaaaagaccagcacacggccaaccttgagcacaatttttgcccccaaagtgcctacgctggaagtccctgccccagaagccgtcagcagcggacacagcaccctgcctccccttgtatcgcgccctggttccgccgatactccttctgaagcagagcagcgttttaggaagaagcgtaggcgcagtcaaaggcggcctaggctgaggcagttttccgacctgtgggtgcgactggaggagtccgacatcgtcccccaactgcaggtccctgtgttagaccggcacatctcgacagagctgaggctaccacgccgcgggcattctcaccactcacagatggtcgccagttctgcgtgcctatccctgtggacccctgtcttctgggtactcgttttagcgtttcagacggagacgccccttctgtag

SEQ ID NO: 37081 - DNA, 1371 bp, Artificial Sequence
  derived and/or modified sequence
atgtcaccatggtcttggttcttgctccagactttgtgcctgctccccacgggagcggcttcacgaaggggcgcacccggtacggctaactgcgagctgaagccacagcagtcagagctcaacagcttcctatggacaataaagcgggatcctcctagttacttcttcggcacaattcacgttccgtacacacgggtctgggactttattccagataactccaaagaagcttttctgcagtcaagcattgtttatttcgagctggaccttaccgacccgtacaccataagtgccttgaccagctgtcagatgctgccccagggagaaaacctgcaagacgttttgcctcgggacatctattgccggctgaagagacaccttgaatacgtcaagctgatgatgcctctgtggatgacccctgatcagagaggtaagggcctatatgccgattatctattcaatgccatagccggaaattgggaacggaaaagaccagtgtgggtgatgctgatggtcaactccctgaccgaggtggatattaagagccgtggcgtcccagttcttgacctgtttttggcccaggaagcagagagactgcgcaagcaaactggtgctgtggagaaggtggaagaacagtgccatccacttaacggactgaacttctctcaggtacccaatttcatcaatgccacgcttcctccccaggagaggatcactgcccaggagatcgacagctatctgagaagggagttaatctacaaacggaatgagaggatcggtaaacgtgtgaaggcactgctggaggaatttccggacaagggattcttcttcgcgttcggcgcaggccattttatgggcaataacactgtgctggatgtccttcgccgagagggttacgaagtcgagcacgcaccagcgggacggcctatccacaagggcaaatcaaaaaagaccagcacccgcccaacgctctccactatctttgctcccaaagtcccaacactcgaagttcccgcacccgaggcagtgtcgtccggacatagcacattaccacctctggttagtaggccaggctccgcggacactcccagcgaggccgagcagcgtttccgcaagaagaggcggcgatcacagcgacgaccgagactccgccagttctccgacctctgggtgaggctcgaggaaagtgacatagttccacaactccaggtgccagtattagaccggcatatcagtaccgagttacgcctcccccgtcgcggtcatagtcatcacagccagatggtggcatcaagtgcttgcttgtcattgtggactcctgtgttttgggtcctggtactcgcattccagaccgagactcctctactgtag

SEQ ID NO: 37082 - protein, 244 aa, Artificial Sequence
  derived and/or modified sequence
MGLELFLDLVSQPSRAVYIFAKKNGIPLELRTVDLVKGQHKSKEFLQINSLGKLPTLKDGDFILTESSAILIYLSCKYQTPDHWYPSDLQARARVHEYLGWHADCIRGTFGIPLWVQVLGPLIGVQVPEEKVERNRTAMDQALQWLEDKFLGDRPFLAGQQVTLADLMALEELMQPVALGYELFEGRPRLAAWRGRVEAFLGAELCQEAHSIILSILEQAAKKTLPTPSPEAYQAMLLRIARIP

SEQ ID NO: 37083 - DNA, 735 bp, Artificial Sequence
  derived and/or modified sequence
atgggactcgagctgttcctcgacctagtctcccaaccatccagggccgtttacatctttgcaaaaaaaaacggcatcccacttgagctgaggaccgtcgacttagtgaaagggcagcacaaatcaaaagaattccttcagattaacagcctgggcaagcttcctacactgaaggatggcgattttatcctgacggagtcttctgccatcttaatctacttatcctgtaagtaccagacacctgatcattggtacccttccgatctgcaggcccgcgctcgggtacacgagtacctcggttggcacgccgactgcatccgcgggacattcggcattcccttatgggttcaagtattaggcccgctcatcggtgtgcaagtaccggaggaaaaggttgagcggaaccgcaccgcgatggatcaagcactgcagtggctggaagacaagtttctgggggataggccctttctcgctggtcaacaggtcacactggctgacttgatggctttagaggaactgatgcagccagttgccctggggtacgagctgtttgaggggcgcccaaggcttgcagcgtggagagggcgggtcgaagcctttctgggggcagagctatgtcaggaagcacattccatcatcctctctattctagagcaagccgccaaaaaaacgctgccgactccaagccccgaggcctaccaggcaatgcttttgcggatagccaggattccttag

SEQ ID NO: 37084 - DNA, 735 bp, Artificial Sequence
  derived and/or modified sequence
atgggcctggagctgttcctggacctggtgtcccagcccagcagagctgtgtacatctttgccaagaagaatggcatccccctggagctgaggacagtggacctggtgaagggccagcacaagagcaaggagttcctgcagatcaacagcctgggcaagctgcccaccctgaaggatggagacttcatcctgacagagagcagcgccatcctgatctacctgagctgcaagtaccagaccccagaccactggtaccccagcgacctgcaggcccgggcccgggtgcatgagtacctgggctggcatgctgactgcatccggggcaccttcggcatccccctgtgggtgcaggtgctgggccccctgattggagtgcaggtgcctgaggagaaggtggagaggaacagaacagccatggaccaggccctgcagtggctggaggacaagttcctgggggaccggcccttcctggccggccagcaggtgaccctggccgacctgatggccctggaggagctgatgcagcctgtggccctgggctatgagctgtttgagggccggccccggctggccgcctggaggggccgggtggaggccttcctgggcgctgagctgtgccaggaggcccacagcatcatcctgagcatcctggagcaggccgccaagaagaccctgcccacccccagccctgaggcctaccaggccatgctgctgcgcatcgcccgcatcccctag

SEQ ID NO: 37085 - DNA, 735 bp, Artificial Sequence
  derived and/or modified sequence
atgggcctggagctgttcctggacctggtgagccagcccagccgggctgtctatatcttcgcaaagaagaatggcatcccactggagctgagaactgtggacctagtaaaggggcaacacaaatctaaggagtttctgcaaataaacagccttggcaaattacccaccctgaaagacggcgattttattttaacagagagtagtgctatcctgatctatctaagctgcaagtaccaaacccccgaccactggtacccttcggatctacaggccagggcccgcgtccatgagtatctgggatggcatgccgactgtatcaggggcacctttgggataccactctgggttcaggtcctcggccctttgattggggtgcaggtgcccgaggaaaaggtggaacgtaacaggactgccatggatcaggcacttcaatggctcgaagataagttcctgggggatagaccttttctggcaggccagcaagtgacactagccgatttgatggctctagaggagctgatgcagcccgtggccctcggctacgaattatttgaagggcggccaaggcttgccgcctggcggggccgggttgaggcatttctgggcgcagagctttgtcaggaggcccattccattattctgtcaatcctggagcaggccgccaaaaagacactacccaccccttcacctgaagcttaccaagctatgttgctgaggatagccaggattccttag

SEQ ID NO: 37086 - DNA, 735 bp, Artificial Sequence
  derived and/or modified sequence
atggggctcgaactgtttttagatctggtgagccaaccgagtcgcgcagtttacatttttgctaagaagaatggaattcccctggaactgcggaccgtcgacctcgtgaagggacagcacaagagcaaggagttccttcagatcaactcactggggaagctgccgaccttaaaagatggcgacttcatcctgactgagtcatcggctattctgatctacttaagttgcaagtatcagacgcctgaccactggtatcctagtgatcttcaggcccgagctagagtgcatgaatacctcggttggcacgctgactgtataagagggactttcgggatcccactgtgggtccaagtgctgggacctctgatcggcgttcaggtcccagaagaaaaagttgagaggaaccggacagccatggaccaagctctgcaatggctggaagataagttcctaggagacaggcccttcttggccggacagcaggttactctggcggacctcatggccctggaggagctcatgcaacccgtggcacttgggtatgaactttttgagggcaggcctcgccttgcagcttggaggggtagggtagaagcattccttggagcagagctatgtcaggaagcccacagtatcattcttagcatcctagagcaggccgctaaaaaaacactacccacaccaagtcccgaggcttaccaggccatgctgctcagaatcgcaagaatcccatag

SEQ ID NO: 37087 - DNA, 1099 bp, Artificial Sequence
  derived and/or modified sequence
ccacaccgcgctcagcgccttcactgccatccccgctgtccttgccgcccccgccatgggcctagagctgtttcttgacctggtgtcccagcccagccgcgccgtctacatcttcgccaagaagaatggcatccccttagagctgcgcaccgtggatttggtcaaagggcagcacaagagcaaggagttcttgcagatcaacagcctggggaaactgccgacgctcaaggatggtgatttcatcttgactgaaagctcggccatcctgatttacctgagctgtaagtaccagacgccggaccactggtatccatctgacctgcaggctcgtgcccgtgttcatgagtacctgggctggcatgccgactgcatccgtggcacctttggtatacccctgtgggtccaggtgttggggcccctcattggggtccaggtgcccgaggagaaggtggaacgcaacaggactgccatggaccaggccctgcaatggctggaggacaagttcctgggggacaggcccttcctcgctggccagcaggtgacactggctgatctcatggccctggaggagctgatgcagccggtggctctcggctatgaactgtttgagggacggccacgactggcagcatggcgtggacgagtggaggctttcctgggtgctgagctatgccaggaggcccacagcatcatcttgagcatcctggaacaggcggccaagaaaaccctcccaacaccctcaccagaggcctatcaggctatgctgcttcgaatcgccaggatcccctgaagggtctgggatgggggccaggagattagcaacaaggattcattctgttacttacttgcccctttttatctttccctcttgccccagtcccttctctccagcttcatgtgaagctctgcacagacaagacactcagtgtccttggcagtgctgctactcctcaggtgcagcatacataaccagtaagagactaaatctgcaatatataaagagctcctacaaatcagtaacatgaagaacactcaaaaattggcaaatgtcatcagtgttttaaacagaataaagattccaaacactttgaatagagaa

SEQ ID NO: 37088 - DNA, 735 bp, Artificial Sequence
  derived and/or modified sequence
atgggcctggagctgttcctggacctggtgagccagcccagcagagccgtgtacatcttcgccaagaagaacggcatccccctggagctgagaaccgtggacctggtgaagggccagcacaagagcaaggagttcctgcagatcaacagcctgggcaagctgcccaccctgaaggacggcgacttcatcctgaccgagagcagcgccatcctgatctacctgagctgcaagtaccagacccccgaccactggtaccccagcgacctgcaggccagagccagagtgcacgagtacctgggctggcacgccgactgcatcagaggcaccttcggcatccccctgtgggtgcaggtgctgggccccctgatcggcgtgcaggtgcccgaggagaaggtggagagaaacagaaccgccatggaccaggccctgcagtggctggaggacaagttcctgggcgacagacccttcctggccggccagcaggtgaccctggccgacctgatggccctggaggagctgatgcagcccgtggccctgggctacgagctgttcgagggcagacccagactggccgcctggagaggcagagtggaggccttcctgggcgccgagctgtgccaggaggcccacagcatcatcctgagcatcctggagcaggccgccaagaagaccctgcccacccccagccccgaggcctaccaggccatgctgctgagaatcgccagaatcccctag

SEQ ID NO: 37089 - protein, 178 aa, Artificial Sequence
  derived and/or modified sequence
MLRTALRGAPRLLSRVQPRAPCLRRLWGRGARPEVAGRRRAWAWGWRRSSSEQGPGPAAALGRVEAAHYQLVYTCKVCGTRSSKRISKLAYHQGVVIVTCPGCQNHHIIADNLGWFSDLNGKRNIEEILTARGEQVHRVAGEGALELVLEAAGAPTSTAAPEAGEDEGPPSPGKTEPS

SEQ ID NO: 37090 - DNA, 537 bp, Artificial Sequence
  derived and/or modified sequence
atgctgagaaccgccctgagaggcgcccccagactgctgagcagagtgcagcccagagccccctgcctgagaagactgtggggcagaggcgccagacccgaggtggccggcagaagaagagcctgggcctggggctggagaagaagcagcagcgagcagggccccggccccgccgccgccctgggcagagtggaggccgcccactaccagctggtgtacacctgcaaggtgtgcggcaccagaagcagcaagagaatcagcaagctggcctaccaccagggcgtggtgatcgtgacctgccccggctgccagaaccaccacatcatcgccgacaacctgggctggttcagcgacctgaacggcaagagaaacatcgaggagatcctgaccgccagaggcgagcaggtgcacagagtggccggcgagggcgccctggagctggtgctggaggccgccggcgcccccaccagcaccgccgcccccgaggccggcgaggacgagggcccccccagccccggcaagaccgagcccagctag

SEQ ID NO: 37091 - DNA, 724 bp, Artificial Sequence
  derived and/or modified sequence
gcttccgcccggcgcccacttccaagatggcggcggggcggggccggggcagggcggacggagccggcgagcgggatgctgcggactgcgctgcgcggcgcgccgaggttgctgagtcgcgtgcagccccgggcgccctgcctgaggcggctgtggggccgcggggcccgtccagaggtcgcggggaggcggcgggcctgggcctggggctggcggcgctcaagctccgagcaggggccggggcccgcggcggctctggggcgcgtggaggcggcgcactaccagctcgtctacacctgcaaggtctgcgggactaggtcctccaagcgcatctccaagctggcctatcaccaaggcgtggtcattgtgacctgccccggctgccagaaccaccatatcatcgctgacaacctgggctggttctcggacctgaatgggaagagaaatatcgaagagatcctgacggccagaggcgagcaggtgcaccgtgtggcgggcgagggggccctggaactggttctggaggctgcaggggcccccacatccactgcagctccggaagcgggtgaggatgagggtccccccagccctggcaagacggagccgagctgactcctgcgctccccggcactgtgggacttcggccttccagaaggaggttttggccctgggcctctctggacgtggcctgttttctatcaataaacagacattacttccagat

SEQ ID NO: 37092 - DNA, 537 bp, Artificial Sequence
  derived and/or modified sequence
atgcttagaaccgctctgcggggtgcccctcgcttgctttccagggtgcagcccagggcaccctgccttaggcggctctggggacggggtgctaggccggaagtggcaggacgaagaagggcttgggcatgggggtggcgcaggagctcaagcgaacagggtcctggaccagccgccgctcttggccgggttgaagctgcccactaccagctggtgtatacctgcaaggtgtgtgggactcggtcgtcaaagcgaataagcaagctggcctaccaccagggtgtggtcattgtgacgtgtccaggctgtcagaatcatcacatcatcgctgataacctcggatggttttccgacctgaatggtaaacgtaacatcgaggaaattctaacggccagaggagaacaagtgcaccgcgtggcaggtgagggagccctggaactagtgctggaggccgctggagcacctaccagtaccgccgcgcccgaggccggtgaagatgagggacccccctcacccggtaaaacagaacctagctag

SEQ ID NO: 37093 - DNA, 537 bp, Artificial Sequence
  derived and/or modified sequence
atgctgaggacagccctgcggggggccccccggctgctgagccgggtgcagccccgggccccctgcctgcggcggctgtggggccgcggggcccggcctgaggtggccggcagaagaagagcctgggcctggggctggaggaggagcagcagcgagcagggccctggccctgctgctgccctgggccgggtggaggccgcccactaccagctggtgtacacctgcaaggtgtgtggcaccaggagcagcaagaggatcagcaagctggcctaccaccagggcgtggtgattgtgacctgccccggctgccagaaccaccacatcatcgctgacaacctgggctggttcagtgacctgaatggcaagagaaatattgaggagatcctgacagcccggggggagcaggtgcaccgggtggccggggagggcgccctggagctggtgctggaggccgccggggcccccaccagcacagctgcccctgaggccggagaagatgagggcccccccagccctgggaagacagagcccagctag

SEQ ID NO: 37094 - DNA, 537 bp, Artificial Sequence
  derived and/or modified sequence
atgctgcggaccgccctgcggggcgccccccggctgctgagccgggtacagccaagggcaccctgcttgaggcggttgtggggcagaggggcaaggccggaggttgccggaagacgccgggcttgggcatggggatggcgaagaagttccagcgaacagggccctgggcccgcagccgccctcgggcgcgtggaggccgcgcactaccagctggtttatacttgtaaagtatgtggaacaaggagctctaagagaatctccaagcttgcatatcatcagggcgtagtcattgtgacatgtccggggtgtcagaatcatcatattatcgcagacaatctcggctggttttccgacctgaacggcaaacgcaacatcgaggaaatactcacagcacgcggggagcaagtccacagagtggcaggcgagggcgccttggagctggtgcttgaagccgctggagcgccaacatcaactgctgcgccagaagcgggcgaagatgagggtccaccaagtcctggcaagacagaaccctcctag

SEQ ID NO: 37095 - DNA, 537 bp, Artificial Sequence
  derived and/or modified sequence
atgctgcggaccgctcttcggggtgcccctcggctgctatctagggttcaaccacgcgctccctgtctgcggaggttgtggggaagaggagctcgccctgaggtggcgggacggagaagggcctgggcctgggggtggagacgcagctcaagcgaacaggggccaggacctgctgccgcattgggtagagtggaagctgcccactaccagctggtttatacctgtaaggtgtgcgggacccggtcctccaaaagaatctctaaactagcctaccatcagggggtggtgatcgtgacttgccctgggtgtcagaaccaccacataattgcagataatctgggctggttttctgatctgaatggtaaacgtaacatcgaggagatattgactgccagaggtgagcaagtccaccgtgttgctggagagggagctttggagttggtgctggaggcagccggtgctccaacctccaccgcagcacccgaagccggagaggacgaagggccaccctctcctggcaagacggaaccctcttag

SEQ ID NO: 37096 - protein, 591 aa, Artificial Sequence
  derived and/or modified sequence
MDDLDALLADLESTTSHISKRPVFLSEETPYSYPTGNHTYQEIAVPPPVPPPPSSEALNGTILDPLDQWQPSSSRFIHQQPQSSSPVYGSSAKTSSVSNPQDSVGSPCSRVGEEEHVYSFPNKQKSAEPSPTVMSTSLGSNLSELDRLLLELNAVQHNPPGFPADEANSSPPLPGALSPLYGVPETNSPLGGKAGPLTKEKPKRNGGRGLEDVRPSVESLLDELESSVPSPVPAITVNQGEMSSPQRVTSTQQQTRISASSATRELDELMASLSDFKIQGLEQRADGERCWAAGWPRDGGRSSPGGQDEGGFMAQGKTGSSSPPGGPPKPGSQLDSMLGSLQSDLNKLGVATVAKGVCGACKKPIAGQVVTAMGKTWHPEHFVCTHCQEEIGSRNFFERDGQPYCEKDYHNLFSPRCYYCNGPILDKVVTALDRTWHPEHFFCAQCGAFFGPEGFHEKDGKAYCRKDYFDMFAPKCGGCARAILENYISALNTLWHPECFVCRECFTPFVNGSFFEHDGQPYCEVHYHERRGSLCSGCQKPITGRCITAMAKKFHPEHFVCAFCLKQLNKGTFKEQNDKPYCQNCFLKLFC

SEQ ID NO: 37097 - protein, 1044 aa, Artificial Sequence
  derived and/or modified sequence
MRYRASALGSDGVRVTMESALTARDRVGVQDFVLLENFTSEAAFIENLRRRFRENLIYTYIGPVLVSVNPYRDLQIYSRQHMERYRGVSFYEVPPHLFAVADTVYRALRTERRDQAVMISGESGAGKTEATKRLLQFYAETCPAPERGGAVRDRLLQSNPVLEAFGNAKTLRNDNSSRFGKYMDVQFDFKGAPVGGHILSYLLEKSRVVHQNHGERNFHIFYQLLEGGEEETLRRLGLERNPQSYLYLVKGQCAKVSSINDKSDWKVVRKALTVIDFTEDEVEDLLSIVASVLHLGNIHFAANEESNAQVTTENQLKYLTRLLSVEGSTLREALTHRKIIAKGEELLSPLNLEQAAYARDALAKAVYSRTFTWLVGKINRSLASKDVESPSWRSTTVLGLLDIYGFEVFQHNSFEQFCINYCNEKLQQLFIELTLKSEQEEYEAEGIAWEPVQYFNNKIICDLVEEKFKGIISILDEECLRPGEATDLTFLEKLEDTVKHHPHFLTHKLADQRTRKSLGRGEFRLLHYAGEVTYSVTGFLDKNNDLLFRNLKETMCSSKNPIMSQCFDRSELSDKKRPETVATQFKMSLLQLVEILQSKEPAYVRCIKPNDAKQPGRFDEVLIRHQVKYLGLLENLRVRRAGFAYRRKYEAFLQRYKSLCPETWPTWAGRPQDGVAVLVRHLGYKPEEYKMGRTKIFIRFPKTLFATEDALEVRRQSLATKIQAAWRGFHWRQKFLRVKRSAICIQSWWRGTLGRRKAAKRKWAAQTIRRLIRGFVLRHAPRCPENAFFLDHVRTSFLLNLRRQLPQNVLDTSWPTPPPALREASELLRELCIKNMVWKYCRSISPEWKQQLQQKAVASEIFKGKKDNYPQSVPRLFISTRLGTDEISPRVLQALGSEPIQYAVPVVKYDRKGYKPRSRQLLLTPNAVVIVEDAKVKQRIDYANLTGISVSSLSDSLFVLHVQRADNKQKGDVVLQSDHVIETLTKTALSANRVNSININQGSITFAGGPGRDGTIDFTPGSELLITKAKNGHLAVVAPRLNSR

SEQ ID NO: 37098 - protein, 805 aa, Artificial Sequence
  derived and/or modified sequence
MESALTARDRVGVQDFVLLENFTSEAAFIENLRRRFRENLIYTYIGPVLVSVNPYRDLQIYSRQHMERYRGVSFYEVPPHLFAVADTVYRALRTERRDQAVMISGESGAGKTEATKRLLQFYAETCPAPERGGAVRDRLLQSNPVLEAFGNAKTLRNDNSSRFGKYMDVQFDFKGAPVGGHILSYLLEKSRVVHQNHGERNFHIFYQLLEGGEEETLRRLGLERNPQSYLYLVKGQCAKVSSINDKSDWKVVRKALTVIDFTEDEVEDLLSIVASVLHLGNIHFAANEESNAQVTTENQLKYLTRLLSVEGSTLREALTHRKIIAKGEELLSPLNLEQAAYARDALAKAVYSRTFTWLVGKINRSLASKDVESPSWRSTTVLGLLDIYGFEVFQHNSFEQFCINYCNEKLQQLFIELTLKSEQEEYEAEGIAWEPVQYFNNKIICDLVEEKFKGIISILDEECLRPGEATDLTFLEKLEDTVKHHPHFLTHKLADQRTRKSLGRGEFRLLHYAGEVTYSVTGFLDKNNDLLFRNLKETMCSSKNPIMSQCFDRSELSDKKRPETVATQFKMSLLQLVEILQSKEPAYVRCIKPNDAKQPGRFDEVLIRHQVKYLGLLENLRVRRAGFAYRRKYEAFLQRYKSLCPETWPTWAGRPQDGVAVLVRHLGYKPEEYKMGRTKIFIRFPKTLFATEDALEVRRQSLATKIQAAWRGFHWRQKFLRVKRSAICIQSWWRGTLGRRKAAKEVGGTDHPAAHPRLRPAPRPPLPRERLLPGPCAHLFFAKPEAAAAPECPGHLVAHAPTCPA

SEQ ID NO: 37099 - protein, 1044 aa, Artificial Sequence
  derived and/or modified sequence
MRGRASALGSDGVRVTMESALTARDRVGVQDFVLLENFTSEAAFIENLRRRFRENLIYTYIGPVLVSVNPYRDLQIYSRQHMERYRGVSFYEVPPHLFAVADTVYRALRTERRDQAVMISGESGAGKTEATKRLLQFYAETCPAPERGGAVRDRLLQSNPVLEAFGNAKTLRNDNSSRFGKYMDVQFDFKGAPVGGHILSYLLEKSRVVHQNHGERNFHIFYQLLEGGEEETLRRLGLERNPQSYLYLVKGQCAKVSSINDKSDWKVVRKALTVIDFTEDEVEDLLSIVASVLHLGNIHFAANEESNAQVTTENQLKYLTRLLSVEGSTLREALTHRKIIAKGEELLSPLNLEQAAYARDALAKAVYSRTFTWLVGKINRSLASKDVESPSWRSTTVLGLLDIYGFEVFQHNSFEQFCINYCNEKLQQLFIELTLKSEQEEYEAEGIAWEPVQYFNNKIICDLVEEKFKGIISILDEECLRPGEATDLTFLEKLEDTVKHHPHFLTHKLADQRTRKSLGRGEFRLLHYAGEVTYSVTGFLDKNNDLLFRNLKETMCSSKNPIMSQCFDRSELSDKKRPETVATQFKMSLLQLVEILQSKEPAYVRCIKPNDAKQPGRFDEVLIRHQVKYLGLLENLRVRRAGFAYRRKYEAFLQRYKSLCPETWPTWAGRPQDGVAVLVRHLGYKPEEYKMGRTKIFIRFPKTLFATEDALEVRRQSLATKIQAAWRGFHWRQKFLRVKRSAICIQSWWRGTLGRRKAAKRKWAAQTIRRLIRGFVLRHAPRCPENAFFLDHVRTSFLLNLRRQLPQNVLDTSWPTPPPALREASELLRELCIKNMVWKYCRSISPEWKQQLQQKAVASEIFKGKKDNYPQSVPRLFISTRLGTDEISPRVLQALGSEPIQYAVPVVKYDRKGYKPRSRQLLLTPNAVVIVEDAKVKQRIDYANLTGISVSSLSDSLFVLHVQRADNKQKGDVVLQSDHVIETLTKTALSANRVNSININQGSITFAGGPGRDGTIDFTPGSELLITKAKNGHLAVVAPRLNSR

SEQ ID NO: 37100 - protein, 1039 aa, Artificial Sequence
  derived and/or modified sequence
MALGSDGVRVTMESALTARDRVGVQDFVLLENFTSEAAFIENLRRRFRENLIYTYIGPVLVSVNPYRDLQIYSRQHMERYRGVSFYEVPPHLFAVADTVYRALRTERRDQAVMISGESGAGKTEATKRLLQFYAETCPAPERGGAVRDRLLQSNPVLEAFGNAKTLRNDNSSRFGKYMDVQFDFKGAPVGGHILSYLLEKSRVVHQNHGERNFHIFYQLLEGGEEETLRRLGLERNPQSYLYLVKGQCAKVSSINDKSDWKVVRKALTVIDFTEDEVEDLLSIVASVLHLGNIHFAANEESNAQVTTENQLKYLTRLLSVEGSTLREALTHRKIIAKGEELLSPLNLEQAAYARDALAKAVYSRTFTWLVGKINRSLASKDVESPSWRSTTVLGLLDIYGFEVFQHNSFEQFCINYCNEKLQQLFIELTLKSEQEEYEAEGIAWEPVQYFNNKIICDLVEEKFKGIISILDEECLRPGEATDLTFLEKLEDTVKHHPHFLTHKLADQRTRKSLGRGEFRLLHYAGEVTYSVTGFLDKNNDLLFRNLKETMCSSKNPIMSQCFDRSELSDKKRPETVATQFKMSLLQLVEILQSKEPAYVRCIKPNDAKQPGRFDEVLIRHQVKYLGLLENLRVRRAGFAYRRKYEAFLQRYKSLCPETWPTWAGRPQDGVAVLVRHLGYKPEEYKMGRTKIFIRFPKTLFATEDALEVRRQSLATKIQAAWRGFHWRQKFLRVKRSAICIQSWWRGTLGRRKAAKRKWAAQTIRRLIRGFVLRHAPRCPENAFFLDHVRTSFLLNLRRQLPQNVLDTSWPTPPPALREASELLRELCIKNMVWKYCRSISPEWKQQLQQKAVASEIFKGKKDNYPQSVPRLFISTRLGTDEISPRVLQALGSEPIQYAVPVVKYDRKGYKPRSRQLLLTPNAVVIVEDAKVKQRIDYANLTGISVSSLSDSLFVLHVQRADNKQKGDVVLQSDHVIETLTKTALSANRVNSININQGSITFAGGPGRDGTIDFTPGSELLITKAKNGHLAVVAPRLNSR

SEQ ID NO: 37101 - DNA, 3135 bp, Artificial Sequence
  derived and/or modified sequence
atgcggtacagagcctccgcccttggctcagacggcgtgagggtgaccatggagagcgcactgaccgcgcgagacagggtgggggtgcaggactttgtgctgttggagaattttacctcagaagcggcttttattgagaatctcaggcggaggtttcgggagaacttgatctatacatacatcggcccagtgttagtcagcgtgaatccgtatcgggatctgcaaatatatagtcgtcagcatatggagaggtatagaggcgtgagtttctatgaagtgcccccacacctgttcgccgtcgccgataccgtctacagagcactccggacagagcgcagagaccaggctgtaatgatctcaggcgaatcaggcgcaggcaaaacagaggccactaagagactcctccagttttacgccgagacttgcccagcgccggaacggggcggcgcagtgcgggatcgtctgcttcagtccaacccggtgctcgaagcattcggaaacgccaaaaccctgcggaatgacaattcttcaagattcggaaaatatatggacgtccaattcgattttaagggcgccccagtgggcggacacattttgagctatcttctcgagaagtctagggtcgtgcaccagaaccatggcgagagaaactttcatatcttttatcagctcctggaagggggggaggaggagaccctgcggcggctcggactggagcggaatccacaaagctacctctacctggtaaaggggcagtgtgctaaggtctctagtataaacgacaaatccgactggaaggtggtgaggaaagccctgacagtcatcgatttcactgaggatgaagtggaagaccttcttagtattgtcgcaagcgtcttacacttaggtaatatccattttgccgcaaatgaggagtctaacgctcaggtgacaactgagaaccagcttaaatatcttaccaggttactgagcgtggagggttccacgctgagagaagctttgacccatagaaaaattatcgcaaaaggagaggagctacttagtcccttgaatctagaacaggcagcatacgccagagacgcgctggccaaggctgtctacagtcggacttttacttggcttgtgggaaaaattaatcgctcactagcctctaaagacgtggagtctccctcatggaggagcacaacagtgctcggcctgctggacatttatgggttcgaggtctttcagcacaattcattcgagcaattctgcataaactactgcaatgaaaagcttcaacagttgttcatagagttaaccctgaaatcagagcaggaagaatacgaagccgaggggatagcatgggagccagttcagtattttaataacaagatcatttgcgatttagtggaggagaagtttaagggtattatctccattctcgacgaagagtgcttgaggcctggagaagccaccgacctgaccttcctggagaagctggaagacactgtcaagcaccacccgcattttctgactcataaactggccgaccagcgaactcgcaagtctctcggccggggcgagttccggctgcttcattacgccggcgaggttacgtatagtgtgactggctttcttgataagaataatgatctgctgtttcgcaacctcaaggagaccatgtgctctagcaaaaatccaatcatgtcccagtgttttgacagaagcgagctgtccgacaagaagagaccagagactgttgctactcagtttaaaatgagccttttgcaattggtggagattctccagtctaaagaacccgcctacgtaaggtgcattaagccgaatgacgctaagcagcccgggaggtttgatgaagtactgattagacaccaggtgaaatacctgggactgctcgagaacttaagagtacgccgcgccgggtttgcatatagaaggaagtacgaagcatttctccaacgctataagtccctgtgccctgaaacgtggcctacgtgggctggaaggccacaagacggtgttgccgtcttggtacgacatttgggatataagccagaggagtataagatgggacgaaccaaaatcttcattaggttcccaaagacacttttcgccaccgaagatgccctagaggtaaggcgccagagcttagccacgaaaattcaggctgcctggaggggcttccattggcggcaaaagttcctccgggtgaaaagatctgcaatttgcatccagagttggtggagggggactttagggcggaggaaagccgcgaaacgaaaatgggctgctcagacgatcagacgtcttatccgcggttttgtactgcggcacgctccaagatgccctgagaacgctttttttctggaccatgttcggacaagtttcttactgaatcttaggcggcagctcccacagaatgtcctagacacgagctggcccacacctccgccagcactgagggaggcttccgaactcctcagagagctgtgcatcaaaaacatggtatggaagtattgtaggtctatctctcccgagtggaaacagcagctgcagcagaaggccgtcgcttcagaaattttcaaagggaagaaggacaactacccgcagtcagtcccaaggttgtttatctctactaggttgggcacagatgagataagtcctcgagtactccaggcgctcggaagcgagccaatccagtatgcagtgcccgtggtgaagtacgaccgaaagggctataagccgaggagtcggcagctgctgttgactccaaatgcagttgtgatcgtagaagacgcaaaagtgaagcagagaatcgactatgccaatctgaccgggattagcgtgagtagcttatctgactccctatttgtactgcacgttcagagggccgataacaaacaaaagggtgacgtcgtgctgcagagtgatcatgtgattgaaactctgactaaaaccgcgctaagcgccaatcgggtaaactctattaatatcaatcagggatctattaccttcgcgggcggacctggacgcgacggaactatcgattttacacctggcagcgagctgttgataacgaaagcaaagaacgggcacttagcggtcgttgcgccacggctaaattctcggtag

SEQ ID NO: 37102 - DNA, 3135 bp, Artificial Sequence
  derived and/or modified sequence
atgcgcggtcgcgctagcgcactcggctctgatggtgtgagagtgacgatggaatcagctttaactgcaagagatcgcgtgggggttcaggacttcgtcctgctggaaaactttactagtgaagccgcctttatcgaaaacctgcggcgcagatttcgcgagaatttgatttacacttacatcggtcccgtcctagtgagtgtcaacccttatcgggatctgcagatttattctcgccagcacatggagcgctataggggggttagtttttatgaggtcccaccacatctattcgccgtggctgatactgtttaccgggcgctgaggactgagcgcagggaccaagccgtaatgatttctggagaatcaggcgctggcaaaactgaagctaccaagcgtctgcttcaattttacgcagagacatgccctgctcctgagcgcggaggcgctgtccgagataggctacttcagtcgaatcccgtactggaggccttcggcaatgctaagaccctgcgcaatgataattcatctaggttcgggaaatacatggacgtgcaatttgactttaaaggtgcccctgtggggggacacatccttagctatcttctggaaaaatcccgcgtggtccatcaaaatcacggagagcgtaactttcatatcttttatcagcttctggaagggggtgaggaggagaccctgagacgactcggcttggaaaggaatccacaaagttacttgtatttggtaaaaggacagtgtgccaaagtcagctccattaatgataaatctgattggaaggtggtccgtaaggcccttaccgtgatagatttcactgaagatgaggtggaagacctcctgtcaatcgtcgctagcgtgctacatttgggaaatattcattttgcagccaacgaagagagtaacgctcaggttaccacagagaaccaattgaagtacctgactcgcctgctgagcgtggaaggttccactcttcgcgaagctctgacgcaccgaaagataattgcaaaaggagaagagcttctgagtccattgaatctggagcaagccgcttatgctcgggacgctctggcaaaggccgtctacagcagaaccttcacttggctggttggcaagattaatagatctcttgctagcaaagacgttgagtcaccctcttggaggagcacgacggtgctgggcttactcgacatctacggattcgaggtgtttcagcataatagcttcgagcagttctgcatcaactattgcaatgagaaactacagcagcttttcatcgaactgacactcaaaagcgaacaagaagagtacgaggccgaaggcatcgcatgggagccagtgcagtacttcaataataaaattatatgcgatctggtcgaagaaaagttcaaaggaattatatccatacttgatgaagagtgcttgaggccaggcgaggccacagacttaacctttctggaaaagctcgaagatacggttaagcatcaccctcattttctgacacataaactcgcggatcagagaactcggaaatctctggggcgaggcgaatttcggcttcttcactatgccggtgaggttacctattcagtgaccggcttcctggataaaaacaacgatctgttgtttaggaacctcaaagagacaatgtgtagttccaagaatcctattatgagccagtgctttgaccggagtgagctttcagataaaaagaggccagagacagtggccacacagttcaagatgtccctcctgcaactcgtcgaaattctgcagtctaaagaacctgcatacgttcggtgtattaagccaaacgacgccaagcagcctggaagattcgatgaagtgttgattcgccatcaagttaagtacttgggcttattggagaatctgcgcgtcaggcgagccggctttgcctatcggcggaaatacgaggcatttctgcagcgctacaaatccctgtgccccgaaacttggcctacctgggctggaagaccccaagacggagtcgcagtcttggtgagacatctgggctataaacctgaggaatataagatgggcagaactaagatctttatacggtttccaaaaaccttgttcgctacggaggacgccctcgaggtgcgaaggcagtccttggctacaaagatacaagccgcctggcggggtttccactggcgacaaaaattcttgcgcgtaaaaaggtccgctatatgcattcagagctggtggcgagggactctaggccgtcgaaaggcagcaaagaggaagtgggcagcgcagacaattagaagactgattagagggttcgtgcttcgacatgccccacgttgtcccgagaatgctttttttttagatcatgtgcgaacaagcttcctcctcaatctgcgccggcagttaccacaaaacgtgctggatacgagttggcccactcctcctccagctctgcgggaggctagtgagcttctgcgggaactgtgtataaagaatatggtttggaagtactgtcggagtattagccctgagtggaagcagcagttacaacagaaggctgtggcgtcagagatattcaaggggaagaaggataactaccctcagtccgtcccaaggttatttatctcaactcgtttagggacggacgagatatctcctagagtcctgcaggctttggggagtgagccgatccagtatgccgttcccgtggtaaaatacgatcgaaaagggtacaagccaaggagccgccagttactgctgacaccaaacgctgtagtgatagtagaagacgcaaaggtgaaacaacggatcgattatgcgaacctgaccgggatttctgtgagttccctgagcgattcccttttcgtgctgcatgtgcaaagggctgataacaaacagaagggggacgttgtgctgcagtcagaccatgtcatcgaaacgttgaccaagaccgccttatccgccaatagggtcaattccataaatattaatcaaggcagcattaccttcgctggcggtccgggccgggacggcacaatcgactttacacctggaagcgagctactaatcaccaaggcgaagaatggacacctggctgtcgtagcacctaggttaaatagccggtag

SEQ ID NO: 37103 - DNA, 3135 bp, Artificial Sequence
  derived and/or modified sequence
atgagataccgggccagcgccctgggcagtgatggagtgcgggtgaccatggagagcgccctgacagcccgggacagagtgggcgtgcaggactttgtgctgctggagaacttcaccagcgaggccgccttcatcgagaacctgcggcggcgcttccgggagaacctgatctacacctacatcggccctgtgctggtgtctgtgaacccctacagagacctgcagatctacagccggcagcacatggagcgctacagaggagtgtccttctatgaggtgcccccccacctgtttgctgtggccgacacagtgtaccgggccctgaggacagagcggcgggaccaggccgtgatgatcagcggggagagcggggccggcaagacagaggccaccaagaggctgctgcagttctatgcagagacctgcccagcccctgagcggggcggcgctgtgcgggaccggctgctgcagagcaaccctgtgctggaggcctttggaaatgccaagaccctgagaaatgacaacagcagcagatttgggaagtacatggatgtgcagtttgacttcaagggggcccctgtgggcggccacatcctgagctacctgctggagaagagccgggtggtgcaccagaaccacggggagaggaacttccacatcttctaccagctgctggagggcggggaggaggagaccctgcggcggctgggcctggagaggaacccccagagctacctgtacctggtgaagggccagtgtgccaaggtgagcagcatcaatgacaagagtgactggaaggtggtgaggaaggccctgactgtgattgacttcacagaagatgaggtggaggacctgctgagcatcgtggcctctgtgctgcacctgggcaacatccactttgctgccaatgaggagagcaatgcccaggtgaccacagagaaccagctgaagtacctgacccggctgctgtctgtggagggcagcaccctgcgggaggccctgacccacaggaagatcatcgccaagggggaggagctgctgagccccctgaacctggagcaggccgcctatgccagagatgccctggccaaggctgtgtacagcaggaccttcacctggctggtgggcaagatcaacagaagcctggccagcaaggatgtggagagccccagctggaggagcaccaccgtgctgggcctgctggacatctacggctttgaggtgttccagcacaacagctttgagcagttctgcatcaactactgcaatgagaagctgcagcagctgttcatcgagctgaccctgaagtctgagcaggaggagtatgaggccgagggcatcgcctgggagcctgtgcagtacttcaacaacaagatcatctgtgacctggtggaggagaagttcaagggcatcatcagcatcctggatgaggagtgcctgcggcctggagaggccacagacctgaccttcctggagaagctggaggacacagtgaagcaccacccccacttcctgacccacaagctggccgaccagaggaccaggaagagcctgggccgcggggagttccggctgctgcactacgccggggaggtgacctacagcgtgacaggcttcctggacaagaacaatgacctgctcttcaggaacctgaaggagaccatgtgcagcagcaagaaccccatcatgagccagtgctttgacagaagtgagctgagtgacaagaagaggcctgagaccgtggccacccagttcaagatgagcctgctgcagctggtggagatcctgcagagcaaggagcccgcctacgtgcgctgcatcaagcccaatgatgccaagcagcccggccgctttgatgaggtgctgatccgccaccaggtgaagtacctgggcctgctggagaacctgcgggtgagaagagctggctttgcctacagaagaaaatatgaggccttcctgcagcgctacaagagcctgtgcccagagacctggcccacctgggccggccggccccaggatggagtggccgtgctggtgcgccacctgggctacaagccagaggagtacaagatgggccgcaccaagatcttcatccgcttccccaagaccctgtttgccacagaagatgccctggaggtgcggcggcagagcctggccaccaagatccaggccgcctggaggggcttccactggaggcagaagttcctgcgggtgaagaggtctgccatctgcatccagagctggtggaggggcaccctgggccgcaggaaggccgccaagaggaagtgggccgcccagaccatcagaagactcatccggggctttgtgctgcggcatgccccccgctgcccagaaaatgccttcttcctggaccacgtgaggaccagcttcctgctgaacctgcggcggcagctgccccagaatgtgctggacacctcctggcccaccccacctccagccctgcgggaggccagcgagctgctgcgggagctgtgcatcaagaacatggtgtggaagtactgccgcagcatcagccctgagtggaagcagcagctgcagcagaaggctgtggccagcgagatcttcaagggcaagaaggacaactacccccagagcgtgcccaggctcttcatcagcacccggctgggcacagatgagatcagcccccgggtgctgcaggccctgggcagcgagcccatccagtatgctgtgcctgtggtgaagtatgacaggaagggctacaagcccaggagccggcagctgctgctgaccccaaatgctgtggtgattgtggaggatgccaaggtgaagcagagaattgattatgccaacctgaccggcatctctgtgagcagcctgagtgacagcctgtttgtgctgcacgtgcagagagctgacaacaagcagaagggagatgtggtgctgcagagcgaccacgtgattgagaccctgaccaagacagccctgagcgccaacagagtgaacagcatcaacatcaaccagggcagcatcacctttgctgggggccctggaagagatggcaccatcgacttcaccccaggcagcgagctgctgatcaccaaggccaagaatggccacctggccgtggtggccccccggctgaacagcaggtag

SEQ ID NO: 37104 - DNA, 3135 bp, Artificial Sequence
  derived and/or modified sequence
atgaggggccgggccagcgccctgggcagtgatggagtgcgggtgaccatggagagcgccctgacagcccgggacagagtgggcgtgcaggactttgtgctgctggagaacttcaccagcgaggccgccttcatcgagaacctgcggcggcgcttccgggagaacctgatctacacctacatcggccctgtgctggtgtctgtgaacccctacagagacctgcagatctacagccggcagcacatggagcgctacagaggagtgtccttctatgaggtgcccccccacctgtttgctgtggccgacacagtgtaccgggccctgaggacagagcggcgggaccaggccgtgatgatcagcggggagagcggggccggcaagacagaggccaccaagaggctgctgcagttctatgcagagacctgcccagcccctgagcggggcggcgctgtgcgggaccggctgctgcagagcaaccctgtgctggaggcctttggaaatgccaagaccctgagaaatgacaacagcagcagatttgggaagtacatggatgtgcagtttgacttcaagggggcccctgtgggcggccacatcctgagctacctgctggagaagagccgggtggtgcaccagaaccacggggagaggaacttccacatcttctaccagctgctggagggcggggaggaggagaccctgcggcggctgggcctggagaggaacccccagagctacctgtacctggtgaagggccagtgtgccaaggtgagcagcatcaatgacaagagtgactggaaggtggtgaggaaggccctgactgtgattgacttcacagaagatgaggtggaggacctgctgagcatcgtggcctctgtgctgcacctgggcaacatccactttgctgccaatgaggagagcaatgcccaggtgaccacagagaaccagctgaagtacctgacccggctgctgtctgtggagggcagcaccctgcgggaggccctgacccacaggaagatcatcgccaagggggaggagctgctgagccccctgaacctggagcaggccgcctatgccagagatgccctggccaaggctgtgtacagcaggaccttcacctggctggtgggcaagatcaacagaagcctggccagcaaggatgtggagagccccagctggaggagcaccaccgtgctgggcctgctggacatctacggctttgaggtgttccagcacaacagctttgagcagttctgcatcaactactgcaatgagaagctgcagcagctgttcatcgagctgaccctgaagtctgagcaggaggagtatgaggccgagggcatcgcctgggagcctgtgcagtacttcaacaacaagatcatctgtgacctggtggaggagaagttcaagggcatcatcagcatcctggatgaggagtgcctgcggcctggagaggccacagacctgaccttcctggagaagctggaggacacagtgaagcaccacccccacttcctgacccacaagctggccgaccagaggaccaggaagagcctgggccgcggggagttccggctgctgcactacgccggggaggtgacctacagcgtgacaggcttcctggacaagaacaatgacctgctcttcaggaacctgaaggagaccatgtgcagcagcaagaaccccatcatgagccagtgctttgacagaagtgagctgagtgacaagaagaggcctgagaccgtggccacccagttcaagatgagcctgctgcagctggtggagatcctgcagagcaaggagcccgcctacgtgcgctgcatcaagcccaatgatgccaagcagcccggccgctttgatgaggtgctgatccgccaccaggtgaagtacctgggcctgctggagaacctgcgggtgagaagagctggctttgcctacagaagaaaatatgaggccttcctgcagcgctacaagagcctgtgcccagagacctggcccacctgggccggccggccccaggatggagtggccgtgctggtgcgccacctgggctacaagccagaggagtacaagatgggccgcaccaagatcttcatccgcttccccaagaccctgtttgccacagaagatgccctggaggtgcggcggcagagcctggccaccaagatccaggccgcctggaggggcttccactggaggcagaagttcctgcgggtgaagaggtctgccatctgcatccagagctggtggaggggcaccctgggccgcaggaaggccgccaagaggaagtgggccgcccagaccatcagaagactcatccggggctttgtgctgcggcatgccccccgctgcccagaaaatgccttcttcctggaccacgtgaggaccagcttcctgctgaacctgcggcggcagctgccccagaatgtgctggacacctcctggcccaccccacctccagccctgcgggaggccagcgagctgctgcgggagctgtgcatcaagaacatggtgtggaagtactgccgcagcatcagccctgagtggaagcagcagctgcagcagaaggctgtggccagcgagatcttcaagggcaagaaggacaactacccccagagcgtgcccaggctcttcatcagcacccggctgggcacagatgagatcagcccccgggtgctgcaggccctgggcagcgagcccatccagtatgctgtgcctgtggtgaagtatgacaggaagggctacaagcccaggagccggcagctgctgctgaccccaaatgctgtggtgattgtggaggatgccaaggtgaagcagagaattgattatgccaacctgaccggcatctctgtgagcagcctgagtgacagcctgtttgtgctgcacgtgcagagagctgacaacaagcagaagggagatgtggtgctgcagagcgaccacgtgattgagaccctgaccaagacagccctgagcgccaacagagtgaacagcatcaacatcaaccagggcagcatcacctttgctgggggccctggaagagatggcaccatcgacttcaccccaggcagcgagctgctgatcaccaaggccaagaatggccacctggccgtggtggccccccggctgaacagcaggtag

SEQ ID NO: 37105 - DNA, 4719 bp, Artificial Sequence
  derived and/or modified sequence
acccggagcgcgggcagcggagcgggcgccaggccggccgggcaggatgcgctaccgggcgtcggccctgggcagtgacggggttcgggtgaccatggagagtgcgctcaccgcccgtgaccgggtgggggtgcaggatttcgtgctgctggagaacttcaccagcgaggccgccttcatcgagaacctgcggcggcgatttcgggagaatctcatctacacctacattggccccgtcctggtctctgtcaatccctaccgggacctgcagatctacagccggcagcatatggagcgttaccgtggcgtcagcttctatgaagtgccccctcacctgtttgccgtggcggacactgtgtaccgagcactgcgcacggagcgtcgggaccaggctgtgatgatctctggggagagcggggcaggcaagaccgaggccaccaagaggctgctgcagttctatgcagagacctgcccagcccccgagcgcggaggtgccgtgcgggaccggctgctacagagcaacccggtgctggaggcctttggaaatgccaagaccctccggaacgataactccagcaggttcgggaagtacatggatgtgcagtttgacttcaagggtgcccccgtgggtggccacatcctcagttacctcctggaaaagtcacgagtggtgcaccagaatcatggggagcggaacttccacatcttctaccagctgctggaggggggtgaggaggagactcttcgcaggctgggcttggaacggaacccccagagctacctgtacctggtgaagggccagtgtgccaaagtctcctccatcaacgacaagagtgactggaaggtcgtcaggaaggctctgacagtcattgatttcaccgaggatgaagtggaggacctgctgagcatcgtggccagcgtccttcatttgggcaacatccactttgctgccaacgaggagagcaatgcccaggtcaccaccgagaaccagctcaagtatctgaccaggctcctcagcgtggaaggctcgacgctgcgagaagccctgacacacaggaagatcatcgccaagggggaggagctcctgagcccgctgaacctggagcaggccgcgtacgcacgagacgccctcgccaaggctgtgtacagccgcacttttacctggctcgtcgggaagatcaacaggtcgctggcctccaaggacgtggagagccccagctggcggagcaccacggttctcgggctcctggatatttatggctttgaagtgtttcagcataacagctttgagcagttctgcatcaattactgcaacgagaagctgcagcagctcttcatcgagctcacgctcaagtcggagcaggaggagtacgaggcagagggcatcgcgtgggagcccgtccagtatttcaacaacaaaatcatctgtgatctggtggaggagaagtttaagggcatcatctcgattttggatgaggagtgtctgcgccccggggaggccacagacctgaccttcctggagaagctggaggatactgtcaagcaccatccacacttcctgacgcacaagctggctgaccagcggaccaggaaatctctgggccgaggggaattccgccttctgcactatgcgggggaggtgacctacagcgtgaccgggtttctggacaaaaacaatgaccttctcttccggaaccttaaggagaccatgtgtagctcaaagaatcccattatgagccagtgctttgaccggagcgagctcagtgacaagaagcggccagagacggtcgccacccagttcaagatgagcctcctgcagctggtggagatcctgcagtctaaggagcccgcctacgtccgctgcatcaaacccaatgatgccaaacagcccggccgctttgacgaggtgctgatccgccaccaggtgaagtacctggggctgttggaaaacctgcgcgtgcgcagagccggctttgcctatcgccgcaaatacgaagctttcctgcaaaggtacaagtcactgtgcccagagacgtggcccacgtgggcaggacggccgcaggatggggtggctgtgctggtccgacacctgggctacaagccagaagagtacaagatgggcaggaccaagatcttcatccgcttccccaagaccctgtttgccacagaggatgccctggaggtccggcggcagagcctggccacaaagatccaagctgcctggaggggctttcactggcggcagaaattcctccgggtgaagagatcagccatctgcatccagtcgtggtggcgtggaacactgggccggaggaaggcagccaagaggaagtgggcggcacagaccatccggcggctcatccgaggcttcgtcctgcgccacgccccccgctgccccgagaacgccttcttcctggaccatgtgcgcacctcttttttgctaaacctgaggcggcagctgccccagaatgtcctggacacctcgtggcccacgcccccacctgccctgcgtgaggcctcagagcttctgcgggagttgtgcataaagaacatggtgtggaaatactgccggagtatcagccctgagtggaagcagcagctgcagcagaaggccgtggctagtgagatcttcaagggcaagaaggataattaccctcagagtgtacccaggctcttcatcagcactcggcttggtacagatgagatcagcccccgagtgctgcaggccttgggctctgagcccattcagtatgcggtgcctgttgtgaaatacgaccgcaagggctacaagcctcgctcccggcagctgctgctcacgcccaacgccgtcgtcatcgtggaggacgccaaagtcaagcagaggattgattacgccaacctgaccggaatctctgtcagcagcctgagcgacagtctttttgtgcttcatgtacagcgtgcggacaataagcaaaagggagatgtggtgctgcagagtgaccacgtgattgagacgctgaccaagacagccctcagtgccaaccgcgtgaacagcatcaacatcaaccagggcagcatcacgtttgcagggggccccggcagggatggcaccattgacttcacacccggctcggagctgctcatcaccaaggccaagaacgggcacctggctgtggtcgccccacggctgaattctcggtgataaaggcgcccactggaccctcccaacgcccaatgctttgcttttctcctcctccccttcccagttaccaaagactcgaacttccagacagggacccagggacaccccgaagcccacctgcaatctcccacctcctgcccatccctctcttgagggagcagcaggggccaggagctaccccaggagtgggccaggccgggccacagcaataggaaagccagggccagagcgagccatgccagccctactgccgatgccaaatatttgagagaagggaacttttgctgaggttttctctgaggtttttttgatgctttataggaaactattttttaaaaaaagccatttcccacccaaggacacagtggatgtgttttccctgactccagcagggcaaggaatgtagccgagaggttgtgtgggctgggctctggtgccctcttccctggccaggacacctctcctcctgattcccttggcaccttgtctttctgtctgtttacctgtctccctgcctgcccatctgcatcttttgcagcccactctgacttccatctgggggctgagaccacccttgcctgcccccttctttctgccttaagaatgtccttttaggctgggcatggtggctcacgcctgtaaccccagcactttgggaggcggagacgggcagataacctgaggtcaggatttcgagaccaacctgacctacatggagaaactccgcctctagtaaaaatacaaaattagccgggcatggtggtgcacgcctctaatcccagctactcgggaggctgaggcaggagaatcacttgaacccgggaagtggaggttgcagtgagccaagagtacaccactgcactccagcctgggcaacagagcgagactccgtcttaaaaaaaaaaaaaaagaacgcccttttactgtcctcatcatcccagtttgaggcagtgctggagtggggaaggccgtcttagaccatagaggttggaagacgctgagagatcatccagcccagccccttgatgttacagagcagaagacagatgcccaaacaggagaaggcacttgcccacggtcatacggcaggttgccacaaaaccaagatggcagcccttcctcagcgtgcctcactgccactcccagagccagggagccccataaaacccacatcatgtcttaagagtatatctggctccttgaccagcaatcggccctgggagccaccaggtgggaaaagcgcctctgccagagtccaggccttgggatgacagacagcttgcccgcacactcgggccccactcaaggatgtagggccttttctggcccctgacccctccctggcatgggagcgtggggacggggctggccttgggaggagcggcaggggcatcacctccttctgctgcttctccctgctcctaccctcaagggcctgggggctgcccagctgcctctatgcccttctgggggtctcagcccactgctgacacttctgcaatccagagaaacactaaataaagcaatacgtgtttgcc

SEQ ID NO: 37106 - DNA, 4673 bp, Artificial Sequence
  derived and/or modified sequence
atgcgagggagggcctccgccctgggcagtgacggggttcgggtgaccatggagagtgcgctcaccgcccgtgaccgggtgggggtgcaggatttcgtgctgctggagaacttcaccagcgaggccgccttcatcgagaacctgcggcggcgatttcgggagaatctcatctacacctacattggccccgtcctggtctctgtcaatccctaccgggacctgcagatctacagccggcagcatatggagcgttaccgtggcgtcagcttctatgaagtgccccctcacctgtttgccgtggcggacactgtgtaccgagcactgcgcacggagcgtcgggaccaggctgtgatgatctctggggagagcggggcaggcaagaccgaggccaccaagaggctgctgcagttctatgcagagacctgcccagcccccgagcgcggaggtgccgtgcgggaccggctgctacagagcaacccggtgctggaggcctttggaaatgccaagaccctccggaacgataactccagcaggttcgggaagtacatggatgtgcagtttgacttcaagggtgcccccgtgggtggccacatcctcagttacctcctggaaaagtcacgagtggtgcaccagaatcatggggagcggaacttccacatcttctaccagctgctggaggggggtgaggaggagactcttcgcaggctgggcttggaacggaacccccagagctacctgtacctggtgaagggccagtgtgccaaagtctcctccatcaacgacaagagtgactggaaggtcgtcaggaaggctctgacagtcattgatttcaccgaggatgaagtggaggacctgctgagcatcgtggccagcgtccttcatttgggcaacatccactttgctgccaacgaggagagcaatgcccaggtcaccaccgagaaccagctcaagtatctgaccaggctcctcagcgtggaaggctcgacgctgcgagaagccctgacacacaggaagatcatcgccaagggggaggagctcctgagcccgctgaacctggagcaggccgcgtacgcacgagacgccctcgccaaggctgtgtacagccgcacttttacctggctcgtcgggaagatcaacaggtcgctggcctccaaggacgtggagagccccagctggcggagcaccacggttctcgggctcctggatatttatggctttgaagtgtttcagcataacagctttgagcagttctgcatcaattactgcaacgagaagctgcagcagctcttcatcgagctcacgctcaagtcggagcaggaggagtacgaggcagagggcatcgcgtgggagcccgtccagtatttcaacaacaaaatcatctgtgatctggtggaggagaagtttaagggcatcatctcgattttggatgaggagtgtctgcgccccggggaggccacagacctgaccttcctggagaagctggaggatactgtcaagcaccatccacacttcctgacgcacaagctggctgaccagcggaccaggaaatctctgggccgaggggaattccgccttctgcactatgcgggggaggtgacctacagcgtgaccgggtttctggacaaaaacaatgaccttctcttccggaaccttaaggagaccatgtgtagctcaaagaatcccattatgagccagtgctttgaccggagcgagctcagtgacaagaagcggccagagacggtcgccacccagttcaagatgagcctcctgcagctggtggagatcctgcagtctaaggagcccgcctacgtccgctgcatcaaacccaatgatgccaaacagcccggccgctttgacgaggtgctgatccgccaccaggtgaagtacctggggctgttggaaaacctgcgcgtgcgcagagccggctttgcctatcgccgcaaatacgaagctttcctgcaaaggtacaagtcactgtgcccagagacgtggcccacgtgggcaggacggccgcaggatggggtggctgtgctggtccgacacctgggctacaagccagaagagtacaagatgggcaggaccaagatcttcatccgcttccccaagaccctgtttgccacagaggatgccctggaggtccggcggcagagcctggccacaaagatccaagctgcctggaggggctttcactggcggcagaaattcctccgggtgaagagatcagccatctgcatccagtcgtggtggcgtggaacactgggccggaggaaggcagccaagaggaagtgggcggcacagaccatccggcggctcatccgaggcttcgtcctgcgccacgccccccgctgccccgagaacgccttcttcctggaccatgtgcgcacctcttttttgctaaacctgaggcggcagctgccccagaatgtcctggacacctcgtggcccacgcccccacctgccctgcgtgaggcctcagagcttctgcgggagttgtgcataaagaacatggtgtggaaatactgccggagtatcagccctgagtggaagcagcagctgcagcagaaggccgtggctagtgagatcttcaagggcaagaaggataattaccctcagagtgtacccaggctcttcatcagcactcggcttggtacagatgagatcagcccccgagtgctgcaggccttgggctctgagcccattcagtatgcggtgcctgttgtgaaatacgaccgcaagggctacaagcctcgctcccggcagctgctgctcacgcccaacgccgtcgtcatcgtggaggacgccaaagtcaagcagaggattgattacgccaacctgaccggaatctctgtcagcagcctgagcgacagtctttttgtgcttcatgtacagcgtgcggacaataagcaaaagggagatgtggtgctgcagagtgaccacgtgattgagacgctgaccaagacagccctcagtgccaaccgcgtgaacagcatcaacatcaaccagggcagcatcacgtttgcagggggccccggcagggatggcaccattgacttcacacccggctcggagctgctcatcaccaaggccaagaacgggcacctggctgtggtcgccccacggctgaattctcggtgataaaggcgcccactggaccctcccaacgcccaatgctttgcttttctcctcctccccttcccagttaccaaagactcgaacttccagacagggacccagggacaccccgaagcccacctgcaatctcccacctcctgcccatccctctcttgagggagcagcaggggccaggagctaccccaggagtgggccaggccgggccacagcaataggaaagccagggccagagcgagccatgccagccctactgccgatgccaaatatttgagagaagggaacttttgctgaggttttctctgaggtttttttgatgctttataggaaactattttttaaaaaaagccatttcccacccaaggacacagtggatgtgttttccctgactccagcagggcaaggaatgtagccgagaggttgtgtgggctgggctctggtgccctcttccctggccaggacacctctcctcctgattcccttggcaccttgtctttctgtctgtttacctgtctccctgcctgcccatctgcatcttttgcagcccactctgacttccatctgggggctgagaccacccttgcctgcccccttctttctgccttaagaatgtccttttaggctgggcatggtggctcacgcctgtaaccccagcactttgggaggcggagacgggcagataacctgaggtcaggatttcgagaccaacctgacctacatggagaaactccgcctctagtaaaaatacaaaattagccgggcatggtggtgcacgcctctaatcccagctactcgggaggctgaggcaggagaatcacttgaacccgggaagtggaggttgcagtgagccaagagtacaccactgcactccagcctgggcaacagagcgagactccgtcttaaaaaaaaaaaaaaagaacgcccttttactgtcctcatcatcccagtttgaggcagtgctggagtggggaaggccgtcttagaccatagaggttggaagacgctgagagatcatccagcccagccccttgatgttacagagcagaagacagatgcccaaacaggagaaggcacttgcccacggtcatacggcaggttgccacaaaaccaagatggcagcccttcctcagcgtgcctcactgccactcccagagccagggagccccataaaacccacatcatgtcttaagagtatatctggctccttgaccagcaatcggccctgggagccaccaggtgggaaaagcgcctctgccagagtccaggccttgggatgacagacagcttgcccgcacactcgggccccactcaaggatgtagggccttttctggcccctgacccctccctggcatgggagcgtggggacggggctggccttgggaggagcggcaggggcatcacctccttctgctgcttctccctgctcctaccctcaagggcctgggggctgcccagctgcctctatgcccttctgggggtctcagcccactgctgacacttctgcaatccagagaaacactaaataaagcaatacgtgtttgcc

SEQ ID NO: 37107 - DNA, 3135 bp, Artificial Sequence
  derived and/or modified sequence
atgcggtaccgggccagcgccctgggcagcgacggcgtgcgggtgactatggagagtgctttgacagccagggacagggtaggggtccaagacttcgtgctactcgaaaatttcacgagcgaagcggccttcatcgagaacctccgaaggcggttcagagagaatcttatttacacatatattggtcctgtgctcgtgagtgtaaatccatatagggatctgcagatctatagtcgccagcacatggaacgatatagaggggtttcattctatgaggtgccacctcatctcttcgccgttgccgacactgtgtaccgcgccctgcgcaccgaacgacgggaccaggcagtaatgattagtggagaaagcggggccgggaaaacagaggctacaaaacgcctcttacagttttacgctgagacgtgtcctgctcccgaaaggggcggagcggttagagatagacttcttcagtcgaatcccgtgcttgaagccttcggcaacgccaagacattaagaaatgataactcatctagattcggcaaatatatggatgttcagtttgacttcaagggcgccccagtgggcgggcatatcctgagttacctgctggagaagagcagggtcgtgcatcaaaaccacggggagagaaactttcacatcttctatcagcttctggaagggggcgaggaggaaacactcaggaggctggggttggagcggaacccacagagttacctctacctagtaaaaggccagtgtgctaaggttagctctatcaacgataaatccgactggaaggtggtaagaaaagcgctcaccgtcatagactttacagaggacgaggtagaggatctgctgtccatagtagcctccgtccttcatctcggcaacatacactttgccgctaacgaggaatcaaatgcacaggtgacaactgaaaaccagctgaagtacctgacacgactgctgtctgtcgaaggaagcaccctgagggaagctttaactcatcgcaaaataatcgccaagggtgaggaactcctctctcctttgaatctggagcaagccgcctatgcccgagacgcgctggccaaggctgtctactctcgaacttttacttggctcgtgggcaaaattaacagaagcttagctagcaaggacgtggagtccccttcttggaggtcaaccactgttttggggctgctcgacatttatggtttcgaggtgtttcagcacaatagcttcgaacaattttgcatcaattattgtaatgaaaaactgcagcagctgttcatcgagttaacccttaaatctgaacaagaggagtatgaggctgaggggattgcttgggaacccgtgcagtacttcaacaacaaaattatttgtgatctcgtggaagagaagtttaagggcatcatcagcatattggatgaggagtgtctaaggcccggggaagccaccgatctcacattcctggagaagctggaagatacggtgaaacaccatcctcacttccttacacataaactggcagaccagcgaaccagaaagtctttgggacgtggagagttccggctgcttcactatgctggcgaggtaacatactccgtaacaggatttcttgacaaaaataacgatctgctgttccgaaatctcaaggaaaccatgtgtagctcgaagaacccaatcatgtcacagtgttttgaccgaagtgaactgagcgacaaaaagaggcccgagactgttgcaactcagtttaagatgtctttgctccagctggtggaaatcctgcagtctaaagaacccgcctacgtgcgctgtattaagcccaacgatgcgaaacaacccggcaggtttgacgaagtactgatccggcatcaggtgaaatacctagggctgttggaaaatttaagggtgcgacgcgcagggtttgcataccggcggaaatatgaggccttcctgcagcgttacaaatctctgtgtcctgaaacttggcccacatgggcagggcgaccccaggacggtgtggctgtccttgttagacacctggggtataagcctgaagaatacaaaatgggcaggaccaaaatcttcatccggttcccaaaaacactgttcgccactgaagatgccctcgaggtgcggagacagtcactggccaccaagatccaggctgcctggcgcggattccactggcgacagaagtttttaagggtaaaacggtctgcaatctgcattcaatcttggtggagaggtacattggggcgcaggaaggctgctaagaggaagtgggcagcccagacaatccgaagactgattcgaggattcgtcttgaggcacgcaccccggtgtcctgagaacgctttcttcttagaccatgttcggacctcattcttgctcaatttaagaagacagctgccacagaatgttctcgatacaagctggccaactccaccccccgccctgagagaagcgtctgaattgctgcgcgaactgtgcattaaaaacatggtgtggaaatactgcaggtccattagtcctgagtggaaacaacaattgcaacagaaagcagtggcgagcgagattttcaagggaaagaaagacaactacccccagtccgttcccaggctcttcatcagcactagactgggcacagacgaaattagcccacgtgtcctccaggccctggggagtgaacctatccagtacgcagtgcccgttgtcaagtacgatcggaaaggatataagccgcgctcccggcagcttcttctgacccccaatgcggtggtgatcgtggaggatgcgaaggtcaagcaaagaattgactacgcaaatttgactggcatatcggtctctagtctcagcgacagcctgttcgtgctgcacgtacaacgcgctgacaataagcagaagggtgatgtagttctgcagtcagaccacgtgattgagactctgactaagactgcgctgagcgctaacagggtaaattccatcaacattaaccagggtagcatcacgttcgcgggcgggccaggccgagatggtactatagatttcacgcctggaagtgagctgctaattaccaaagccaagaatggccacctggctgtggtcgcccccagacttaattctcggtag

SEQ ID NO: 37108 - DNA, 3135 bp, Artificial Sequence
  derived and/or modified sequence
atgcggggccgggccagcgccctgggcagcgacggcgtgcgggtgacaatggagtcagcgctgactgcccgggaccgtgtcggcgtccaggattttgtgctacttgagaacttcacttcagaagccgcctttatcgagaatttgcgtcggcggttcagagaaaatctcatttatacctacatcggccctgtgctggtctcggtcaacccatatcgtgatctacagatatatagccggcagcacatggagcggtacaggggtgtttcattttacgaggtgcctccacacttgttcgcagtcgcggacacagtttatcgcgcactccggaccgagaggcgcgaccaggctgtgatgatatccggagagagcggggccgggaaaaccgaagcaactaagcgccttctccagttctacgcagagacgtgccccgcgccagagcggggcggagcagtgcgggaccgcctcctgcaatcaaatcccgtgctcgaggctttcgggaacgccaagaccctcagaaacgacaattcaagcaggttcggcaaatatatggatgtccagtttgactttaagggtgcccccgttggggggcacattctttcgtatctgctggaaaaatcccgagtggttcatcaaaaccacggcgagagaaactttcacatattttatcagttgctggagggcggagaagaagagaccctaaggagactgggacttgaaaggaatccgcagtcctatctctatttggtcaaaggccagtgtgccaaggtgagctccatcaacgataaaagcgactggaaggtggtgcgcaaagcacttaccgtcattgatttcacagaagacgaggtggaggacttgttgtccatagtagcctcagttctgcaccttggcaatatccatttcgcagctaatgaagagtccaatgcccaagtgacaacagagaaccagcttaagtacctgactaggttacttagtgtcgaaggctcaaccctgagagaagcactgacacacagaaaaattatcgctaagggcgaggagcttctctctccactaaacctcgaacaggccgcctacgcacgggatgccctggccaaagcagtttacagcaggacttttacatggctggtgggaaagattaatagaagcctagcaagcaaagacgtggagagcccttcctggaggagcacaaccgttctggggttgcttgatatttacggcttcgaagtcttccagcataatagcttcgaacaattctgcatcaattattgtaatgaaaaactgcagcagctctttatagaattaacgctaaagagcgaacaggaggagtatgaggctgaaggcattgcctgggagcctgtgcagtatttcaataacaagatcatttgcgatctagtggaagagaagttcaagggcatcatttcaatactcgacgaggagtgtctgcgccccggcgaggctacagatctgacttttctggaaaagttagaggacacagttaagcaccatccacactttctcacccacaaactggctgaccagcgaactagaaaatccttagggcggggcgaattcaggctgttacattatgccggggaggtgacctactccgtgaccggatttttggacaaaaacaatgatctcctgtttcggaacctgaaggagactatgtgctccagcaagaatcccatcatgtcacagtgtttcgacaggagcgaactcagtgataagaagagaccagaaacagtggccacacagttcaagatgagtttgttgcagttagtggagatccttcagagcaaggagcctgcatatgttcggtgcatcaaacccaacgacgccaagcagcccgggcgtttcgatgaggtcctgatcagacaccaggttaaatatcttgggctgttggagaacttgagagtccggcgcgccgggtttgcctacaggaggaagtatgaagccttcttgcagcgctacaaaagcctgtgccctgaaacttggccaacttgggccggaaggccccaggacggcgtcgcggtcttggtgaggcatctaggatataaacccgaagagtacaaaatgggcagaactaagatattcatccggttccccaaaacattatttgccacggaggatgccctcgaggtccgacgacagtctctggcaactaaaatccaggctgcttggcgaggcttccactggcggcaaaaattccttagagtgaagcgatctgcaatttgcatccagtcatggtggcgtggaaccctcggacgccgaaaggctgccaaaagaaagtgggcagcacagacgattcggcgccttatcagaggtttcgtgctgcgccatgctcctagatgtccagagaatgccttcttcctcgaccatgttagaacttcctttttgctcaacctgcgacggcagcttcctcagaatgtcctcgatacttcatggcctactcccccacctgctctgcgggaagcttcagaactgctccgagaactgtgtataaaaaacatggtgtggaagtactgccggtcaatctcaccagaatggaagcagcagctccagcagaaagctgtcgccagcgaaatcttcaaggggaaaaaagacaactaccctcagagtgtaccacgactcttcataagcacacggctgggtacggacgagatttctccacgggtccttcaggccttgggcagcgagccgattcagtatgctgtgcctgtggtcaagtacgaccggaaaggttataagcctcgttctaggcagctgttactgacgcccaacgccgtcgtaatcgtcgaagatgcgaaagttaaacagagaattgattatgccaacttaaccggcatctctgtcagcagcctcagtgatagcttatttgttctccacgtacagcgggccgacaacaaacaaaagggcgacgtcgtcttgcaaagcgaccacgtcattgagactttgaccaagactgctctgtcagctaatagagtgaattctataaacatcaaccagggcagcattacattcgctggaggccctggcagagacggcaccatagacttcacccccgggtctgagctccttatcactaaagcaaaaaatggtcacctggcagttgtggcccctagactgaacagtagatag

SEQ ID NO: 37109 - DNA, 3135 bp, Artificial Sequence
  derived and/or modified sequence
atgcggtatagggcttccgcactgggaagcgatggcgttagagtcactatggaaagcgctctcaccgcacgcgaccgcgtgggcgtccaggactttgtgctgctcgagaactttacctcagaggccgcttttatcgaaaatctccgacggagattcagagagaaccttatttatacctatattgggcctgtgctggtgagcgtaaatccctatcgcgatctgcagatttattctaggcagcacatggagcggtacaggggcgtgagcttctacgaagtcccccctcatcttttcgccgtggcagacaccgtttaccgcgctcttcggaccgagcggagggaccaggcagtgatgatctccggagagtccggtgccggtaagaccgaagccactaagcgactgcttcaattttacgctgagacgtgtcccgctcccgaacggggaggggctgtacgagatagattactccagtctaatccggtactggaagcctttgggaatgcaaaaacattgagaaacgataactcgtccagatttggaaagtacatggatgtccaattcgacttcaagggagctccagtgggaggccacattttaagttatctcctagagaaaagcagggtggtgcaccagaatcacggtgaacgcaactttcacatattctaccagttgctggagggaggcgaggaagaaacgctgcgccgattgggcctcgagcgtaaccctcaaagctacttatatctggtcaagggccagtgtgctaaggtcagtagcatcaatgataaatcagattggaaggtggtgaggaaagccctgacagtgatcgactttactgaggacgaggttgaagatctgttatcaatcgttgcatcagtgctccatctcggcaatatccacttcgctgctaatgaagagagcaatgcacaggttacaacggagaatcagctcaagtatttgacaagactactttcagtcgaaggctcaacactgagggaagctctgacacatcgcaagatcattgccaagggcgaggagctcctgtccccccttaatctggagcaggcagcatatgcccgtgacgccctcgccaaagccgtttattcccgtaccttcacctggttggtcggaaaaattaatcgcagtcttgcgtccaaggatgtcgaatctcccagttggcggagtaccacagtattggggctcttggacatctacgggtttgaagttttccagcacaactccttcgagcagttctgtatcaactactgcaacgagaagctccaacaacttttcatcgaactgactttaaagtcggaacaggaagaatacgaggctgaggggatagcatgggagccagtccagtatttcaataataagattatttgcgatctggtagaggagaagttcaagggaatcatttcaattttggatgaggagtgtctccggccaggtgaggccacagacctgacttttctggagaaacttgaggacactgtgaaacaccaccctcattttcttactcacaagcttgctgaccaaagaacccggaaatccctgggaagaggagaatttcggctgctgcattacgcgggtgaagtgacctattcagtgaccggttttctggacaagaacaacgacctcctgttccggaatctgaaggaaaccatgtgctcgtctaagaaccccatcatgtcccagtgtttcgaccgcagcgagctgagcgataagaaaagacctgagaccgtggcaactcaatttaagatgtcattgctgcagctggtcgaaatcctccaatcaaaagaacccgcttacgtgagatgtatcaaacccaatgacgcgaaacagcccggaaggtttgatgaagttcttatacgccaccaagtgaagtacctgggcctgttggaaaatctcagagtgagacgggcaggctttgcttatcgccgtaaatacgaggcattcttacaaaggtataagagcctctgccctgaaacttggcctacatgggcaggtagaccccaggacggggtggccgtgctggttaggcacttgggctataagcccgaggaatataaaatgggtaggactaaaattttcatcaggttccctaagaccttattcgccactgaggatgctttggaagtgaggcgacaatccctggccaccaagattcaagctgcctggaggggctttcattggcgtcagaagttcctcagggttaagcggagcgctatatgcattcagagctggtggcgcggtacgctaggtagaaggaaagccgcaaagaggaagtgggccgcacagacaatacgacgactcattcgcggttttgtgctccggcacgcccctaggtgccctgagaatgctttctttctcgaccatgtgaggacaagctttctccttaacctccgcagacagctcccgcagaatgtgctcgataccagctggcctacaccccctcctgcgctccgggaggccagtgagctgctacgtgaactctgtataaagaacatggtctggaaatactgtcgtagcatctcccccgagtggaaacagcagctgcagcagaaagccgtcgccagcgagatttttaaagggaaaaaggacaactatcctcagagtgtgccgcgtcttttcatctctactaggctggggacagacgagatttcccccagagtgctccaggcccttgggtctgaacctatccagtatgccgtgcccgtcgtgaagtatgacagaaagggctataagcctaggagccgacagctcctgctgacccccaacgccgtcgtgatagtggaagacgccaaggtgaaacagcgaattgattacgccaatctgaccgggatctccgtctccagccttagcgattcattatttgttcttcacgtccagcgagcggataataaacaaaagggcgacgtcgtcctgcagtctgaccatgtgattgaaacactgacgaagaccgcactgtctgccaatagagttaatagtattaacattaaccagggctccatcacattcgcaggtggcccagggagggacgggactatagacttcacccccggttctgagctgttaattacgaaggctaagaacggccatctcgccgttgtagcaccacgactgaactcacgatag

SEQ ID NO: 37110 - DNA, 3135 bp, Artificial Sequence
  derived and/or modified sequence
atgcgtgggagggcgagtgctttggggtcagacggagtccgcgtgaccatggaaagcgcactgactgctcgcgatcgtgtcggggtacaggactttgtgctcctggagaactttactagcgaagcggctttcatagagaacctgaggagaaggtttagagagaacttaatttacacatatatcggtccagtcctggtgtcagtaaatccataccgcgatctgcagatttactcaagacaacatatggagaggtaccgcggagtgagcttttacgaggtaccacctcacctctttgctgtagcagacaccgtctatcgggcactgcggacggagaggcgggaccaagctgtgatgatatctggcgagagcggagcgggtaagactgaagctactaagaggctcctccaattctacgctgagacttgccccgctcctgaacggggaggggctgtcagggatagattattgcagtccaatcctgtcctagaagcttttggtaatgcaaagacacttcggaacgacaatagctctagattcggaaagtacatggatgtgcaatttgatttcaaaggcgctccggtgggtggacacatcttgagctatttgctggaaaagagcagagttgtgcatcaaaatcacggagaaaggaactttcacatcttctaccagttacttgaagggggagaggaggagaccctccggaggctagggctggaaaggaatccccagtcctacttatacttagtcaaaggacagtgcgcaaaagtctcaagtattaatgacaaaagcgattggaaggtggtgcgaaaagccctcaccgtcatagatttcacagaagacgaggttgaggatcttttgagcatcgtagcgtccgtgcttcatttggggaatatccactttgctgcgaacgaggagtccaacgcgcaggtcacaacagagaaccaacttaagtacctgaccagattgctaagcgtcgaagggagtacattgagggaagcgttgacacacaggaagattatcgccaagggtgaggaacttctgtctcctctcaacctggagcaggccgcatacgctcgggatgccttggccaaagcagtttactccaggactttcacatggctggttggcaagattaaccgatccctggcctccaaggatgtggaatcgccctcttggcggagtaccaccgtgctgggcctgttggatatttacggcttcgaggtgttccagcacaatagttttgaacagttttgcatcaattactgtaatgaaaagctgcagcagctgtttatcgagctgaccttgaagtctgaacaggaggagtacgaagctgaaggtatagcatgggagccagtccagtattttaacaacaagattatctgcgacttagtagaggaaaaattcaagggtattatcagtatcctcgacgaggagtgcctcaggccaggagaggccacagacctcaccttcttagagaagcttgaagacactgttaagcaccacccccactttttgactcacaaactggccgaccagcgtactcggaagagccttgggagaggcgaatttaggctgctccactatgctggagaagtcacctactccgtgacaggatttctggataagaataacgacctgttgttcaggaatctcaaagaaactatgtgttccagtaaaaatccaatcatgtcccagtgttttgatcgcagcgagctgagcgacaaaaagcgtcccgagacggtggcgactcagttcaagatgtccttactccagctggttgaaatactccagagtaaagaaccggcatatgtgaggtgtataaagccgaacgacgcaaagcagcctggcaggtttgacgaagtgcttatcaggcaccaagtcaagtacctcggcttgctggagaatctaagggtgcggagagctggctttgcatacagacgtaagtatgaagcttttctgcaacgctataagagcctgtgtcctgaaacctggcccacatgggcgggtcgtcctcaagacggagtagcagtgttggtgagacaccttggctacaagccagaagagtacaaaatgggtcgcacaaaaatcttcattcgattccccaaaacgttatttgcaaccgaggacgccctggaagtgagaagacagtcacttgccaccaagatccaggccgcttggcgagggttccactggagacaaaagttcctgcgggtcaaacggtcagcaatttgcattcagtcatggtggagaggcacccttggcagacgcaaggccgctaaaaggaagtgggctgctcagacaataaggcgcctcatacgcggtttcgtgctgagacacgcaccgcgatgtcccgagaatgctttcttcctcgatcatgtccggacatccttcctgctcaacttgagaagacagcttcctcagaacgtgctagatacatcttggcctacacctccgccagctttgcgtgaagcctccgagcttctgcgggagctgtgcatcaagaatatggtgtggaagtattgtcggagcatttctcccgaatggaagcagcaacttcaacaaaaggctgtggcgagcgagatcttcaaggggaagaaagataactatcctcagtcagttcctagactgttcatttccactagactgggaaccgacgaaatctccccccgagtgttgcaggccctgggctccgagccaattcagtacgcagtgcccgtggtgaagtacgacagaaagggttacaaaccgaggagcaggcagctacttctcaccccaaacgctgttgtgattgtggaggacgctaaagtcaagcaaagaatcgattatgcaaacctgacaggcatcagtgtttccagtctgtccgactctttatttgtcctccacgtgcagcgagccgataataagcagaagggtgacgttgtgctgcagtcggaccatgttattgagactctgactaagactgcgttaagcgctaaccgggtgaattcaatcaatatcaaccagggcagcatcaccttcgcaggcggacctggacgcgacggcacaatcgattttacaccgggaagcgagttgctaataaccaaagcgaaaaacgggcatctcgcggtggttgccccaagattaaactccagatag

SEQ ID NO: 37111 - DNA, 3135 bp, Artificial Sequence
  derived and/or modified sequence
atgagatacagagccagcgccctgggcagcgacggcgtgagagtgaccatggagagcgccctgaccgccagagacagagtgggcgtgcaggacttcgtgctgctggagaacttcaccagcgaggccgccttcatcgagaacctgagaagaagattcagagagaacctgatctacacctacatcggccccgtgctggtgagcgtgaacccctacagagacctgcagatctacagcagacagcacatggagagatacagaggcgtgagcttctacgaggtgcccccccacctgttcgccgtggccgacaccgtgtacagagccctgagaaccgagagaagagaccaggccgtgatgatcagcggcgagagcggcgccggcaagaccgaggccaccaagagactgctgcagttctacgccgagacctgccccgcccccgagagaggcggcgccgtgagagacagactgctgcagagcaaccccgtgctggaggccttcggcaacgccaagaccctgagaaacgacaacagcagcagattcggcaagtacatggacgtgcagttcgacttcaagggcgcccccgtgggcggccacatcctgagctacctgctggagaagagcagagtggtgcaccagaaccacggcgagagaaacttccacatcttctaccagctgctggagggcggcgaggaggagaccctgagaagactgggcctggagagaaacccccagagctacctgtacctggtgaagggccagtgcgccaaggtgagcagcatcaacgacaagagcgactggaaggtggtgagaaaggccctgaccgtgatcgacttcaccgaggacgaggtggaggacctgctgagcatcgtggccagcgtgctgcacctgggcaacatccacttcgccgccaacgaggagagcaacgcccaggtgaccaccgagaaccagctgaagtacctgaccagactgctgagcgtggagggcagcaccctgagagaggccctgacccacagaaagatcatcgccaagggcgaggagctgctgagccccctgaacctggagcaggccgcctacgccagagacgccctggccaaggccgtgtacagcagaaccttcacctggctggtgggcaagatcaacagaagcctggccagcaaggacgtggagagccccagctggagaagcaccaccgtgctgggcctgctggacatctacggcttcgaggtgttccagcacaacagcttcgagcagttctgcatcaactactgcaacgagaagctgcagcagctgttcatcgagctgaccctgaagagcgagcaggaggagtacgaggccgagggcatcgcctgggagcccgtgcagtacttcaacaacaagatcatctgcgacctggtggaggagaagttcaagggcatcatcagcatcctggacgaggagtgcctgagacccggcgaggccaccgacctgaccttcctggagaagctggaggacaccgtgaagcaccacccccacttcctgacccacaagctggccgaccagagaaccagaaagagcctgggcagaggcgagttcagactgctgcactacgccggcgaggtgacctacagcgtgaccggcttcctggacaagaacaacgacctgctgttcagaaacctgaaggagaccatgtgcagcagcaagaaccccatcatgagccagtgcttcgacagaagcgagctgagcgacaagaagagacccgagaccgtggccacccagttcaagatgagcctgctgcagctggtggagatcctgcagagcaaggagcccgcctacgtgagatgcatcaagcccaacgacgccaagcagcccggcagattcgacgaggtgctgatcagacaccaggtgaagtacctgggcctgctggagaacctgagagtgagaagagccggcttcgcctacagaagaaagtacgaggccttcctgcagagatacaagagcctgtgccccgagacctggcccacctgggccggcagaccccaggacggcgtggccgtgctggtgagacacctgggctacaagcccgaggagtacaagatgggcagaaccaagatcttcatcagattccccaagaccctgttcgccaccgaggacgccctggaggtgagaagacagagcctggccaccaagatccaggccgcctggagaggcttccactggagacagaagttcctgagagtgaagagaagcgccatctgcatccagagctggtggagaggcaccctgggcagaagaaaggccgccaagagaaagtgggccgcccagaccatcagaagactgatcagaggcttcgtgctgagacacgcccccagatgccccgagaacgccttcttcctggaccacgtgagaaccagcttcctgctgaacctgagaagacagctgccccagaacgtgctggacaccagctggcccacccccccccccgccctgagagaggccagcgagctgctgagagagctgtgcatcaagaacatggtgtggaagtactgcagaagcatcagccccgagtggaagcagcagctgcagcagaaggccgtggccagcgagatcttcaagggcaagaaggacaactacccccagagcgtgcccagactgttcatcagcaccagactgggcaccgacgagatcagccccagagtgctgcaggccctgggcagcgagcccatccagtacgccgtgcccgtggtgaagtacgacagaaagggctacaagcccagaagcagacagctgctgctgacccccaacgccgtggtgatcgtggaggacgccaaggtgaagcagagaatcgactacgccaacctgaccggcatcagcgtgagcagcctgagcgacagcctgttcgtgctgcacgtgcagagagccgacaacaagcagaagggcgacgtggtgctgcagagcgaccacgtgatcgagaccctgaccaagaccgccctgagcgccaacagagtgaacagcatcaacatcaaccagggcagcatcaccttcgccggcggccccggcagagacggcaccatcgacttcacccccggcagcgagctgctgatcaccaaggccaagaacggccacctggccgtggtggcccccagactgaacagcagatag

SEQ ID NO: 37112 - DNA, 3135 bp, Artificial Sequence
  derived and/or modified sequence
atgagaggcagagccagcgccctgggcagcgacggcgtgagagtgaccatggagagcgccctgaccgccagagacagagtgggcgtgcaggacttcgtgctgctggagaacttcaccagcgaggccgccttcatcgagaacctgagaagaagattcagagagaacctgatctacacctacatcggccccgtgctggtgagcgtgaacccctacagagacctgcagatctacagcagacagcacatggagagatacagaggcgtgagcttctacgaggtgcccccccacctgttcgccgtggccgacaccgtgtacagagccctgagaaccgagagaagagaccaggccgtgatgatcagcggcgagagcggcgccggcaagaccgaggccaccaagagactgctgcagttctacgccgagacctgccccgcccccgagagaggcggcgccgtgagagacagactgctgcagagcaaccccgtgctggaggccttcggcaacgccaagaccctgagaaacgacaacagcagcagattcggcaagtacatggacgtgcagttcgacttcaagggcgcccccgtgggcggccacatcctgagctacctgctggagaagagcagagtggtgcaccagaaccacggcgagagaaacttccacatcttctaccagctgctggagggcggcgaggaggagaccctgagaagactgggcctggagagaaacccccagagctacctgtacctggtgaagggccagtgcgccaaggtgagcagcatcaacgacaagagcgactggaaggtggtgagaaaggccctgaccgtgatcgacttcaccgaggacgaggtggaggacctgctgagcatcgtggccagcgtgctgcacctgggcaacatccacttcgccgccaacgaggagagcaacgcccaggtgaccaccgagaaccagctgaagtacctgaccagactgctgagcgtggagggcagcaccctgagagaggccctgacccacagaaagatcatcgccaagggcgaggagctgctgagccccctgaacctggagcaggccgcctacgccagagacgccctggccaaggccgtgtacagcagaaccttcacctggctggtgggcaagatcaacagaagcctggccagcaaggacgtggagagccccagctggagaagcaccaccgtgctgggcctgctggacatctacggcttcgaggtgttccagcacaacagcttcgagcagttctgcatcaactactgcaacgagaagctgcagcagctgttcatcgagctgaccctgaagagcgagcaggaggagtacgaggccgagggcatcgcctgggagcccgtgcagtacttcaacaacaagatcatctgcgacctggtggaggagaagttcaagggcatcatcagcatcctggacgaggagtgcctgagacccggcgaggccaccgacctgaccttcctggagaagctggaggacaccgtgaagcaccacccccacttcctgacccacaagctggccgaccagagaaccagaaagagcctgggcagaggcgagttcagactgctgcactacgccggcgaggtgacctacagcgtgaccggcttcctggacaagaacaacgacctgctgttcagaaacctgaaggagaccatgtgcagcagcaagaaccccatcatgagccagtgcttcgacagaagcgagctgagcgacaagaagagacccgagaccgtggccacccagttcaagatgagcctgctgcagctggtggagatcctgcagagcaaggagcccgcctacgtgagatgcatcaagcccaacgacgccaagcagcccggcagattcgacgaggtgctgatcagacaccaggtgaagtacctgggcctgctggagaacctgagagtgagaagagccggcttcgcctacagaagaaagtacgaggccttcctgcagagatacaagagcctgtgccccgagacctggcccacctgggccggcagaccccaggacggcgtggccgtgctggtgagacacctgggctacaagcccgaggagtacaagatgggcagaaccaagatcttcatcagattccccaagaccctgttcgccaccgaggacgccctggaggtgagaagacagagcctggccaccaagatccaggccgcctggagaggcttccactggagacagaagttcctgagagtgaagagaagcgccatctgcatccagagctggtggagaggcaccctgggcagaagaaaggccgccaagagaaagtgggccgcccagaccatcagaagactgatcagaggcttcgtgctgagacacgcccccagatgccccgagaacgccttcttcctggaccacgtgagaaccagcttcctgctgaacctgagaagacagctgccccagaacgtgctggacaccagctggcccacccccccccccgccctgagagaggccagcgagctgctgagagagctgtgcatcaagaacatggtgtggaagtactgcagaagcatcagccccgagtggaagcagcagctgcagcagaaggccgtggccagcgagatcttcaagggcaagaaggacaactacccccagagcgtgcccagactgttcatcagcaccagactgggcaccgacgagatcagccccagagtgctgcaggccctgggcagcgagcccatccagtacgccgtgcccgtggtgaagtacgacagaaagggctacaagcccagaagcagacagctgctgctgacccccaacgccgtggtgatcgtggaggacgccaaggtgaagcagagaatcgactacgccaacctgaccggcatcagcgtgagcagcctgagcgacagcctgttcgtgctgcacgtgcagagagccgacaacaagcagaagggcgacgtggtgctgcagagcgaccacgtgatcgagaccctgaccaagaccgccctgagcgccaacagagtgaacagcatcaacatcaaccagggcagcatcaccttcgccggcggccccggcagagacggcaccatcgacttcacccccggcagcgagctgctgatcaccaaggccaagaacggccacctggccgtggtggcccccagactgaacagcagatag

SEQ ID NO: 37113 - protein, 659 aa, Artificial Sequence
  derived and/or modified sequence
MEAAAAAAAAAAAAAAAGGGCGSGPPPLLLSEGEQQCYSELFARCAGAAGGGPGSGPPEAARVAPGTATAAAGPVADLFRASQLPAETLHQITELCGAKRVGYFGPTQFYIALKLIAAAQSGLPVRIESIKCELPLPRFMMSKNDGEIRFGNPAELHGTKVQIPYLTTEKNSFKRMDDEDKQETQSPTMSPLASPPSSPPHYQRVPLSHGYSKLRSSAEQMHPAPYEARQPLVQPEGSSSGGPGTKPLRHQASLIRSFSVERELQDNSSYPDEPWRITEEQREYYVNQFRSLQPDPSSFISGSVAKNFFTKSKLSIPELSYIWELSDADCDGALTLPEFCAAFHLIVARKNGYPLPEGLPPTLQPEYLQAAFPKPKWDCQLFDSYSESLPANQQPRDLNRMEKTSVKDMADLPVPNQDVTSDDKQALKSTINEALPKDVSEDPATPKDSNSLKARPRSRSYSSTSIEEAMKRGEDPPTPPPRPQKTHSRASSLDLNKVFQPSVPATKSGLLPPPPALPPRPCPSQSEQVSEAELLPQLSRAPSQAAESSPAKKDVLYSQPPSKPIRRKFRPENQATENQEPSTAASGPASAATMKPHPTVQKQSSKQKKAIQTAIRKNKEANAVLARLNSELQQQLKEVHQERIALENQLEQLRPVTVL

SEQ ID NO: 37114 - DNA, 1980 bp, Artificial Sequence
  derived and/or modified sequence
atggaagccgccgcagccgccgctgctgcagctgccgccgcagccgcagccggcggaggctgtggaagcggaccacccccactcttgctttcagagggagagcaacagtgctattctgagctgttcgcacgttgtgctggcgctgctgggggcggtccgggcagcggtccacctgaagctgcccgagtcgctccgggcacagcgacagctgctgccggtccggtcgctgatctcttcagggcttcccaattaccagctgagaccctgcaccagataaccgagctctgtggcgcaaaaagggtggggtatttcggcccaacacaattttacattgccctgaagctgattgcggcggcacaaagcggtctgcctgtgcgaatcgagtcaataaaatgtgaacttccactgcctcggttcatgatgtctaaaaatgacggagaaatcagattcggcaacccagctgagctacacggtaccaaggtccagatcccgtacttaacaactgaaaagaatagcttcaaacgaatggacgacgaggacaagcaagagacccagtctcctaccatgtctcctttggcctcacccccttccagccccccccactaccagagagttccattgtcccacggatatagtaaacttagatctagcgcggagcagatgcacccggcgccttacgaggctagacagcccctcgtgcaacctgaggggagtagttctggcggcccgggtacaaagcctctgcggcatcaggcctctctgatcagaagctttagcgtagagagagagctccaggataactctagctatcccgacgaaccttggaggattaccgaggagcaacgggagtactacgtaaaccaattcagaagcctgcagcctgacccctcttctttcattagcggctcagttgcgaaaaacttctttacgaagagcaagctgagtatcccagaactgtcctacatctgggagctcagtgacgccgattgtgatggggccttgacccttccggagttctgtgctgcttttcacctgatcgtggccagaaagaatggataccctctcccagagggtctgcctcctactttgcagcccgaataccttcaagccgccttcccaaagcccaaatgggactgccagttgttcgactcgtatagtgagtccctgccggctaaccaacagcctagagacttaaaccgaatggagaagaccagcgtcaaagatatggccgatttgcccgtgcctaatcaggatgtaactagtgacgacaaacaggctctgaagtcaaccattaatgaggctctgcctaaagacgtcagcgaagatccggcaacacccaaggactccaactcattaaaagcacggcctaggagtcgctcatactcctcgactagcatcgaggaagctatgaagcggggggaggacccccccacccctccacctcggcctcaaaagacccactctagagcctcaagccttgacctgaataaagtgtttcagccttccgtcccggccactaaatcaggcttactgcctcctcctccagctctacctccacgtccctgtccctcccagagcgaacaggtgtcggaggcggaactgttaccgcagcttagccgcgccccctctcaggcagccgagtcctcccctgcaaaaaaagacgtgctttacagccagccaccctctaagcctattcggaggaagttcagacccgaaaatcaagctacggaaaaccaggagccctcgaccgctgcatccggcccagcctccgcagcgaccatgaagcctcatccaacagtccaaaaacaatcatccaaacagaagaaagccattcaaacggccatcaggaagaataaggaagctaatgccgttttagcacgccttaactccgaacttcagcaacagcttaaagaggttcaccaggagagaatcgctctggagaatcagttggaacagctacgccccgttactgttctctag

SEQ ID NO: 37115 - DNA, 1980 bp, Artificial Sequence
  derived and/or modified sequence
atggaggccgctgctgctgctgctgctgctgctgctgctgctgctgctgctgggggcggctgcggcagcggccccccacccctgctgctgtctgagggggagcagcagtgctacagcgagctgtttgcccgctgtgccggggctgctgggggcggccctggcagcggccccccagaggccgcccgggtggcccctggaacagccacagctgctgctggccctgtggccgacctcttccgggccagccagctgcctgctgagaccctgcaccagatcacagagctgtgtggggccaagagggtgggctacttcggccccacccagttctacatcgccctgaagctgattgctgctgcccagagcggcctgcctgtgagaattgagagcatcaagtgtgagctgcccctgccccgcttcatgatgagcaagaatgatggagagatccgcttcggcaacccagctgagctgcacggcaccaaggtgcagatcccctacctgaccacagagaagaacagcttcaagaggatggatgatgaggacaagcaggagacccagagccccaccatgagccccctggccagcccccccagcagccccccccactaccagagggtgcccctgagccacggctacagcaagctgcggagcagcgctgagcagatgcacccagccccctatgaggcccggcagcccctggtgcagcctgagggcagcagcagcggcggccctggcaccaagcccctgcggcaccaggccagcctcatccgctccttctctgtggagcgggagctgcaggacaacagcagctacccagatgagccctggaggatcacagaggagcagcgggagtactacgtgaaccagttccgcagcctgcagcctgaccccagcagcttcatcagcggctctgtggccaagaacttcttcaccaagagcaagctgagcatccctgagctgagctacatctgggagctgagtgatgctgactgtgatggagccctgaccctgcctgagttctgtgccgccttccacctgattgtggccaggaagaatggctaccccctgcctgagggcctgccccccaccctgcagcctgagtacctgcaggccgccttccccaagcccaagtgggactgccagctgtttgacagctacagcgagagcctgcctgccaaccagcagccccgggacctgaacaggatggagaagacctctgtgaaggacatggctgacctgcctgtgcccaaccaggatgtgaccagtgatgacaagcaggccctgaagagcaccatcaatgaggccctgcccaaggatgtgtctgaagatcctgccacccccaaggacagcaacagcctgaaggcccggcccaggagccgcagctacagcagcaccagcattgaggaggccatgaagagaggagaggacccccccaccccaccaccccggccccagaagacccacagccgggccagcagcctggacctgaacaaggtgttccagcccagcgtgcctgccaccaagagcggcctgctgcccccacctccagccctgcccccccggccctgccccagccagagcgagcaggtgtctgaggccgagctgctgccccagctgagccgggcccccagccaggccgctgagagcagccctgccaagaaggatgtgctgtacagccagccccccagcaagcccatccggaggaagttccggcctgagaaccaggccacagagaaccaggagcccagcacagctgccagcggccctgccagcgctgccaccatgaagccccaccccaccgtgcagaagcagagcagcaagcagaagaaggccatccagacagccatcaggaagaacaaggaggccaatgctgtgctggcccggctgaacagcgagctgcagcagcagctgaaggaggtgcaccaggagcgcatcgccctggagaaccagctggagcagctgcggcctgtgacagtgctgtag

SEQ ID NO: 37116 - DNA, 1980 bp, Artificial Sequence
  derived and/or modified sequence
atggaggccgccgccgccgccgccgccgccgccgccgccgccgccgcagcaggtggagggtgcggctccgggcctccaccactcctcctctccgaaggggagcagcagtgttattcagaactgtttgcacgatgtgctggggcagccggggggggaccggggtccggtcctccggaagcagcaagggtcgcacctggaacagcaacagctgctgctgggccagtggcagacctttttcgagcgtctcagcttcctgcagagactcttcaccagattacagagctgtgcggggctaagagagtcgggtactttggaccaacacagttttacatagcattgaagctgatcgctgcagcgcagtctggtctgccagtgagaatcgaatccatcaaatgcgaattacccctgcccaggttcatgatgtccaaaaacgatggagaaatacggtttgggaatccagctgagttacatggaaccaaggttcagataccatacctcacaacggaaaagaacagcttcaaacggatggacgacgaggacaagcaggagacacagtccccaaccatgtcccctctcgccagtcctccttcctccccccctcattatcagcgcgtgccccttagccatggatactcaaagctgagatcttcagccgagcagatgcatcccgccccatatgaagcgaggcagccactggttcaaccggaggggtccagtagcgggggaccaggcactaaaccactgaggcaccaggccagcctgatccgctccttcagtgtggaacgggagctccaggataattcttcctatcccgacgaaccgtggagaattaccgaggaacaacgcgaatactatgtgaatcagttccggagcctgcaaccagatcccagctctttcatcagcggcagtgtggccaagaacttcttcaccaagtccaagttgtccataccagagctgagctacatctgggaactttcggatgccgattgcgatggtgccctgactctccccgagttctgcgcagcctttcatctgatcgtggccaggaaaaacgggtatccattgccagaggggctcccaccaaccctgcagccagagtacctccaggctgccttccctaaacccaaatgggactgccagctatttgactcgtactccgagagcttaccagctaatcaacagccacgagatttgaaccgcatggaaaaaacgagcgttaaggatatggccgacctacccgtgccaaaccaggacgtgacctctgacgacaagcaggcactgaaaagcactataaatgaggctctgccaaaggacgtttctgaggatccagcaactccgaaagatagcaattccctgaaagcgagaccgcgcagtcggtcatacagttcaacttccatagaggaggcaatgaagagaggggaggacccacccacaccccctcctcgcccgcagaaaactcactctcgcgcttcgagcttggacctgaacaaggtgttccagccatccgtccccgcaactaagagcgggttgttacctcccccccctgctctcccacccagaccatgccctagccagagtgaacaagtctccgaggcagaactcctgccacaactctctagggcaccttctcaagcggcagagtctagtcccgcaaaaaaggatgtgctgtactcgcagccaccaagtaagccaatacgcagaaaattccggcccgagaaccaggccacagagaatcaggagccaagcacagctgctagcggcccagctagcgctgccaccatgaaaccccatcctacggtgcagaagcagtcctctaagcaaaagaaggccatacagacagcaatcagaaaaaataaggaggccaatgcagtgttggcgagacttaactctgagctccagcagcagttgaaggaagttcatcaggagcgtattgccctcgagaatcagctcgagcagctgagacccgtaaccgttctgtag

SEQ ID NO: 37117 - DNA, 1980 bp, Artificial Sequence
  derived and/or modified sequence
atggaagctgccgctgccgcagcggcagccgcagccgctgccgctgccgctgggggaggttgtggctccggaccccctccacttctcctgagcgaaggcgagcagcagtgctattcggaacttttcgcaagatgcgccggagctgccggaggtgggccaggatcaggtccaccggaggctgccagagtggccccagggactgccaccgccgctgccggaccggtcgccgacttgtttcgtgccagtcaactacctgccgaaacactccatcagattacagaactgtgtggcgctaagcgggttggatacttcggaccaacacagttctacatagcactgaaactcattgccgctgcccaatctggtctgcctgtgcggattgaaagcatcaaatgcgaactgcccctgcccaggtttatgatgagtaagaacgatggtgagattaggtttgggaacccggcagagctccacgggaccaaggtgcagatcccctacctcactactgaaaagaactctttcaaaagaatggacgatgaagataagcaggaaacgcagagcccaacaatgagtcccttggctagtcccccatcatcaccaccccactaccaacgggtgccgcttagccacggatattctaagttacgctcaagcgcagaacagatgcacccagccccttacgaagctaggcagcccctggtccaacctgagggatcttcaagcggtgggccaggcacaaagccgctgaggcaccaagctagcctcattcggagcttctcggtggaaagggaattacaagataatagttcctaccccgatgagccctggcgcataacagaagaacagagagaatactacgttaatcagttcaggagcctgcagcccgacccaagctcattcattagcgggagcgtagcgaaaaatttcttcacaaagagcaaattatccataccagaactctcgtatatctgggagctaagtgacgcagactgcgatggcgctctgaccctccctgaattttgcgcagcatttcatctcatcgtggcacggaaaaatggatatcctctgcctgaggggctgcctcccacccttcagccagaatacctacaggctgcattccccaagccaaagtgggactgtcagcttttcgattcctattctgagtcattgcctgccaatcagcagccaagggacctcaaccgcatggaaaaaacatccgtgaaggatatggctgatctgccagtcccaaaccaggacgttacctcagatgacaagcaggccctcaagtcaacaatcaacgaagctctcccaaaagacgtctcagaggacccagcaacccctaaggacagcaacagcctcaaggcgagaccaagatctagatcatactcgtctaccagtattgaagaggccatgaagcgcggagaagaccctcctacgccaccaccacggcctcaaaaaactcattccagagcatccagcctcgatctgaataaagtttttcagccctctgtccctgcgacaaaatcaggacttctaccgccacctcctgcactcccaccacgcccatgcccctcccagtccgaacaggtttcagaagcagaacttctcccgcagcttagtagagcaccatcgcaggcggctgaatcttcgccagcaaagaaggatgttctctattcccagccaccttcaaagcccattcgaaggaagttcagaccagagaatcaggctactgagaaccaggagcctagcactgccgcttccggcccagccagtgcggctactatgaagccgcatcccaccgtgcagaaacagtctagcaagcagaaaaaggccattcagactgctatccggaagaataaggaggccaatgcggtgctggctcggctgaactctgaacttcaacagcagcttaaagaggttcaccaggagagaatcgccctcgaaaaccagcttgaacagctccgtcccgttacagtcctctag

SEQ ID NO: 37118 - DNA, 7771 bp, Artificial Sequence
  derived and/or modified sequence
atggaggcggcagcggcggcggcggcggcggcagcggcagcggcagcggcgggcgggggctgtggctccgggccgccgccgctgctgctgagcgagggcgagcagcagtgctactccgagctcttcgcgcgctgtgccggcgccgcgggcgggggccccgggtctgggccccccgaggccgccagagtcgcccccggcacggccactgcggccgccggccccgtggctgacctgtttcgggcatcgcagctgcccgccgagacgctgcaccagatcacagaactgtgtggtgcaaagcgggttggttattttggtccaacacagttttacattgccctgaaattaattgctgcagcacaatctggcctcccggtacggatagagagtattaaatgtgaattgcctctgcctcgctttatgatgtcaaagaatgatggtgagatacgatttgggaacccagctgagctgcatggaactaaggttcagattccatatttaactacagaaaaaaattccttcaaaagaatggacgatgaggataaacaggaaacacagtctcccacgatgtcacccctcgcctcccctccttcttccccgcctcattaccagagggtgcccttgagccatggctacagcaaactgcggagcagcgcagaacagatgcatccagcaccttatgaagctaggcagccccttgtccagcccgagggatcctcatcagggggcccaggaaccaagccccttcggcatcaggcttcccttatccggtccttttcagtggagagggaactacaggataacagcagttaccccgacgaaccctggaggataacagaagaacagcgcgagtactatgtcaatcagttccgatcccttcagccagacccaagctctttcatttcaggttctgtggccaagaacttcttcaccaaatcaaagctttccattccagaactctcctatatatgggagcttagtgatgctgactgtgatggagccctgaccctgcctgagttctgtgctgcgtttcatctcattgtggctcggaagaacggctacccattgcctgagggcctccctccaactctgcagccagaatacctgcaggcagcttttcctaagcccaaatgggactgtcaattatttgattcttattctgagtcactgccggcaaatcaacaacctcgtgacttgaatcggatggagaagacatctgttaaagacatggctgaccttcctgtccctaaccaggatgtaactagtgatgacaaacaagctttgaaaagtactatcaatgaagccttaccaaaggacgtgtctgaggatccagcaactcccaaggattccaacagtctcaaagcaagaccaagatccagatcttactctagcacctccatagaagaggccatgaaaaggggcgaggaccctcccaccccgccacctcggccacagaaaacccattccagagcctcctccttggatctgaataaagtcttccagcccagtgtgccagctaccaagtcaggattgttacccccaccacctgcgctccctccaagaccttgtccatcacagtctgaacaagtgtcggaggccgagttactcccacagctgagcagagccccatcccaggctgcagaaagtagtccagcaaagaaggatgtactgtattctcagccaccatcaaagcccattcgtaggaaattcagaccagaaaaccaagctacagaaaaccaagagccttccactgctgcaagtgggccagcttctgcggcaaccatgaaaccgcatccaacagtccaaaagcagtcttccaaacagaagaaggccattcaaactgctatccgcaaaaataaagaggcaaacgcagtgctggctcggctgaacagtgagctccagcagcagctcaaggaggttcatcaagaacgaattgcattggaaaaccaattggaacaacttcgtccggtcactgtgttgtgacccccccatggttcaagtgacagtgggtgaccttgtctgccaagatctttcttttgaatgttttgaacccaactacttgtcatagatgtttgactgtgtcaaaagctgtgagcagcaaaatataatccatatgaccttttctcttgcacttcacttgtatgttttactgtggtggaaaaaatacttcaactgattatcacacttgaaatgctaattatcagtggaatttgtctcctattcttaagtacttctgcaaggtattagatgctgctccttaccaaaaatcagtcttctagcaaataaaaataacttagagcattatttatttaaagaatttatgttttctataaaaccttataaccaagaaccttcaggatgcttgtaaccaagtactttcaggatgctttttgtatgtatatcacatagagtaggttggtttcctgagtaattgggattccaactagatagtcattggtgtgaccataataaaaacaaaagctaaaataaaagcatcagatttagactggcgctgtgccctctaccactatatgccaaaaattgcttctctagtgccattttgatattatatctagctataaataatacatgactatcgttttctattgaatgtcaaagacttactgggtctttacacctctgtaaagtggaggttttggcaatgagctgtttaacttggccaagctaggctgtcaacccagacaactcagtcctttcatgtaaatttttgggcaagagaagtctgctttgactgccttgcctgaccaaattaaataaatagttgccagatctctacttttatcctgcatgggataatatatctgtaaatgcatgagtttggaaaccacccatcaaatatgaaaggctgatgagactgttaggattgataaacatttgttgtttgaacccagctatccaaactggggaagaaggggaaatggttgttaccaacaatctctagtagttattttaatctttattttaacctggattgcaaatgtatggggtatgaggagataatgaaagaaaagtggtcctcatgctggatatgtgactgttttgttctctgtaaagtgtattcttgggaagtgattggtttatatcagattcagaggagcccaattaactccagtgtaggtaatgtaaaacagtaagctcaaattgcagaagccagtatcctacagaaatttaagtagctactgcttctcctgaaagcccaagttgaaaatgggaccacaggggcacagggctactgaccctcacagggcatgccagcgttaacaccactttgagagaccaatggcaagaaatgctgtctcttgtgcattttactaatttccccattcttagggtagcagggtgggggtgtatagggtctttttgaagcagttttggataggtttgcaatatgtgggattcagcctttgatttcaatagagctgagagcttttagaacaagcaggcatttatttaatgtttccttagtccattggcaagctttatcaatagcttaatggcagaggataaaggctcaaacagatgatgttttttccacagaaaaacaaattgttgaatctattccgtgcatatttaaggattttgaattgattttgaaaatcatgaaacttgaactatttttctattccctttttttcttccccatttgctgccttttttgtttttgtgggggaagggttgggagtaagtttaaactcttccgaagattatgaatgggtcagcacaaatttttaggcaactgctttttccatgttctgagatctacgggctacaacaaattttatcagcagtgttttttgtttttttgagatggagacttgctctgtcgcccaggctggagcgcagtggcgcaatctcggctcactgcaacctccacctcctgggttcaagcaattcttgtgcctcagcctcccgagtagctgggattacaggcacccaccaccacgctcagctaatttttgtatttttagtagagatgggattttgtcatgttggctaggctagtctcgaattcctgacctcaagtgatccacccgccttggcctctcgaagtgctgggattacaggcgtgagccacccgcccggctatcagcactgttctgattgcagacgtttcacagcatgtttggcttttggtaaattcaatccaggaaagactagcatgtgcactttatctcataatcttccagtacatatgctctcagttgggatagcagttcatttccattaggcagacgtataaactaaggaatgttagtctgcagtattcattttaaaaatattgacatgcttttcccctcccctccatgaagtcagtgccagagtgagccagattgggaggttggggttttgtttggttggcttggttttcattaagggaaaaaacttgcattggacaatcaaattcccctgagtttcataatctcatcaatattttaagataggcgagcacacactaataatatctatgcctaccttcttgggtggactcaactgtaaccacagtttattagttgcttagaagtggatttttaaaaaacagttaaatgtgtgtgcataacacacaagtaatgacacactactattattattacctaagtagtgctcatcctctctttctgtgttttcttaggatgtgcactttaatttaggattgtaacgcctaataatatttctgtgagcctttaatgtgatttataagatggccgaattactgaaatcaccattatacctcttccataaaacgactccaaagttagacctgcctgttggggagaattctatagacagaaggtcaatgttgtccccatccataggggttgaattaccttgctgttaagtggtcttcccccattgggatcctacagtcccacagatgaaagcacagtagtagctgacagctggcttatttggtccctcggcatctctcgtatgtggcatattgcttttgccactttcctatccagcagacatcaaagcaaaactaaaaggtagatatctggaatgaatgtatatgttgtaattgaggcagatatttgccttaattggaaggatctaactgctttacaaatattaaacaagtgcttgggcatgattgggagaggaggcagcttagctggaagctgtgcccatcttactgtcactggagaataggatgtcagagctgggcaggactggtacccatcatttgcagtttgcatgtggggaaaccaaagccctaagaaacaacagttcctggcccaaaaaatccatagaaagaggtaactagtggcagatttggggcgccaacctgattttatggattttgagttagattctctaccctctatcaatactaaaaatagattaggagggtttttttttctgtttatcatgttgaatttcattgacttaattagtctttaaatttgaaaacatgttttagggagtttagttctagaaatttctcttagattgaagtgacagaatctgaaagaaaagaatatgattgagctatttgttttcctgaacacctcaccttttatgatgcaataagttactctgagtttcttggcagagtttttgacagctgttgctttcaatggattccattcctgtattccttatgggaggttgtttttaaaatagactactgcgattgaaatgaactcaatatgtagttaagttatagttttcttcaatgtatttttagttacttgggtcacaaatgttcaatttcagcatattttagggtgagtaatcaaaaatgtgaatttgcctttgatttcctaccactgtctgagctatcataaagcattctctttagttgtgatttgattctatagtctgtttctaaatgacatttgtctgtttcttaaatgatctcacagccatggtaataatagatgtgtactcagaagatcaataaggtaatattggaattcatgtgttttttgcaattaaggcaggcatttgccaatgtcttcttttaagcagtagttggaaacatctcaattacagtgtaacaccttagagctaaaaacatttgttcaacacaaactagaatcacaccttctcactagatatcaccaagggaatgtggttttaaaaataaaaagaaaacaatataacgtatcatggcaaccagagcttcccatattattgacaagtagggatcattaggttctggtttgaacattctgaatgtgaacaaaatgaaatagtagttaagaggtgttttcccactgtgtttaaagagaacactagtaattctggtttttctttctaactgctttactgtttcaagggtattcttttaaaactctgatttcaaaggatcagttgaatttatactttagttatgggtgttttgttactttttttttttttgtatcatgactcagtatggttcaatttcctagtaagaagtggggatttgtgtttttggagtcctcagctcacatgtcttgttcctccttcagcacaagctaggggagatcctaccaacactgataggtcagtcattgatggcaatttgaatgtgggtattactctgtgagccaccctgcttcgcttgtttgtaaggagaaatgcatctggttatgtgaatttcccgagagcagcagacatggagggccagactttaaaagcaacgcaagcagattcgaagagctgttgccctcttctaaaaaaggcttttggaggctgtgttacatgcatgccctaaagcagtcagtctgttagtatgagcaagacatctgaagtacacagttgcttttaggcttgtatagttattttctacacatgccaacacacatgatgataaaggaaccttttctaggaggcattgcagggtttcaatacacaggacatgttctagttacagaagccttgctctgctgtcaacaattgggaaatgctcattttttcatgttttgtgaatactctggtcttgctgtaagctaatgtcatggctgtgggatattagagaagtgggtttatgactctgaagaccagcagacaccagactttaaaagtgcttaaattggaatttggaaactacagtaaagaaaccttcagataccagttccatcctgaagccctctgttgaacaacagggccagatcctaaagctctttcagggagctcttctctggggctggaacagttgattatgcaaccccattgtgtggagattggatcaactgagttgtgttatttttgttttaagtcaccttgtgcgagaacctcaaccgcacctatcttgggaaccgggtatacccttttctttagcactgctatcctttttgtcttcagcacaaataagatgttcaagtgagccagaagcaagaagagccattttagtcttcatagctattggctaagagagataatgagctgatggtctattttaaccttgaaagtaaaaatgtatattttttcactacaagtacattgaacagtaaaaagtgtaacagcaaagtatatatttgatgccttctgtcttttcatgataatgtgctaacaagttgtgttaatattttactcagccagagtctcattcatttgctaagcattgggaacattatgtatattgaccttaaacataggtgtcctatatttggattgtgacttgtagactcaagctaaccttactgcctctttttcacacttgttgaaaagtctgtgaagaacatagttaaagatctccaactttggaaaatatacatgatgtgaaactggggtgctatgttaaaaataaatgtatgataactaa

SEQ ID NO: 37119 - DNA, 1980 bp, Artificial Sequence
  derived and/or modified sequence
atggaggccgccgccgccgccgccgccgccgccgccgccgccgccgccgccggcggcggctgcggcagcggccccccccccctgctgctgagcgagggcgagcagcagtgctacagcgagctgttcgccagatgcgccggcgccgccggcggcggccccggcagcggcccccccgaggccgccagagtggcccccggcaccgccaccgccgccgccggccccgtggccgacctgttcagagccagccagctgcccgccgagaccctgcaccagatcaccgagctgtgcggcgccaagagagtgggctacttcggccccacccagttctacatcgccctgaagctgatcgccgccgcccagagcggcctgcccgtgagaatcgagagcatcaagtgcgagctgcccctgcccagattcatgatgagcaagaacgacggcgagatcagattcggcaaccccgccgagctgcacggcaccaaggtgcagatcccctacctgaccaccgagaagaacagcttcaagagaatggacgacgaggacaagcaggagacccagagccccaccatgagccccctggccagcccccccagcagccccccccactaccagagagtgcccctgagccacggctacagcaagctgagaagcagcgccgagcagatgcaccccgccccctacgaggccagacagcccctggtgcagcccgagggcagcagcagcggcggccccggcaccaagcccctgagacaccaggccagcctgatcagaagcttcagcgtggagagagagctgcaggacaacagcagctaccccgacgagccctggagaatcaccgaggagcagagagagtactacgtgaaccagttcagaagcctgcagcccgaccccagcagcttcatcagcggcagcgtggccaagaacttcttcaccaagagcaagctgagcatccccgagctgagctacatctgggagctgagcgacgccgactgcgacggcgccctgaccctgcccgagttctgcgccgccttccacctgatcgtggccagaaagaacggctaccccctgcccgagggcctgccccccaccctgcagcccgagtacctgcaggccgccttccccaagcccaagtgggactgccagctgttcgacagctacagcgagagcctgcccgccaaccagcagcccagagacctgaacagaatggagaagaccagcgtgaaggacatggccgacctgcccgtgcccaaccaggacgtgaccagcgacgacaagcaggccctgaagagcaccatcaacgaggccctgcccaaggacgtgagcgaggaccccgccacccccaaggacagcaacagcctgaaggccagacccagaagcagaagctacagcagcaccagcatcgaggaggccatgaagagaggcgaggacccccccacccccccccccagaccccagaagacccacagcagagccagcagcctggacctgaacaaggtgttccagcccagcgtgcccgccaccaagagcggcctgctgccccccccccccgccctgccccccagaccctgccccagccagagcgagcaggtgagcgaggccgagctgctgccccagctgagcagagcccccagccaggccgccgagagcagccccgccaagaaggacgtgctgtacagccagccccccagcaagcccatcagaagaaagttcagacccgagaaccaggccaccgagaaccaggagcccagcaccgccgccagcggccccgccagcgccgccaccatgaagccccaccccaccgtgcagaagcagagcagcaagcagaagaaggccatccagaccgccatcagaaagaacaaggaggccaacgccgtgctggccagactgaacagcgagctgcagcagcagctgaaggaggtgcaccaggagagaatcgccctggagaaccagctggagcagctgagacccgtgaccgtgctgtag

SEQ ID NO: 37120 - protein, 591 aa, Artificial Sequence
  derived and/or modified sequence
MTLTLSVLICLGLSVGPRTCVQAGTLPKPTLWAEPASVIARGKPVTLWCQGPLETEEYRLDKEGLPWARKRQNPLEPGAKAKFHIPSTVYDSAGRYRCYYETPAGWSEPSDPLELVATGFYAEPTLLALPSPVVASGGNVTLQCDTLDGLLTFVLVEEEQKLPRTLYSQKLPKGPSQALFPVGPVTPSCRWRFRCYYYYRKNPQVWSNPSDLLEILVPGVSRKPSLLIPQGSVVARGGSLTLQCRSDVGYDIFVLYKEGEHDLVQGSGQQPQAGLSQANFTLGPVSRSHGGQYRCYGAHNLSPRWSAPSDPLDILIAGLIPDIPALSVQPGPKVASGENVTLLCQSWHQIDTFFLTKEGAAHPPLCLKSKYQSYRHQAEFSMSPVTSAQGGTYRCYSAIRSYPYLLSSPSYPQELVVSGPSGDPSLSPTGSTPTPAGPEDQPLTPTGLDPQSGLGRHLGVVTGVSVAFVLLLFLLLFLLLRHRHQSKHRTSAHFYRPAGAAGPEPKDQGLQKRASPVADIQEEILNAAVKDTQPKDGVEMDARAAASEAPQDVTYAQLHSLTLRREATEPPPSQEREPPAEPSIYAPLAIH

SEQ ID NO: 37121 - DNA, 1776 bp, Artificial Sequence
  derived and/or modified sequence
atgacgctgactctgagcgttctgatctgccttggtctgtcggtaggacccagaacatgcgttcaggccgggaccctcccaaagccaactttgtgggccgagcccgcaagtgtgattgctcgtggcaagccagtgaccctctggtgccaggggcctcttgagaccgaggagtacaggttggataaagaagggcttccatgggccagaaagcggcagaatcccttggaaccaggggcgaaagcgaagtttcacatacccagcacagtgtacgatagtgcgggcagatatcgctgctactatgagaccccggctggatggagtgagccctctgatcctctggagctggtggcgactgggttctacgctgaacccactctcctcgccttgccttcccccgttgtggcttcagggggaaacgtgacactacagtgcgacactctcgatggacttctgacatttgttttagtcgaggaagaacagaaattgcctcgtacgctgtactcccagaaacttcccaaaggcccatcacaggccctgtttccagtgggccctgtaacaccctcgtgcaggtggcgcttcagatgctattactattacaggaagaatccccaggtgtggtcaaatccctctgatctgcttgaaatcctggtccccggcgtgtcacgcaagccctcactcctaatcccgcagggatccgtcgtagctcggggggggagtctaaccctgcagtgtaggagtgatgtgggttatgacattttcgtgctttacaaggagggtgagcatgacctcgttcaggggtccggacagcaaccgcaggcggggctgtcacaggccaacttcactctgggtccggtttcccgttcacacggcggccagtacagatgttatggagcccataatctgagtcccaggtggtcggccccaagcgaccctctcgatatcctcatcgccggacttattccggatatcccagccctgtctgttcagcccggccctaaggtggcctccggcgaaaacgtgactctgctatgccagtcatggcaccaaatcgacactttttttttgacaaaggagggcgccgctcatccgccactgtgtctgaagtctaagtaccagagttacaggcatcaggccgaattctcaatgagcccagtcacctctgcccaaggcggaacgtatcgatgctactcagctatcagaagttacccttacttactctcctcaccttcttacccacaggagttggttgtcagtggaccgtccggagatcccagtctgtctccaacaggatcgacacctactcctgccgggccggaggatcagcctcttacacctacaggattggatcctcagtccgggctcggaagacacctaggcgtcgttactggagtgtctgtggcatttgtgctgctgctctttctgctcctgtttttgctcctcagacaccgccaccaaagcaagcataggacctcggcccacttttaccgccctgccggcgctgccggaccagagcctaaggaccagggactgcagaaacgagccagtcccgtggctgatattcaggaggagatactgaatgctgccgttaaggacacccaaccaaaagacggcgtcgaaatggatgcccgggcagcagcctctgaggcccctcaggacgtcacatatgcgcagttgcattcccttaccctgaggcgcgaggcgaccgagcctcccccaagccaggagagggaaccacctgcagagccttcaatttacgcccccctggctatacattag

SEQ ID NO: 37122 - DNA, 1776 bp, Artificial Sequence
  derived and/or modified sequence
atgaccctgaccctgtctgtgctgatctgcctgggcctgtctgtgggccccaggacctgtgtgcaggccggcaccctgcccaagcccaccctgtgggccgagcccgcctctgtgattgcccggggcaagcctgtgaccctgtggtgccagggccccctggagacagaggagtaccgcctggacaaggagggcctgccctgggccaggaagaggcagaaccccctggagcccggggccaaggccaagttccacatccccagcacagtgtatgacagcgctggccgctaccgctgctactatgagaccccagctggctggagcgagcccagcgaccccctggagctggtggccaccggcttctacgccgagcccaccctgctggccctgcccagccctgtggtggccagcggcggcaatgtgaccctgcagtgtgacaccctggatggcctgctgacctttgtgctggtggaggaggagcagaagctgcccaggaccctgtacagccagaagctgcccaagggccccagccaggccctcttccctgtgggccctgtgacccccagctgccgctggaggttccgctgctactactactacaggaagaacccccaggtgtggagcaaccccagcgacctgctggagatcctggtgcctggggtgtccaggaagcccagcctgctgatcccccagggctctgtggtggcccggggcggcagcctgaccctgcagtgccgcagtgatgtgggctatgacatctttgtgctgtacaaggagggggagcatgacctggtgcagggcagcggccagcagccccaggccggcctgagccaggccaacttcaccctgggccctgtgagccgcagccatggaggccagtaccgctgctacggggcccacaacctgagcccccgctggagcgcccccagcgaccccctggacatcctgattgctggcctcatcccagacatcccagccctgtctgtgcagcccggccccaaggtggccagcggggagaatgtgaccctgctgtgccagagctggcaccagattgacaccttcttcctgaccaaggagggcgccgcccacccccccctgtgcctgaagagcaagtaccagagctaccgccaccaggccgagttctccatgagccctgtgaccagcgcccagggcggcacctaccgctgctacagcgccatccgcagctacccctacctgctgagcagccccagctacccccaggagctggtggtgtctggccccagcggggaccccagcctgagccccaccggcagcacccccaccccagctggccctgaggaccagcccctgacccccaccggcctggacccccagagcggcctgggccgccacctgggcgtggtgactggagtgtctgtggcctttgtgctgctgctcttcctgctgctcttcctgctgctgcggcaccgccaccagagcaagcacaggaccagcgcccacttctacagacctgctggagctgctggccctgagcccaaggaccagggcctgcagaagagggccagccctgtggccgacatccaggaggagatcctgaatgctgctgtgaaggacacccagcccaaggatggagtggagatggatgcccgggctgctgccagcgaggccccccaggatgtgacctacgcccagctgcacagcctgaccctgcggcgggaggccacagagcccccacccagccaggagcgggagcccccagctgagcccagcatctatgcccccctggccatccactag

SEQ ID NO: 37123 - DNA, 2264 bp, Artificial Sequence
  derived and/or modified sequence
cttgtgacagggagaacccagcctccagtccacactctgcgtgtttttgtgtcctgccaggcaccgtggtctcatccgcctgcacagctgagtccagtgggagctgacgccatgaccctcaccctctcagtcctgatttgcctcgggctgagtgtgggccccaggacctgcgtgcaggcaggcaccctccccaaacccaccctctgggctgagccagcctctgtgatagctcgggggaagcccgtgaccctctggtgtcaggggcccctggagactgaggagtaccgtctggataaggagggactcccatgggcccggaagagacagaacccactggagcctggagccaaggccaagttccacattccatccacggtgtatgacagtgcagggcgataccgctgctactatgagacccctgcaggctggtcagagcccagtgaccccctggagctggtggcgacaggattctatgcagaacccactcttttagccctgccgagtcctgtggtggcctcaggaggaaatgtgaccctccagtgtgatacactggacggacttctcacgtttgttcttgttgaggaagaacagaagctccccaggaccctgtactcacagaagctccccaaagggccatcccaggccctgttccctgtgggtcccgtgacccccagctgcaggtggaggttcagatgctattactattacaggaaaaaccctcaggtgtggtcgaaccccagtgacctcctggagattctggtcccaggcgtgtctaggaagccctccctcctgatcccgcagggctctgtcgtggcccgcggaggcagcctgaccctgcagtgtcgctctgatgtcggctatgacatattcgttctgtacaaggagggggaacatgacctcgtccagggctctggccagcagccccaggctgggctctcccaggccaacttcaccctgggccctgtgagccgctcccacgggggccagtacagatgctacggtgcacacaacctctcccctaggtggtcggcccccagcgaccccctggacatcctgatcgcaggactgatccctgacatacccgccctctcggtgcagccgggccccaaggtggcctcaggagagaacgtgaccctgctgtgtcagtcatggcatcagatagacactttctttttgaccaaggagggggcagcccatcccccgctgtgtctaaagtcaaagtaccagtcttatagacaccaggctgaattctccatgagtcctgtgacctcagcccagggtggaacctaccgatgctacagcgcaatcaggtcctacccctacctgctgtccagccctagttacccccaggagctcgtggtctcaggaccctctggggatcccagcctctcacctacaggctccacccccacacctgcaggccctgaggaccagcccctcacccccacggggttggatccccagagtggtctgggaaggcacctgggggttgtgactggggtctcagtggccttcgtcctgctgctgttcctcctcctcttcctcctcctccgacatcggcatcagagcaaacacaggacatcggcccatttctaccgtcctgcaggggctgcggggccagagcccaaggaccagggcctgcagaagagggccagcccagttgctgacatccaggaggaaattctcaatgctgccgtgaaggacacacagcccaaggacggggtggagatggatgctcgggctgctgcatctgaagccccccaggatgtgacctacgcccagctacacagcttgaccctcagacgggaggcaactgagcctcctccatcccaggaaagggaacctccagctgaacccagcatctacgcccccctggccatccactagcccacgggggacccagatctcatactcaacagaaggagactcagagactccagaaggcacaggagctgcccccagtggacaccaatgaaccccagccagcctggacccctaacaaagaccaccaggacatcctgggaactctgggactcactagattctgcagtcaaagatgactaatatccttgcatttttgaaatgaagccacagacttctcaataaatcaatgagctgagaaaactgaaacagaaattagagcatggtataaatttggaatgataatgtaaatattacacattaaatgatgaaatcggaaaactacaaatgagcgaatgaattagaaaagaataaaacctacgtaattaatgaccttggcaatg

SEQ ID NO: 37124 - DNA, 1776 bp, Artificial Sequence
  derived and/or modified sequence
atgaccctgaccctgagcgtgctgatctgcctgggcctgagcgtggggcctaggacatgtgtccaagccggcaccctgcctaaacccaccctttgggctgaacctgccagcgtgatcgctcggggcaaaccagttaccctgtggtgccagggaccattggaaacggaggaataccggttggataaagaggggctgccttgggccaggaagcgtcagaatcccctggaaccaggggctaaagccaagttccacataccgtctaccgtgtacgactctgcaggccgctacaggtgctactatgagacacctgcaggttggtccgaaccatcagaccctcttgaacttgtggctaccggtttttatgccgaaccgaccttgcttgcgctgcccagtccagtggttgcctctggcggaaatgtcacgctgcagtgtgacacattagacggcttgctaacctttgttcttgtcgaggaggagcaaaaactgcctcgaacgctgtatagccagaaactgcctaaggggccatcgcaggccctatttcccgtgggacccgtgactccttcctgcaggtggcggtttcgctgttactactattataggaaaaatccacaagtgtggtccaaccctagtgatctcttagagatcctagtgccaggcgtatcccgaaaaccctccttgcttatccctcagggatcagttgtggctcgaggaggatctttgaccctgcagtgtcggagcgacgtcggttatgacattttcgtgctctacaaggagggggaacatgatctcgtgcagggtagtggacagcagccacaagccgggctttctcaggccaactttaccctgggccctgtcagccgctcacacggaggccagtatagatgttacggcgcacataatctgtccccgcgctggagcgccccctcagacccactcgacattctaattgccggcctaattccggacattccagccttgtccgtccagccaggcccaaaagtagcttctggagagaacgttaccttgctgtgccagagctggcatcagatcgacacgttctttttaaccaaggaaggcgctgcccaccccccactgtgcctgaagagcaaataccagtcctaccggcaccaggcagagtttagtatgagtccggtaacaagcgcccaaggcggcacctatcggtgttactcagctatcaggtcctacccctatctgttgtctagcccaagttacccccaggagttggtcgttagcggaccatcaggcgacccaagcttgagcccaaccggatcaacacccaccccggccggcccggaggatcagccgctgaccccgacaggtctcgaccctcagagcggcctgggcaggcatctgggcgtggtcacaggcgtgtccgttgccttcgtgctcctactgtttctgttgctgttcctgctcctccggcacagacatcagtcaaaacatagaacaagtgctcatttttatcgccccgccggcgcagccgggccagagcctaaggatcaggggctgcaaaaaagagcctcccctgtagcagatatccaggaggagattctcaacgccgcagtgaaggatacacagcccaaagacggggtcgaaatggatgccagggcagctgcgtccgaggccccccaggacgtaacatacgctcagctgcacagtctgacactccgcagagaggccactgagccgcctccatcacaggagagggagcctcctgccgagccgagtatctatgcccccctagctatccactag

SEQ ID NO: 37125 - DNA, 1776 bp, Artificial Sequence
  derived and/or modified sequence
atgactctgacactctccgtgctgatttgtctggggctctccgttgggcctcgaacatgcgtacaagctgggacactgccaaagccgactctgtgggccgaaccagctagcgtgatcgcaagaggtaagccagtgactctgtggtgccagggacccctagagaccgaagagtatcgcttagacaaggaaggcttgccttgggccaggaagaggcagaatccgcttgagcccggagctaaagccaagttccacattcccagcacagtgtatgactccgccggaaggtatcggtgctattatgagaccccagcaggatggtctgagccctcagaccccttggagcttgtcgctaccggcttctacgcagagcctacacttctggcactgcccagtcctgtcgtagcgagtgggggaaatgtgacactgcagtgcgacacactggatggcctgcttaccttcgtgttggtagaagaagaacaaaaactgccccgaaccctgtatagtcagaaactgccaaagggtccatcccaggctctgtttcccgtgggccctgtgaccccatcctgcagatggaggtttaggtgttattattattaccgcaagaacccgcaggtgtggtccaacccttcagatttactcgagattctggtgcccggagtgtctaggaagccttcacttcttattcctcaggggagcgttgtggcccgaggtggatcacttaccctgcagtgtagatccgatgtgggctacgatatcttcgtcctctacaaggagggggagcacgatttagtacagggctccgggcagcagcctcaggccggactgtcacaggccaattttaccctgggaccggtgtcacgaagtcacggaggacagtaccgttgctacggggctcataatctttctcctcgctggtccgccccttcggatcctctagatatcctgatagctggccttatcccagatattcccgctctctctgtacagccaggccctaaggttgcttctggggagaatgtgactctgctatgccagtcgtggcatcagatagatactttttttctcacaaaggaaggtgccgcacacccacccctgtgtcttaagtctaagtaccagagttaccgccatcaggcagagttttctatgtcccccgtgacatcggcccagggtggcacttataggtgctactccgccattagaagttacccatatttgctctcctccccctcctatccccaggagttagtggtctctggcccatccggagacccaagcctgtctcctacggggtccacccctacccctgcaggccctgaggatcaacccctaacccctactgggctcgatccacagtcaggattgggaagacacctaggggtggttaccggtgtgtctgtagcttttgtgcttttgttgtttctcctgctgttccttctacttcgccatagacaccagagcaaacaccggaccagcgcacatttttacaggccggcaggagcagcaggcccagaacctaaggaccaagggttgcagaagagagcctctcccgtggccgacatccaggaggaaatattaaatgccgcagtcaaagacacccaacctaaggatggcgtcgaaatggatgcacgcgcagcggctagcgaggcccctcaagacgttacgtacgcacagctgcattctctcaccctacgcagggaagccaccgagcctcctccaagtcaggagagggagccacctgcggagccgagcatatatgcgccactggctatccattag

SEQ ID NO: 37126 - DNA, 1776 bp, Artificial Sequence
  derived and/or modified sequence
atgaccctgaccctgagcgtgctgatctgcctgggcctgagcgtgggccccagaacctgcgtgcaggccggcaccctgcccaagcccaccctgtgggccgagcccgccagcgtgatcgccagaggcaagcccgtgaccctgtggtgccagggccccctggagaccgaggagtacagactggacaaggagggcctgccctgggccagaaagagacagaaccccctggagcccggcgccaaggccaagttccacatccccagcaccgtgtacgacagcgccggcagatacagatgctactacgagacccccgccggctggagcgagcccagcgaccccctggagctggtggccaccggcttctacgccgagcccaccctgctggccctgcccagccccgtggtggccagcggcggcaacgtgaccctgcagtgcgacaccctggacggcctgctgaccttcgtgctggtggaggaggagcagaagctgcccagaaccctgtacagccagaagctgcccaagggccccagccaggccctgttccccgtgggccccgtgacccccagctgcagatggagattcagatgctactactactacagaaagaacccccaggtgtggagcaaccccagcgacctgctggagatcctggtgcccggcgtgagcagaaagcccagcctgctgatcccccagggcagcgtggtggccagaggcggcagcctgaccctgcagtgcagaagcgacgtgggctacgacatcttcgtgctgtacaaggagggcgagcacgacctggtgcagggcagcggccagcagccccaggccggcctgagccaggccaacttcaccctgggccccgtgagcagaagccacggcggccagtacagatgctacggcgcccacaacctgagccccagatggagcgcccccagcgaccccctggacatcctgatcgccggcctgatccccgacatccccgccctgagcgtgcagcccggccccaaggtggccagcggcgagaacgtgaccctgctgtgccagagctggcaccagatcgacaccttcttcctgaccaaggagggcgccgcccacccccccctgtgcctgaagagcaagtaccagagctacagacaccaggccgagttcagcatgagccccgtgaccagcgcccagggcggcacctacagatgctacagcgccatcagaagctacccctacctgctgagcagccccagctacccccaggagctggtggtgagcggccccagcggcgaccccagcctgagccccaccggcagcacccccacccccgccggccccgaggaccagcccctgacccccaccggcctggacccccagagcggcctgggcagacacctgggcgtggtgaccggcgtgagcgtggccttcgtgctgctgctgttcctgctgctgttcctgctgctgagacacagacaccagagcaagcacagaaccagcgcccacttctacagacccgccggcgccgccggccccgagcccaaggaccagggcctgcagaagagagccagccccgtggccgacatccaggaggagatcctgaacgccgccgtgaaggacacccagcccaaggacggcgtggagatggacgccagagccgccgccagcgaggccccccaggacgtgacctacgcccagctgcacagcctgaccctgagaagagaggccaccgagcccccccccagccaggagagagagccccccgccgagcccagcatctacgcccccctggccatccactag

SEQ ID NO: 37127 - protein, 491 aa, Artificial Sequence
  derived and/or modified sequence
MTLTLSVLICLGLSVGPRTCVQAGTLPKPTLWAEPASVIARGKPVTLWCQGPLETEEYRLDKEGLPWARKRQNPLEPGAKAKFHIPSTVYDSAGRYRCYYETPAGWSEPSDPLELVATGVSRKPSLLIPQGSVVARGGSLTLQCRSDVGYDIFVLYKEGEHDLVQGSGQQPQAGLSQANFTLGPVSRSHGGQYRCYGAHNLSPRWSAPSDPLDILIAGLIPDIPALSVQPGPKVASGENVTLLCQSWHQIDTFFLTKEGAAHPPLCLKSKYQSYRHQAEFSMSPVTSAQGGTYRCYSAIRSYPYLLSSPSYPQELVVSGPSGDPSLSPTGSTPTPAGPEDQPLTPTGLDPQSGLGRHLGVVTGVSVAFVLLLFLLLFLLLRHRHQSKHRTSAHFYRPAGAAGPEPKDQGLQKRASPVADIQEEILNAAVKDTQPKDGVEMDARAAASEAPQDVTYAQLHSLTLRREATEPPPSQEREPPAEPSIYAPLAIH

SEQ ID NO: 37128 - DNA, 1476 bp, Artificial Sequence
  derived and/or modified sequence
atgaccctcaccctgtccgttcttatatgcctgggcctgtcagtcggacctcggacctgcgtacaggccggcacactgccaaaacccactctttgggccgaaccagcatccgtcatcgcaagagggaaacccgtcaccctgtggtgccagggacccttggaaacggaagagtacaggctcgacaaagaaggcctgccctgggcccggaagcgacagaacccacttgaacccggtgcaaaagcgaagtttcacatcccgtctactgtgtatgacagcgctggcagatatcgatgttattatgagacccctgcaggttggtccgaaccaagcgaccccttggagcttgttgctaccggcgtgtcccgtaaaccatctcttctcataccacaaggaagcgtggtggcccgtggtgggtccctcaccctccaatgtcgaagcgatgtggggtacgacatatttgttctgtacaaggaaggagagcatgatctcgtccagggaagcggtcagcagccccaggctgggctgagccaggctaacttcacattagggccagtcagccgaagtcatggaggacagtacaggtgctacggcgcgcacaacctgtccccacggtggtccgctccctctgatccacttgacattctgatcgctggactgataccagacatccccgctctgagtgtgcagcccggcccgaaagtggcttctggagaaaatgtcactcttctgtgccagtcgtggcatcagatagacacgttcttcctgacaaaggagggcgccgcccatcccccgctttgccttaagtccaagtaccagtcttatcgtcaccaggcagagttctcaatgagtcctgtgaccagcgcccagggtgggacctaccgctgttattccgctattaggagttacccctacctcttgtcctcacccagctatccacaagagctggtggtgagtgggccctcaggagatccgtcactgtcccctacagggagcactccaacccccgctgggccggaggaccaaccactgacaccaaccggcctggatccgcaaagtgggctgggtcgtcatctgggtgtggtaaccggggtgtcggtagctttcgtccttctcctgttcttgctgcttttcctgctcctgcgacataggcatcagtccaaacacaggacctccgcacacttctatcgtcccgccggggctgcaggcccagagccaaaagaccagggcctacaaaaacgagcctcccccgtcgcagatatccaggaggagattctgaatgctgcggttaaggatacccaaccaaaagatggtgtggagatggatgctcgagcggccgccagcgaggctccacaggacgtcacctatgcccagcttcactccctcacccttcgtagagaggcaacagaaccccctccttctcaggagcgtgagccccccgctgagccttctatatatgcccccctagccatccactag

SEQ ID NO: 37129 - DNA, 1476 bp, Artificial Sequence
  derived and/or modified sequence
atgaccctgaccctgtctgtgctgatctgcctgggcctgtctgtgggccccaggacctgtgtgcaggccggcaccctgcccaagcccaccctgtgggccgagcccgcctctgtgattgcccggggcaagcctgtgaccctgtggtgccagggccccctggagacagaggagtaccgcctggacaaggagggcctgccctgggccaggaagaggcagaaccccctggagcccggggccaaggccaagttccacatccccagcacagtgtatgacagcgctggccgctaccgctgctactatgagaccccagctggctggagcgagcccagcgaccccctggagctggtggccaccggggtgtccaggaagcccagcctgctgatcccccagggctctgtggtggcccggggcggcagcctgaccctgcagtgccgcagtgatgtgggctatgacatctttgtgctgtacaaggagggggagcatgacctggtgcagggcagcggccagcagccccaggccggcctgagccaggccaacttcaccctgggccctgtgagccgcagccatggaggccagtaccgctgctacggggcccacaacctgagcccccgctggagcgcccccagcgaccccctggacatcctgattgctggcctcatcccagacatcccagccctgtctgtgcagcccggccccaaggtggccagcggggagaatgtgaccctgctgtgccagagctggcaccagattgacaccttcttcctgaccaaggagggcgccgcccacccccccctgtgcctgaagagcaagtaccagagctaccgccaccaggccgagttctccatgagccctgtgaccagcgcccagggcggcacctaccgctgctacagcgccatccgcagctacccctacctgctgagcagccccagctacccccaggagctggtggtgtctggccccagcggggaccccagcctgagccccaccggcagcacccccaccccagctggccctgaggaccagcccctgacccccaccggcctggacccccagagcggcctgggccgccacctgggcgtggtgactggagtgtctgtggcctttgtgctgctgctcttcctgctgctcttcctgctgctgcggcaccgccaccagagcaagcacaggaccagcgcccacttctacagacctgctggagctgctggccctgagcccaaggaccagggcctgcagaagagggccagccctgtggccgacatccaggaggagatcctgaatgctgctgtgaaggacacccagcccaaggatggagtggagatggatgcccgggctgctgccagcgaggccccccaggatgtgacctacgcccagctgcacagcctgaccctgcggcgggaggccacagagcccccacccagccaggagcgggagcccccagctgagcccagcatctatgcccccctggccatccactag

SEQ ID NO: 37130 - DNA, 1864 bp, Artificial Sequence
  derived and/or modified sequence
gtttttgtgtcctgccaggcaccgtggtctcatccgcctgcacagctgagtccagtgggagctgacgccatgaccctcaccctctcagtcctgatttgcctcgggctgagtgtgggccccaggacctgcgtgcaggcaggcaccctccccaaacccaccctctgggctgagccagcctctgtgatagctcgggggaagcccgtgaccctctggtgtcaggggcccctggagactgaggagtaccgtctggataaggagggactcccatgggcccggaagagacagaacccactggagcctggagccaaggccaagttccacattccatccacggtgtatgacagtgcagggcgataccgctgctactatgagacccctgcaggctggtcagagcccagtgaccccctggagctggtggcgacaggcgtgtctaggaagccctccctcctgatcccgcagggctctgtcgtggcccgcggaggcagcctgaccctgcagtgtcgctctgatgtcggctatgacatattcgttctgtacaaggagggggaacatgacctcgtccagggctctggccagcagccccaggctgggctctcccaggccaacttcaccctgggccctgtgagccgctcccacgggggccagtacagatgctacggtgcacacaacctctcccctaggtggtcggcccccagcgaccccctggacatcctgatcgcaggactgatccctgacatacccgccctctcggtgcagccgggccccaaggtggcctcaggagagaacgtgaccctgctgtgtcagtcatggcatcagatagacactttctttttgaccaaggagggggcagcccatcccccgctgtgtctaaagtcaaagtaccagtcttatagacaccaggctgaattctccatgagtcctgtgacctcagcccagggtggaacctaccgatgctacagcgcaatcaggtcctacccctacctgctgtccagccctagttacccccaggagctcgtggtctcaggaccctctggggatcccagcctctcacctacaggctccacccccacacctgcaggccctgaggaccagcccctcacccccacggggttggatccccagagtggtctgggaaggcacctgggggttgtgactggggtctcagtggccttcgtcctgctgctgttcctcctcctcttcctcctcctccgacatcggcatcagagcaaacacaggacatcggcccatttctaccgtcctgcaggggctgcggggccagagcccaaggaccagggcctgcagaagagggccagcccagttgctgacatccaggaggaaattctcaatgctgccgtgaaggacacacagcccaaggacggggtggagatggatgctcgggctgctgcatctgaagccccccaggatgtgacctacgcccagctacacagcttgaccctcagacgggaggcaactgagcctcctccatcccaggaaagggaacctccagctgaacccagcatctacgcccccctggccatccactagcccacgggggacccagatctcatactcaacagaaggagactcagagactccagaaggcacaggagctgcccccagtggacaccaatgaaccccagccagcctggacccctaacaaagaccaccaggacatcctgggaactctgggactcactagattctgcagtcaaagatgactaatatccttgcatttttgaaatgaagccacagacttctcaataaatcaatgagctgagaaaactgaaacagaaattagagcatggtataaatttggaatgataatgtaaatattacacattaaatgatgaaatcggaaaactac

SEQ ID NO: 37131 - DNA, 1476 bp, Artificial Sequence
  derived and/or modified sequence
atgaccctgaccctgagcgtgctgatctgcctgggcctgagcgtgggaccccgaacatgtgtacaggctgggaccttaccaaagccaaccctttgggccgagccagcctctgtgattgcccgcggaaagccagtcactttgtggtgccaaggacctcttgaaaccgaggagtaccgcctggataaggaaggcttgccgtgggctcgaaagcgacagaatcctctggagcctggggcgaaggccaagttccacattccatcaaccgtctacgattcagcaggtcgataccgatgttactatgagacacccgccggttggtctgagcctagcgatccactggagctggtcgctacaggagtctctcggaaacctagcttgttaattccccaggggtctgtagtggcccggggtgggtccctcacactgcagtgcaggtccgacgtaggatacgacatatttgtactctacaaggaaggggaacacgatcttgtgcagggttctggtcagcagccccaggccggcctgtcccaggcgaatttcactctcggccctgtttctagatctcacgggggtcagtacaggtgttacggtgcccacaatctcagtccaaggtggtcggcccctagtgaccctcttgatatcctaatagcagggctgatcccggatatcccagcgttgtctgtccagcctggacctaaggttgcctctggggagaatgtgactttactatgccagtcatggcatcagatcgacacgttcttcttgacgaaagaaggcgcagcacaccccccattgtgcctaaaaagcaagtaccagtcctaccggcaccaggccgagtttagcatgtcacctgtgacgtccgctcaaggtggaacttatagatgctactctgcgattcggagttacccctatctgctcagcagcccttcttaccctcaggaattggtcgttagcgggccttcaggcgatccttccttaagtcccacggggtcaacccctactcccgctggacccgaagatcaaccacttactccgactggcttggacccccaatctggtcttggccggcatctgggagtggtgaccggtgtctcggtggcgttcgtgctgctattgttcctcctgctgtttctgctgctcagacacagacaccaatccaagcacaggacgtccgcgcacttttacaggccagccggagccgctggaccagagcccaaagatcaagggttgcagaagagggcctccccagttgcggacattcaggaagagatcctcaacgcagctgtgaaggacacccaaccaaaggacggcgtcgagatggacgctcgggccgcagcttcagaggcaccccaagacgtcacgtatgcccagcttcatagtttaactttaaggagggaagctaccgagcctcccccttcccaggagcgcgaacccccagccgaaccttctatctacgcaccgctggccatccattag

SEQ ID NO: 37132 - DNA, 1476 bp, Artificial Sequence
  derived and/or modified sequence
atgacactgactttatctgtgctgatctgccttggactcagcgtcgggccacggacctgcgtccaggccggaacactgcccaagcccactctgtgggccgagcctgcttctgtgattgctcggggtaagcctgtaacactatggtgtcaaggaccattggaaaccgaggagtacaggttggataaggagggcttaccctgggctcgaaagcgccagaatccgcttgagcccggagccaaagccaaatttcatataccatccaccgtctatgattcagctggcagatatcgatgctactacgagacccctgcaggatggtctgaaccctcagatcccttggagttggtggcgaccggagtgtctagaaaaccctctctgctgatcccacaaggctcagtcgtagccagaggcggaagcctgacattacagtgccgatccgatgtcggttacgatattttcgtgctctacaaggaaggtgagcacgacctagtgcagggaagtggacagcagccccaggccggtttatcccaagccaacttcacattgggccctgtgagcagatcccacggaggacaatatagatgctatggtgctcataatctgtcaccaaggtggtccgcaccaagcgacccccttgacatcctcatcgctgggcttataccagatatccccgcactgtcagtgcagccagggcctaaggtggcatcaggggaaaatgtgacactcctttgtcaatcctggcaccagattgataccttcttcctgacaaaggaaggagcagcacacccccctctgtgcctgaaatccaagtaccagtcataccgacaccaggcagaattctccatgtcgccagtgacttcggctcagggcggaacttaccgttgctacagcgctataaggtcctatccttatctgctttcgtcccccagctatcctcaagaactggtcgtaagcgggccttctggcgatccatcccttagcccaactgggagcactcccacacctgcgggacccgaagatcagcccctcactcccacgggcctcgacccccagtcaggactggggagacacctgggggtggttacaggggtgagcgtcgctttcgtgcttctgcttttcctcctcttgtttcttctgctccggcatcgtcatcagtccaaacataggacctctgcccacttttacagacctgctggcgcagcaggtcccgagccaaaagatcagggtctacagaagcgcgcttcgccggtagccgacatccaggaagagattttgaacgcagcggttaaggacacacagccaaaggacggggttgagatggacgcaagagccgctgcttccgaggcccctcaggacgtaacgtatgctcaattacattccctcacccttagacgcgaagccaccgagccccctccgagtcaagagagagaacctccagctgaacctagcatctacgcacccctggccatacattag

SEQ ID NO: 37133 - DNA, 1476 bp, Artificial Sequence
  derived and/or modified sequence
atgaccctgaccctgagcgtgctgatctgcctgggcctgagcgtgggccccagaacctgcgtgcaggccggcaccctgcccaagcccaccctgtgggccgagcccgccagcgtgatcgccagaggcaagcccgtgaccctgtggtgccagggccccctggagaccgaggagtacagactggacaaggagggcctgccctgggccagaaagagacagaaccccctggagcccggcgccaaggccaagttccacatccccagcaccgtgtacgacagcgccggcagatacagatgctactacgagacccccgccggctggagcgagcccagcgaccccctggagctggtggccaccggcgtgagcagaaagcccagcctgctgatcccccagggcagcgtggtggccagaggcggcagcctgaccctgcagtgcagaagcgacgtgggctacgacatcttcgtgctgtacaaggagggcgagcacgacctggtgcagggcagcggccagcagccccaggccggcctgagccaggccaacttcaccctgggccccgtgagcagaagccacggcggccagtacagatgctacggcgcccacaacctgagccccagatggagcgcccccagcgaccccctggacatcctgatcgccggcctgatccccgacatccccgccctgagcgtgcagcccggccccaaggtggccagcggcgagaacgtgaccctgctgtgccagagctggcaccagatcgacaccttcttcctgaccaaggagggcgccgcccacccccccctgtgcctgaagagcaagtaccagagctacagacaccaggccgagttcagcatgagccccgtgaccagcgcccagggcggcacctacagatgctacagcgccatcagaagctacccctacctgctgagcagccccagctacccccaggagctggtggtgagcggccccagcggcgaccccagcctgagccccaccggcagcacccccacccccgccggccccgaggaccagcccctgacccccaccggcctggacccccagagcggcctgggcagacacctgggcgtggtgaccggcgtgagcgtggccttcgtgctgctgctgttcctgctgctgttcctgctgctgagacacagacaccagagcaagcacagaaccagcgcccacttctacagacccgccggcgccgccggccccgagcccaaggaccagggcctgcagaagagagccagccccgtggccgacatccaggaggagatcctgaacgccgccgtgaaggacacccagcccaaggacggcgtggagatggacgccagagccgccgccagcgaggccccccaggacgtgacctacgcccagctgcacagcctgaccctgagaagagaggccaccgagcccccccccagccaggagagagagccccccgccgagcccagcatctacgcccccctggccatccactag

SEQ ID NO: 37134 - protein, 372 aa, Artificial Sequence
  derived and/or modified sequence
MNHKSKKRIREAKRSARPELKDSLDWTRHNYYESFSLSPAAVADNVERADALQLSVEEFVERYERPYKPVVLLNAQEGWSAQEKWTLERLKRKYRNQKFKCGEDNDGYSVKMKMKYYIEYMESTRDDSPLYIFDSSYGEHPKRRKLLEDYKVPKFFTDDLFQYAGEKRRPPYRWFVMGPPRSGTGIHIDPLGTSAWNALVQGHKRWCLFPTSTPRELIKVTRDEGGNQQDEAITWFNVIYPRTQLPTWPPEFKPLEILQKPGETVFVPGGWWHVVLNLDTTIAITQNFASSTNFPVVWHKTVRGRPKLSRKWYRILKQEHPELAVLADSVDLQESTGIASDSSSDSSSSSSSSSSDSDSERIRDTCGGRAHP

SEQ ID NO: 37135 - protein, 414 aa, Artificial Sequence
  derived and/or modified sequence
MNHKSKKRIREAKRSARPELKDSLDWTRHNYYESFSLSPAAVADNVERADALQLSVEEFVERYERPYKPVVLLNAQEGWSAQEKWTLERLKRKYRNQKFKCGEDNDGYSVKMKMKYYIEYMESTRDDSPLYIFDSSYGEHPKRRKLLEDYKVPKFFTDDLFQYAGEKRRPPYRWFVMGPPRSGTGIHIDPLGTSAWNALVQGHKRWCLFPTSTPRELIKVTRDEGGNQQDEAITWFNVIYPRTQLPTWPPEFKPLEILQKPGETVFVPGGWWHVVLNLDTTIAITQNFASSTNFPVVWHKTVRGRPKLSRKWYRILKQEHPELAVLADSVDLQESTGIASDSSSDSSSSSSSSSSDSDSECESGSEGDGTVHRRKKRRTCSMVGNGDTTSQDDCVSKERSSSRIRDTCGGRAHP

SEQ ID NO: 37136 - DNA, 1245 bp, Artificial Sequence
  derived and/or modified sequence
atgaatcataaaagtaaaaagaggatccgtgaggcaaaacgatcagcccggccagaactaaaagacagcctggattggaccaggcacaactactatgaaagcttttcactgagccctgcggccgtggcagataatgtggagagagcagacgctcttcagttgagcgtggaggagttcgtcgagagatatgagagaccatacaaaccagtcgttttgcttaacgcccaagaggggtggtccgcccaagaaaagtggaccctcgagaggttgaagcgaaaatataggaaccagaagttcaaatgtggagaggacaatgacggatacagcgtgaaaatgaaaatgaagtactacatagagtacatggaatctacgcgggacgactcccctctgtatatttttgacagctcatatggggaacatcccaaacgacggaaactgctcgaagactataaagtccctaagttctttactgatgatttgtttcagtacgccggagaaaagaggaggcctccgtatcgctggtttgtgatgggtccccctagatccggtactggcattcacatcgatcctcttggtacaagcgcatggaacgctctggtgcagggacataagcgctggtgtctgttcccaaccagcacaccgcgcgagctgattaaagtcacacgtgacgagggaggcaatcagcaggatgaggctatcacttggttcaatgtgatttatccccgaacacagctacctacttggcctcccgagtttaagcccctcgaaattctccagaaacctggtgaaacagtgtttgtgcctggcgggtggtggcacgttgtgctcaatctggacacaactatcgcaatcacgcagaatttcgcttcttctaccaatttccctgtcgtgtggcacaaaacagtgcgagggcgaccaaagttgagtcgtaagtggtatcgaatactgaagcaggagcatccagagctggccgtgctggcagatagtgtggacttgcaggaatctaccggaattgcatccgacagctcttcggactcctcctcgtcttcgtccagcagttcttccgacagcgattcggagtgtgagtccggatccgagggagacggtaccgtgcacagaaggaaaaagagacgcacttgctcaatggtgggaaacggtgacacaacttcacaggacgactgcgtatctaaggagcgcagtagtagccggatccgggatacatgtggcggaagggcccatccttag

SEQ ID NO: 37137 - DNA, 5298 bp, Artificial Sequence
  derived and/or modified sequence
gaagacggcggccgcttgcccaacccgaggctcgggaggtggctggggagtgaattttctggaaggcgactttaaaggcgccgggactgagcgaagggcgtttgggtactgccgtcgccgccgcccaggccggggaggggtgcgttagtgtcaggaagcgggctgcgccgaggtcgtagcggaaccagctggcgaccccgcagaatgaaccacaagagcaagaagcgcatccgcgaggccaagcggagtgcgcggccggagctcaaggactcgctggattggacccggcacaactactacgagagcttctcgctgagcccggcggccgtggcggataacgtggaaagggcagatgctttacagctgtctgtggaagaatttgtggagcggtatgaaagaccttacaagcccgtggttttgttgaatgcgcaagagggctggtctgcgcaggagaaatggactctggagcgcctaaaaaggaaatatcggaaccagaagttcaagtgtggtgaggataacgatggctactcagtgaagatgaagatgaaatactacatcgagtacatggagagcactcgagatgatagtcccctttacatctttgacagcagctatggtgaacaccctaaaagaaggaaacttttggaagactacaaggtgccaaagtttttcactgatgaccttttccagtatgctggggagaagcgcaggcccccttacaggtggtttgtgatggggccaccacgctccggaactgggattcacatcgaccctctgggaaccagtgcctggaatgccttagttcagggccacaagcgctggtgcctgtttcctaccagcactcccagggaactcatcaaagtgacccgagacgaaggagggaaccagcaagacgaagctattacctggtttaatgttatttatccccggacacagcttccaacctggccacctgaattcaaacccctggaaatcttacaaaaaccaggagagactgtctttgtaccaggaggctggtggcatgttgtcctcaatctcgacactactatcgccatcacccaaaattttgccagcagcaccaacttccctgtggtatggcacaagacggtaagagggagaccaaagttatcaaggaaatggtataggattttgaagcaagagcaccccgagttggcagtcctcgcagactcggttgaccttcaggagtccacagggatagcttccgacagctccagcgactcttccagctcctccagctccagttcgtcagactccgactcagagtgcgagtctggatccgagggcgatgggacagtgcaccgcaggaagaagaggaggacgtgcagcatggtgggaaacggggacaccacctcccaggacgactgtgtcagcaaagagcgcagctcctccaggattagggacacttgtggaggccgggctcacccctgagcagataaagagactctccctgaggtgctttcagcgtaagcttttggcagccacccaactcagttctcgcatcttctgctcctaccttctcctctgtcttctttgaatttggatattccttccctggtccaagctcctatcttcggtcaaatgctgtttttactgcttcctaaggatagattatcaagaaatttaacagctcggccagctcagtgaaacactgaagctaatgggatgttgggtaagaaggttctgtgctgtctcattgaaaaccgagccagtcaaccacaaggctggcagggtgtgatccttgtaacgtcttgtgtctgttacctcacggatgtcggtaaggagtttccacagagccagctgtgtaccacagagactgagagtggtgagtggactttgtgagccaattatgtgtcggaaggacttggagtctgcccttcttcctgtatgtcatcatcagcccacaaatgcattcagtggcagtgacccagcaccatcaccatcacccactgctcagtctgtcttaggattccttatctttttctccatcatcatagagactgaaatttcaggggtgtttttgtacagtgtatttttttgtgggggggtgatacattggggttttttgtttgcatagagtgggaacggtgtgcaatgtgctcttaccacagaacttaaagtatgaataggctccattcttccgcaccatgggatccataagaagtgctcactttgcgaggtactctgagattagcgttccccatttgtttgacctacagacgttaagtgggtgacttgtgttacacacggggagtaaattcagagatggcacctgtagtctttgcagtctgttgatacttctaaataactaactggatgactttttggggattgaccagcagatgccatctcttgccctcttgattcacctgcttgccttaatttgtccctaaattcaactaaacttcaataagaggggttgtcaaggccatggggcgcacttggaagcactgcctgggctggagcgttggaggcattggcaggcaggtgggaaggagctctcactgcagtgttcacaggcagggaggctgtgtgtggatgtgttagaattgtgtgctgttgcctctcaaaatatccactagaaacaggtgtaaccaggaaaatacaggtctctgctcactgttattaacagactgtcatttcctgacattgggtcatgtggctttactctaggaggctggttctctatttttgtcttagttcaattttctgcatcctcaaatgccaaccccagtatgtggctgggtaggtagaactgtgctgcctgcctgccatgggggctgctctccctccttacccccacgcccacagcccccttggttctgtggtgggcacaggatgtgtttgggtgtgagtaaagtcaaactctgaatgtataatctcttggtagtaatatctgagtggtgttgctactcctgctttttaaaaagacttttcttgccatctataaaaagcttttttctttttcccagcattgctcctgtgctgccacgcttgccctttttccttaccttcctttcagttttctatcaacaactcctctaaacttcagtttaaaataaaaaacagcccaaaaaggctctttgccaccagggggcgtggtaggacacgttgccagtggtctggataggggagcagaaattttgaattttaaaaattagccaccaaggccaggtgcagtggctcacacctgtaatcccagcactttgggaagctgaggcagggggattgcttgagtccaggagttcaagaccagtctgggcaacatagtgagatcccatctctcaaaaaaataataatctagaaaataaagattagccacccagttttctttctccagatgctaaagttgattcctgtttgataacagtattccagaaatgaggggaataacatatctgataggcccaagtcagctctggatagtacagtgtctggatagtacagattctgtgctcctgggacatgctttgtttattcctgccaggccagggattcagcagccctattccccaacccccgttactgtctctgtgggctagccaggctgtccgttatgtaagcacaacaggggcaaggtggggaaaccgtgtgtggaaaaggagtggagtggtggcgggtggccaaggtagactaggaagagtgggtacccagagaccacttgttcagaagttaactcctcttcccatctggcgtgagctactccattgaatggtgccaacaacagtaaagtgaaggagataatgttagattattttcagggatgattctccaagatgacagcagatcttaaaaccaaagagctgggtcctggaagaagggatcttggattattaacttctgatggaaggaccagagtgggagagagaagagttggggacctagaacatcaggaggaccctgggtctttggggatgaggcttcaccatcagctggaagaatccatgcttcacacacatgcctctgccattagtggtactgggatgtttagggtgacatccttgaggggagagccactgaaaagagggacattcacattttgctgtattcttgcagctgtccgtgtcttaataattcaagcgttcaataggtgtttgagggccaggcactgctcttgaggtgctggagataacggtgacaagcccaggtccctgacaagctccacaagcttaatggacagtgaatgtgcggctgttgcggctgttcacagggccgctggtgagggcaggtagaagaaagtgcagaccttcttaaatgcaggtgtaacggatctacatgaaagagcataattaacaccaatgtatacttaaggtagtaacagcttcttcataaagtagcaaaactaaggatctgtgggaaggttgctggtgcaaatgctttataagcttactagagactgagccttggatttaggactttagacgagtataggatggaacaaaatttttgcagtaaatgtaaaaaatgctgtgtaggaggaaggcgtataaggatgccccagctgtaggttctttagattgtctgtagtatttccacgagtaagttgtttttgatgtgtgtactggtattgctggtagatttgaagtggagtctggcggcttcttccacactcccctcccactagcttgtgtcaagatgtgacatcctatgcagcaaaactaggtgagcttgcacccccaggcggtggctctcaactttgtctcattgttcagaaatttcggccaggcgccgtagctcacccctgtaatcccagcactttgggaggccatggcaggtggatcacttgaggtcaggagttcaagaccagcctggccaacacggtgaaaccccgtctctactaaaaatacaaaaattagccaggtgtggtggcacatgcctgtagtcccagctacttggtcaactcaggcaggagaatcacttgaacccaggaggcagaggttgcagtgagctgagatcaagccactccagcctgggtgacagaccgagactctgtctttaaaaaaaaagaaatgtcatctaagccccagtgaacctcctgggaggagagctagccctggccagctgtctccaaagtgactggatgctacagaagaactgggactgtcttctgcacactcgtgcctcctggagttgtcagaacactgagcagtctcctagttctgcgtccgtctagccatggggtctgccatgaaagcctgtggatctgctattgggttggtattttaaactttcacttgggtgaaacttgttcatcattttaaataaagcaacatgatttgg

SEQ ID NO: 37138 - DNA, 1245 bp, Artificial Sequence
  derived and/or modified sequence
atgaaccacaagagcaagaagaggatccgggaggccaagaggtctgcccggcctgagctgaaggacagcctggactggaccaggcacaactactatgagagcttcagcctgagccctgctgctgtggccgacaacgtggagcgggcagatgccctgcagctgtctgtggaggagtttgtggagagatatgagcggccctacaagcctgtggtgctgctgaatgcccaggagggctggagcgcccaggagaagtggaccctggagcggctgaagaggaagtacagaaaccagaagttcaagtgtggagaagataatgatggctacagcgtgaagatgaagatgaagtactacatcgagtacatggagagcaccagagatgacagccccctgtacatctttgacagcagctatggagagcaccccaagaggaggaagctgctggaggactacaaggtgcccaagttcttcacagatgacctcttccagtatgctggggagaagaggcggcccccctaccgctggtttgtgatgggccccccaagaagtggcaccggcatccacatcgaccccctgggcaccagcgcctggaatgccctggtgcagggccacaagcgctggtgcctcttccccaccagcaccccccgggagctgatcaaggtgaccagagatgaaggaggcaaccagcaggatgaggccatcacctggttcaacgtcatctaccccaggacccagctgcccacctggcccccagagttcaagcccctggagatcctgcagaagccaggagagaccgtgtttgtgcctgggggctggtggcacgtggtgctgaacctggacaccaccatcgccatcacccagaactttgccagcagcaccaacttccctgtggtgtggcacaagacagtgcggggccggcccaagctgagcaggaagtggtaccgcatcctgaagcaggagcaccctgagctggccgtgctggccgacagcgtggacctgcaggagagcacaggcatcgccagtgacagcagcagtgacagcagcagcagcagcagcagcagcagcagtgacagcgacagtgaatgtgagagcggctctgaaggagatggcaccgtgcacaggaggaagaagaggaggacctgcagcatggtgggcaatggagacaccaccagccaggatgactgtgtgtccaaggagaggagcagcagccgcatccgggacacctgtggcggccgggcccacccctag

SEQ ID NO: 37139 - DNA, 1245 bp, Artificial Sequence
  derived and/or modified sequence
atgaaccacaagagcaagaagcggatccgggaggccaagcggagcgcgaggcccgagttaaaagattctctggattggacccgtcataattactacgagagcttctccttaagtccagcagccgtagctgacaacgtcgagcgagctgacgccctgcagcttagcgtggaagaatttgttgagaggtatgaacgcccgtataagccagtagtcctgcttaatgcgcaagaaggatggagtgctcaggagaagtggacattggagcgcctcaaacggaaatatagaaatcagaaatttaaatgtggggaggacaatgacggctattccgttaaaatgaagatgaagtattatatcgaatacatggaatctaccagagatgactcgccattatacatctttgacagcagctatggtgagcacccaaaacgccgaaaattactggaagactacaaggtacctaagtttttcacggacgacctgttccagtacgcaggggagaaacgtaggcccccctacaggtggttcgttatgggcccccctcgctctgggaccggcatacatatcgacccattggggaccagtgcttggaacgcacttgttcagggacacaaacggtggtgcttgtttcctacatccacaccaagggagctgataaaggtgactagagatgagggcggaaaccaacaggatgaggccataacatggttcaacgttatttatccccggactcaattacccacctggccaccagagttcaagccgctcgaaatactccagaagcccggtgaaaccgtgtttgtgcctggtggttggtggcacgtggtgcttaacttagacacgaccatagccatcactcagaactttgcatccagcactaattttcccgtggtgtggcacaagaccgtaaggggccgtcccaaattgtcccgcaaatggtacaggatactgaagcaggaacatccggaactggccgtgcttgctgattcagttgacctccaggagtctaccggcatagcttccgacagcagtagcgacagttctagttcctccagttctagttcgtcagactcagattccgagtgcgagagtggctctgagggcgacggaacagttcatagaagaaaaaagcggcggacctgttctatggtgggcaatggagacacaacatctcaagatgattgtgtcagtaaagaacgcagttcctcacgaattcgcgatacatgcggcggccgtgcccacccatag

SEQ ID NO: 37140 - DNA, 1245 bp, Artificial Sequence
  derived and/or modified sequence
atgaatcacaagagcaaaaaacgaattcgcgaggccaagaggtcagcacgacctgagctgaaggattctcttgactggactagacataattactacgagagtttctccctctctcctgctgccgttgcagacaatgttgaacgagccgacgccctgcagctatcggtagaggaatttgttgagaggtacgagcggccatataaacccgtggtgttactgaatgcccaggaaggctggtcagcccaggaaaagtggaccctggagcggcttaagcgtaaataccggaaccagaagtttaaatgtggcgaggacaatgatgggtacagcgtaaagatgaagatgaaatactacatcgaatatatggagagcaccagagacgattctcctctatacatcttcgatagttcttacggcgaacaccccaagagacgcaagcttctcgaggattacaaggtacctaagttctttactgacgatctgtttcagtatgccggagagaagcgaaggcccccatatagatggtttgtaatgggacctccaaggtccggaacaggtattcatattgaccctttgggtacaagtgcttggaatgcactggtacaaggacacaagcgctggtgcctgttcccaacgtccacacctcgggagctcattaaagtgacacgggacgaagggggtaatcaacaagacgaggcgatcacctggttcaatgtgatctaccctcgaactcagcttcccacctggcctccagaatttaagccactggagattttgcagaaacctggagagaccgtgttcgtgccaggcggatggtggcatgtcgtgttgaacctcgacacaacaatcgctatcacacagaatttcgcttctagcacaaattttccagtggtttggcacaaaacggtccgagggcgaccaaagctgtctcgtaagtggtatcggattctgaaacaggaacatcccgaactggccgtcctggcagactccgttgatttgcaggagtcgactgggattgcatctgatagctcgagcgactcttctagctcatcgagctcatcctccagtgattctgatagcgagtgcgagagcggtagcgaaggtgatgggacggtgcacaggcgcaaaaagcgtcgaacctgtagcatggtcggtaatggtgacaccacgtcacaagatgactgtgtcagcaaggaacgctcctcatcaagaattcgggacacatgcggcggacgagctcacccctag

SEQ ID NO: 37141 - DNA, 1245 bp, Artificial Sequence
  derived and/or modified sequence
atgaaccacaagagcaagaagagaatcagagaggccaagagaagcgccagacccgagctgaaggacagcctggactggaccagacacaactactacgagagcttcagcctgagccccgccgccgtggccgacaacgtggagagagccgacgccctgcagctgagcgtggaggagttcgtggagagatacgagagaccctacaagcccgtggtgctgctgaacgcccaggagggctggagcgcccaggagaagtggaccctggagagactgaagagaaagtacagaaaccagaagttcaagtgcggcgaggacaacgacggctacagcgtgaagatgaagatgaagtactacatcgagtacatggagagcaccagagacgacagccccctgtacatcttcgacagcagctacggcgagcaccccaagagaagaaagctgctggaggactacaaggtgcccaagttcttcaccgacgacctgttccagtacgccggcgagaagagaagacccccctacagatggttcgtgatgggcccccccagaagcggcaccggcatccacatcgaccccctgggcaccagcgcctggaacgccctggtgcagggccacaagagatggtgcctgttccccaccagcacccccagagagctgatcaaggtgaccagagacgagggcggcaaccagcaggacgaggccatcacctggttcaacgtgatctaccccagaacccagctgcccacctggccccccgagttcaagcccctggagatcctgcagaagcccggcgagaccgtgttcgtgcccggcggctggtggcacgtggtgctgaacctggacaccaccatcgccatcacccagaacttcgccagcagcaccaacttccccgtggtgtggcacaagaccgtgagaggcagacccaagctgagcagaaagtggtacagaatcctgaagcaggagcaccccgagctggccgtgctggccgacagcgtggacctgcaggagagcaccggcatcgccagcgacagcagcagcgacagcagcagcagcagcagcagcagcagcagcgacagcgacagcgagtgcgagagcggcagcgagggcgacggcaccgtgcacagaagaaagaagagaagaacctgcagcatggtgggcaacggcgacaccaccagccaggacgactgcgtgagcaaggagagaagcagcagcagaatcagagacacctgcggcggcagagcccacccctag

SEQ ID NO: 37142 - protein, 356 aa, Artificial Sequence
  derived and/or modified sequence
MADEGKSYSEHDDERVNFPQRKKKGRGPFRWKYGEGNRRSGRGGSGIRSSRLEEDDGDVAMSDAQDGPRVRYNPYTTRPNRRGDTWHDRDRIHVTVRRDRAPPERGGAGTSQDGTSKNWFKITIPYGRKYDKAWLLSMIQSKCSVPFTPIEFHYENTRAQFFVEDASTASALKAVNYKILDRENRRISIIINSSAPPHTILNELKPEQVEQLKLIMSKRYDGSQQALDLKGLRSDPDLVAQNIDVVLNRRSCMAATLRIIEENIPELLSLNLSNNRLYRLDDMSSIVQKAPNLKILNLSGNELKSERELDKIKGLKLEELWLDGNSLCDTFRDQSTYIRSVVACVSPPGDLHPLGG

SEQ ID NO: 37143 - DNA, 1071 bp, Artificial Sequence
  derived and/or modified sequence
atggccgatgaaggtaaaagctattccgaacatgatgacgaaagggtgaacttccctcagcgcaagaaaaagggccggggccctttccggtggaaatacggcgaaggaaaccgcagaagtggcaggggaggtagtggaatcaggagctctcgcctggaagaggacgacggcgatgtggccatgtcagatgcgcaggatggaccacgtgtaaggtataatccctacactacccgaccaaatcgacgcggcgacacctggcatgacagagaccgtattcacgtgaccgtgcgaagagacagggcccccccggagcggggcggtgccggcacctcacaggatggtacttctaaaaattggttcaaaattacaatcccctacggccgtaagtatgacaaggcctggctgcttagtatgattcagtcgaagtgttccgttccatttactcctattgaatttcactacgagaacacacgggcacagtttttcgtggaagacgcgagtaccgcgtccgccctcaaagccgtgaactataagatcctggatcgcgagaatcggaggatatcaattattattaacagctcagcccctcctcacacaattctaaacgagctcaaacctgaacaggtggaacagctaaagctgattatgagtaagcggtatgatggcagtcagcaagccctggatctgaagggccttcggtccgatcccgacctggttgcccagaacattgacgtggtccttaacagacggtcctgtatggccgcaactttgaggattattgaggagaatattcccgaactgctatccctgaatttatccaataatcggctgtatagactcgacgacatgtcttccatcgttcaaaaagctcctaacctgaagattcttaatctcagcggaaatgagttaaaaagtgaacgcgagttggataaaatcaaggggctgaaactcgaagagctctggctggatggaaacagcctgtgcgacacattcagagaccagagtacctatattcgcagcgttgttgcttgcgtctccccccccggagacctgcacccactgggcgggtag

SEQ ID NO: 37144 - DNA, 1071 bp, Artificial Sequence
  derived and/or modified sequence
atggcagatgaagggaagagttattcagagcatgacgatgagagggtgaacttccctcagagaaagaagaagggcaggggaccatttaggtggaaatatggggagggcaacaggcgatctggaaggggcggaagcgggattcgcagtagccgtctggaagaggacgatggtgacgtcgctatgagcgatgcccaggatggacccagggtgcgctataatccatacacaacacgcccgaaccgcagaggcgatacatggcatgacagagatcggatccacgtgactgttcgccgggacagggcccctccggagcgcggtggggccggcacaagtcaagatggaaccagcaaaaattggtttaaaatcactatcccatacggccgaaagtatgataaagcctggctcctcagtatgattcaatccaaatgctcagtgcctttcacccccatcgagtttcattacgaaaacactagggcccagttctttgttgaggatgcttccaccgcttccgcccttaaggcagtaaactacaagatcttggacagagaaaatcgccgaatatccatcattatcaattcatcagcacctccccacactatactgaatgagcttaaacctgaacaggtggaacaactgaaacttataatgagcaaacggtacgacggatcacagcaggccttagatttgaagggcctgcgatccgaccccgaccttgtcgcacaaaatatcgacgtggtcctgaaccgcaggagttgcatggccgcaacactgaggataatcgaagagaacatccccgagctcctctcactgaatctgtcaaacaataggctctaccggctcgatgatatgagctccatcgtccagaaggccccgaatcttaaaatcctaaacttgtccgggaacgaactcaagagcgagcgggagctggacaagatcaagggactgaagctcgaggagctttggctggatggcaattcactgtgcgataccttccgggaccaatcaacatatattcgctctgtcgtagcttgcgtgtctcccccaggtgacctgcatccattgggtggttag

SEQ ID NO: 37145 - DNA, 1071 bp, Artificial Sequence
  derived and/or modified sequence
atggctgatgagggcaagagctacagcgagcatgatgatgagcgggtgaacttcccccagaggaagaagaagggccggggccccttccgctggaagtatggagagggcaacagaagaagtggccggggcggcagcggcatccgcagcagccggctggaggaggatgatggagatgtggccatgtctgatgcccaggacggcccccgggtgcgctacaacccctacaccacccggcccaacagaagaggagacacctggcatgaccgggaccgcatccacgtgacagtgagaagagaccgggcccctcctgagcggggcggggccggcaccagccaggacggcaccagcaagaactggttcaagatcaccatcccctacggcaggaaatatgacaaggcctggctgctgtccatgatccagagcaagtgcagcgtgcccttcacccccatcgagttccactatgagaacacccgggcccagttctttgtggaggatgccagcacagccagcgccctgaaggctgtgaactacaagatcctggacagagaaaatcgccgcatcagcatcatcatcaacagcagcgccccaccccacaccatcctgaatgagctgaagccagagcaggtggagcagctgaagctgatcatgagcaagagatatgatggcagccagcaggccctggacctgaagggcctgcggagtgaccctgacctggtggcccagaacattgatgtggtgctgaacagaagaagctgcatggccgccaccctgcgcatcatcgaggagaacatccctgagctgctgagcctgaacctgagcaacaacagactctaccgcctggatgacatgagcagcatcgtgcagaaggcccccaacctgaagatcctgaacctgtctggaaatgagctgaagtctgagcgggagctggacaagatcaagggcctgaagctggaggagctgtggctggatggcaacagcctgtgtgacaccttccgggaccagagcacctacatccgctctgtggtggcctgtgtgtccccacctggggacctgcaccccctgggcggctag

SEQ ID NO: 37146 - DNA, 1071 bp, Artificial Sequence
  derived and/or modified sequence
atggccgacgagggcaagagctacagcgagcacgacgacgagcgggtcaactttccacaacgcaaaaaaaagggacggggtccattccggtggaagtacggcgaaggaaatcggcgttcagggagagggggctctggcatcaggtcgagcagactggaagaggacgacggtgatgttgccatgagcgatgcacaggatggaccccgtgtgcgatacaatccttacacgacgcgccctaacagacggggtgacacttggcatgatagagacaggatccatgtgactgtgagacgcgacagagcaccccctgagagaggtggcgctggaacctctcaggacgggacatctaagaattggtttaaaataactatcccgtacggccgtaagtatgacaaagcctggctcctgtcaatgatccagagcaaatgctccgtgcctttcactccaatcgagttccattacgagaacactagagcacagttctttgtggaggatgcctctacagccagcgccctcaaggccgtcaactataaaatccttgatcgagaaaatcgtcgtattagtatcattattaattcttccgctcctccacacacgatcctgaacgaactgaaaccggagcaagtcgaacagctgaaactgattatgagtaaaaggtatgatggcagccaacaagccctggacctgaagggtctgcggtccgaccctgatctggtagcccagaatattgatgtcgtgctgaaccgtaggagctgcatggcagccactctccgaatcattgaagagaacatccccgagctgttgagccttaacttgtctaataatcgcctgtatcgcctggatgatatgtcctctatcgtgcaaaaagcccccaacttgaaaatcctcaatttatcgggcaatgaactcaaatccgaaagagagctggataagattaaaggcctcaaactggaagaactctggctggacgggaacagcttgtgcgacactttcagagatcagagcacatatatccggagcgtcgtggcttgcgtttcacctccaggtgacctccaccccctgggaggttag

SEQ ID NO: 37147 - DNA, 1071 bp, Artificial Sequence
  derived and/or modified sequence
atggccgacgagggcaagagctacagcgagcacgacgacgagcgggtgaattttccacagcggaaaaagaagggaaggggcccatttcggtggaaatacggggagggcaacagacggtcgggacggggcgggtcgggtatccgcagcagcagactagaggaggacgatggcgacgtggcgatgagcgatgctcaggacggaccccgagttcgttacaatccttatactactaggcctaatcggcggggtgatacttggcatgaccgggatcgcatccacgttaccgtgcgcagggacagggctcctcccgaaagaggcggcgcaggtacttcacaggatgggacatctaagaactggttcaaaattacaataccgtatggtcgaaaatatgataaagcttggctgctgagcatgattcagtctaaatgcagcgtgcccttcacgccaatcgagttccactatgagaacaccagagcccaattttttgtggaagatgcaagtacagcctccgctctgaaagcagtgaactataagattttggaccgtgaaaataggagaatcagtatcatcattaactccagcgctcccccacatacgattctcaatgagttgaaaccagaacaggtggagcaactcaagctgataatgtctaaaagatacgatggcagccagcaagccctcgacttaaagggcctgagatctgacccagatctggtagctcagaatattgacgttgttctgaaccggagatcctgcatggccgcgaccttgaggatcatagaggagaacatccccgagctgttgtccctcaatttgtctaataaccgcctgtacaggcttgatgacatgtcatcaatcgtgcagaaggccccaaatctcaagatcctgaacctttctgggaacgagcttaagagtgaacgggagttggacaagatcaaaggtctcaaactggaggaactgtggctagatgggaacagcctgtgtgacactttccgggaccagtccacgtacatccgctcggtggtggcctgcgtttccccgcctggcgatcttcatccgctcggggggtag

SEQ ID NO: 37148 - DNA, 1144 bp, Artificial Sequence
  derived and/or modified sequence
gagcgcttgggagttaggttgtttgccggcgtagcggccagcgcctgagcccgcccttgatcttcgctgtggcatggcggacgaggggaagtcgtacagcgaacacgatgatgaacgcgttaatttccctcaaagaaagaagaaaggccggggtcccttccggtggaaatatggtgaaggaaaccgtaggtctggaagaggcggttctggtattcggtcttcccgccttgaggaagatgatggagatgtggcaatgagtgatgcccaggatggtccccgagtacgatacaacccctataccacccgacctaaccgtcggggtgatacttggcatgatcgagatcgcattcatgttactgtgcggagagacagagctcctccagagagaggaggggctggcaccagccaggatgggacctcaaagaactggttcaagattacaattccttatggcagaaagtatgacaaggcatggctcctgagcatgattcagagcaagtgcagtgtgcccttcacccctattgagtttcactatgagaatacacgggcccagttcttcgttgaagacgccagtactgcctctgcattgaaggctgtcaactataagattttggatcgggagaaccgaaggatatctatcatcatcaactcttctgctccaccccacactatactgaatgaactgaagccagaacaagtagaacagctaaagctgatcatgagcaaacgatacgatggctcccaacaagcccttgacctcaaaggcctccgttcagacccagatttggtggcccagaacattgacgttgtcctgaatcgcagaagctgtatggcagctaccctgaggatcattgaagagaacatccctgagctattgtccttgaacttgagcaacaacaggctgtacaggctggatgacatgtctagcattgttcagaaggcacccaacctgaagatcctaaacctttctggaaatgaattgaagtctgagcgggaattggacaagataaaggggctgaagctagaagagctctggctcgatggaaactccctgtgtgacaccttccgagaccagtccacctacatcaggtcagttgtagcctgtgtctcccctcctggggaccttcaccccctgggaggctga

SEQ ID NO: 37149 - DNA, 4120 bp, Artificial Sequence
  derived and/or modified sequence
tataaatgcggtggcgcccggcgtagggacacttcggtcctgagcgcttgggagttaggttgtttgccggcgtagcggccagcgcctgagcccgcccttgatcttcgctgtggcatggcggacgaggggaagtcgtacagcgaacacgatgatgaacgcgttaatttccctcaaagaaagaagaaaggccggggtcccttccggtggaaatatggtgaaggaaaccgtaggtctggaagaggcggttctggtattcggtcttcccgccttgaggaagatgatggagatgtggcaatgagtgatgcccaggatggtccccgagtacgatacaacccctataccacccgacctaaccgtcggggtgatacttggcatgatcgagatcgcattcatgttactgtgcggagagacagagctcctccagagagaggaggggctggcaccagccaggatgggacctcaaagaactggttcaagattacaattccttatggcagaaagtatgacaaggcatggctcctgagcatgattcagagcaagtgcagtgtgcccttcacccctattgagtttcactatgagaatacacgggcccagttcttcgttgaagacgccagtactgcctctgcattgaaggctgtcaactataagattttggatcgggagaaccgaaggatatctatcatcatcaactcttctgctccaccccacactatactgaatgaactgaagccagaacaagtagaacagctaaagctgatcatgagcaaacgatacgatggctcccaacaagcccttgacctcaaaggcctccgttcagacccagatttggtggcccagaacattgacgttgtcctgaatcgcagaagctgtatggcagctaccctgaggatcattgaagagaacatccctgagctattgtccttgaacttgagcaacaacaggctgtacaggctggatgacatgtctagcattgttcagaaggcacccaacctgaagatcctaaacctttctggaaatgaattgaagtctgagcgggaattggacaagataaaggggctgaagctagaagagctctggctcgatggaaactccctgtgtgacaccttccgagaccagtccacctacatcaggtcagttgtagcctgtgtctcccctcctggggaccttcaccccctgggaggctgagctaatgcatcctgaccagggcccgtctgcggagatgtgcagccctgagctggaaccacctgtcctttgagaggatcgcgtgctccccactttggtctgtctgtgtcttccagctttgtcctgagatgttctctcttctcttctgacttgactatctgtttgctgggtctgtggcctttctctttcttcctgaacacaaccttttctagaatctccctaccctgttgttccaggaaaggcatctcccctttctactctaaccagagggtatcttgtacataccctatagatggggttgccttgtgccaagagcctggtgtccatgggttgaggaagccctccctacctgggacttcctactgagatgggccttccctcctttgtactgtgatggcccctcttgcccttgcgccaagagggacccttttctcaggatccacttgcccagggctgttgctgtccatgctgaggttgaggcctcctaggggctggtggcatgcaatctgtctctcttgcccagtgctatgagctgggctctccctgaagaagaaacctgggttccccaagatgtgaccagagctggggccccgccagcaggcgagggaatcccaaggcaggtgctgggcgtggaggccacgggggcataggctaccaaggagacagagaactgaccccctcgggggcgctgcctctccctcactcacacactgcacgtcaccctgtttggccccggtggatggctggttagccagagacgggtaagattcctcagggaaggaacaacctaagacaggcacagtcgcagaggggccatcaggagagaacttgggggcaacagaggtggggcatggaccctcacccccacaatcctacaggggcctgaaccctcacaccttctgagggaggtctcctgcccccatggctgctttgcttcccacgcccagttcagatcgggacccaggtagcagacagagacctggccaacagcaagtgcccactcaccacagcaaggatttgtttctcatttctaccttggaccacagggatggggcagctgaaagaaagggctgtgtcagggtgtctttctcccttttctccctcatttttctagatgcttttttgccttgtagttctttctctttttctttgctttctctttcctttttctgtctgtctcctatacctccccatctctcccttgcccctgccccatcttgcctttttctctttttcctccttttcctttcttattcctttgcctctcctcttcctgagccccacctgctcatctccctgccccaacatcctgtgccatccctgtggtgtgtttgggtcttggccaaagccagacctggcagaactgatggatacctggtgaggcagcggagcccctgggctcccaccccattccctcctcccggggctgcacaggtgagtaggtggaaggtaaggggggcagggaggggaaagaggtcctgggcttaaagcctgggcttggagtactgctccttgacactcagggtcaggcagagagaaaagagacagccttcaaggcagtccatgtctgggtgccccgggtcaggtggggagtgggggccatttttccctgagcacaggctgggagggagtggagggatgagcaggatgggatgggctgtccctcgggtttggtatatttgctcctagagcagcccaggaggcacggtggctctgaagcatcactcacttctgtcccgttcttgacagcgccattcgcgaacgatttcccaagttactacgcctggatggccatgagctacccccaccaattgcctttgatgttgaagcccccacgacgttaccgccctgcaagggaagctattttggaacagaaaacttgaagagtctggtcttgcacttcctgcaacagtactatgcaatttacgactctggagaccgacaagggctcctggatgcctaccatgatggggcctgctgttccctgagcattcctttcattcctcagaaccctgcccgaagcagcttagccgagtatttcaaggatagcagaaatgtgaagaagcttaaagaccctaccttgcggttccggctgctgaagcacacgcgtctcaacgttgttgccttcctcaatgagttgcccaaaacccagcacgacgtcaattccttcgtggtagacataagcgcccagacaagcacattgctgtgtttttctgtcaatggagtcttcaaggaagtggacggaaagtcccgggattctttgcgagccttcacccggacattcattgctgttcctgctagcaattcagggctatgtattgtaaatgatgagctatttgtgcggaatgccagttctgaagagatccaaagagccttcgctatgcctgcacccacgccttcctccagcccggtgcccaccctctctccagagcagcaggaaatgttgcaagcattctctacccagtctggcatgaacctcgagtggtcccagaagtgccttcaggacaacaactgggactacaccagatctgcccaggccttcactcatctcaaggccaagggcgagatcccagaagtggcattcatgaagtgatcgtagtcatgcctcagaagcagtcccccctgtaaatagtccttggatattaccgtctggttgtcgtctgtcatctcctcctgtctggcccgaggccgccccgtgactgtgaccgagggagggagggctgcctgatccctctcctcgcctgccttctggaagacttcagaagattgagcctcactggtgccaggaagccaaagcttactttgtagaactgacactaaactacccgaaggacttaggtgctttgtgtacttaaccccaggacctccttactttttaatataaagagtgatgttgtatttcgtgttctgcactttttaatataaagagtgatgttgt

SEQ ID NO: 37150 - DNA, 1071 bp, Artificial Sequence
  derived and/or modified sequence
atggccgacgagggaaaaagctactctgagcacgatgacgaacgagtcaatttcccgcaaaggaagaagaaagggaggggcccatttcggtggaagtatggcgagggtaatcgtcggagtgggaggggcggaagcgggatccggtcctcccggctggaggaagacgacggggacgtggccatgtctgacgctcaggacggtccaagggttaggtacaatccctacaccacaagacctaacagacgcggtgacacctggcacgatagggacagaatccatgtcactgttaggcgggatcgggctcccccagagaggggcggagcaggcacctcccaagatggcacgtcaaagaattggttcaagattacaattccctatgggaggaaatatgataaagcttggctcctttcgatgatacagagcaagtgctctgtgccttttaccccgatagagtttcactacgagaatacaagggctcagttcttcgtggaagacgcgtcaactgcaagtgccctgaaagctgtaaactataaaatactggatcgtgagaaccgcaggatttccatcatcatcaattcttccgccccaccacataccattctcaacgaattgaagccagagcaagtggagcagctgaagctgatcatgtctaagcgttatgatgggtcacagcaggcactggaccttaagggcttgcgatcagatccagacctcgtagctcaaaatattgacgtcgttttgaacagacgctcttgtatggcagctacactgcgcattattgaggagaatattcccgaactgcttagtctcaatctctcaaataaccgcctgtatagactggatgatatgtctagtatcgttcaaaaagccccaaacctaaaaattttgaacctctctggcaacgaactgaaatccgaacgcgagctcgacaagattaaaggcctcaagctggaagagctgtggcttgacgggaattctctttgcgataccttccgcgatcaatctacatatatacgctccgtggtggcctgcgtctccccgcctggcgacctgcacccgctggggggatag

SEQ ID NO: 37151 - DNA, 1071 bp, Artificial Sequence
  derived and/or modified sequence
atggcagatgagggcaaaagctacagtgaacacgatgatgagcgagttaattttcctcaacgcaaaaagaagggcaggggccctttccgttggaaatacggagagggcaacagacgaagcggacgcggaggctctgggatccggtcatctaggcttgaggaagacgacggagacgttgctatgtcagacgcacaggatggacccagggtaaggtacaacccatatactaccagacctaataggcgcggtgacacatggcacgatagagatagaatccacgttactgtgcggagggatagagcgccaccagagagaggaggtgctggcaccagtcaggacggaacctctaaaaattggtttaagatcactattccttacgggagaaagtatgataaagcctggctattatctatgatacagtctaagtgtagcgtgccattcactcctatagagttccactatgagaataccagggcgcaattttttgtggaagatgcatccacggcatccgccctgaaagccgtgaattataagattctcgaccgtgaaaatcggaggataagcatcatcatcaactctagcgcgcctccccatacaatcctcaatgaactcaaacccgaacaggtggagcagctcaaactgatcatgagtaaacgctacgacggatcgcagcaggctctcgatttaaaaggcttgaggagcgatcctgacctcgtcgctcaaaatatcgacgttgttctcaaccggaggtcttgcatggcagctaccctgcgcataatcgaggagaatatccctgaactcctcagcttaaatttatctaataacaggttgtatcggctggacgacatgagttccattgttcaaaaggcccctaacctgaagatcctgaatttgtccgggaatgagctaaaaagtgagcgagaacttgataaaatcaaaggactcaagcttgaggagctctggctcgatggaaacagtctttgcgataccttccgggatcagtctacgtatatcaggtctgtcgtggcgtgtgtctcccctccgggtgatctgcacccgctcgggggttag

SEQ ID NO: 37152 - DNA, 1071 bp, Artificial Sequence
  derived and/or modified sequence
atggccgacgagggcaagagctacagcgagcacgacgacgagagagtgaacttcccccagagaaagaagaagggcagaggccccttcagatggaagtacggcgagggcaacagaagaagcggcagaggcggcagcggcatcagaagcagcagactggaggaggacgacggcgacgtggccatgagcgacgcccaggacggccccagagtgagatacaacccctacaccaccagacccaacagaagaggcgacacctggcacgacagagacagaatccacgtgaccgtgagaagagacagagccccccccgagagaggcggcgccggcaccagccaggacggcaccagcaagaactggttcaagatcaccatcccctacggcagaaagtacgacaaggcctggctgctgagcatgatccagagcaagtgcagcgtgcccttcacccccatcgagttccactacgagaacaccagagcccagttcttcgtggaggacgccagcaccgccagcgccctgaaggccgtgaactacaagatcctggacagagagaacagaagaatcagcatcatcatcaacagcagcgcccccccccacaccatcctgaacgagctgaagcccgagcaggtggagcagctgaagctgatcatgagcaagagatacgacggcagccagcaggccctggacctgaagggcctgagaagcgaccccgacctggtggcccagaacatcgacgtggtgctgaacagaagaagctgcatggccgccaccctgagaatcatcgaggagaacatccccgagctgctgagcctgaacctgagcaacaacagactgtacagactggacgacatgagcagcatcgtgcagaaggcccccaacctgaagatcctgaacctgagcggcaacgagctgaagagcgagagagagctggacaagatcaagggcctgaagctggaggagctgtggctggacggcaacagcctgtgcgacaccttcagagaccagagcacctacatcagaagcgtggtggcctgcgtgagcccccccggcgacctgcaccccctgggcggctag

SEQ ID NO: 37153 - protein, 422 aa, Artificial Sequence
  derived and/or modified sequence
MACRSCVVGFSSLSSCEVTPVGSPRPGTSGWDSCRAPGPGFSSRSLTGCWSAGTISKVTVNPGLLVPLDVKLDPAVQQLKNQEKEEMKALNDKFASLIGKVQALEQRNQLLETRWSFLQGQDSAIFDLGHLYEEYQGRLQEELRKVSQERGQLEANLLQVLEKVEEFRIRYEDEISKRTDMEFTFVQLKKDLDAECLHRTELETKLKSLESFVELMKTIYEQELKDLAAQVKDVSVTVGMDSRCHIDLSGIVEEVKAQYDAVAARSLEEAEAYSRSQLEEQAARSAEYGSSLQSSRSEIADLNVRIQKLRSQILSVKSHCLKLEENIKTAEEQGELAFQDAKTKLAQLEAALQQAKQDMARQLRKYQELMNVKLALDIEIATYRKLVEGEEGRMDSPSATVVSAVQSRCKTAPSLPYPLCSL

SEQ ID NO: 37154 - DNA, 333 bp, Artificial Sequence
  derived and/or modified sequence
atgacctacccccctcatagggcattctctaggagtgacgtcccctaccccctgctgagcagccctgtgcagtggccacttagtctggtggtcggagacacctcgacgcgctggccccagcagccctccgcgcttgaatccgattgccccggaccttcccacccatgcctcgctggccttctgggacctatgcaccccgttgacatccccctgtcaacagctcttcactccaaacaccagcgcagactcacccagtgtgtgcttatggtgcagagtccgagtaagcaacgcagtctctaccttttaaacaagaagatacctcacgatgcatag

SEQ ID NO: 37155 - DNA, 1269 bp, Artificial Sequence
  derived and/or modified sequence
atggcttgtcgctcttgtgtggtgggtttctcctcattgtcttcctgcgaagtcactcccgtggggagtccccgccccggaactagcggctgggacagctgtagggctccaggcccgggattttccagtcgctcgttgactggttgttggagcgccggcacgatctccaaagtcaccgtgaaccctggactgttggtgcccctcgacgtgaagctcgaccctgcggtccaacaactcaagaatcaagaaaaggaggaaatgaaggccctaaatgataagtttgcctcacttatcggcaaagttcaagcccttgagcaaagaaatcagctgttggagaccagatggtccttcctgcaaggccaagatagtgcgatcttcgaccttggacacttgtacgaagagtatcagggaagactccaggaggagctccgaaaggtgtctcaagaacgggggcaactagaggcaaatctgctgcaagtcctcgagaaagtcgaagaattcaggatccgctacgaagacgagatcagtaaacggacggatatggagtttaccttcgtgcagcttaaaaaggacttggacgctgagtgtctgcaccgcaccgagctcgagacaaaattaaagtccctggagagttttgtggagcttatgaagacaatatacgaacaggaattgaaagatttagccgcacaggtcaaggatgttagcgttacagtggggatggactcccggtgccatatagatctgagcggaatcgtggaggaggtcaaggcacaatatgatgccgttgcagcacggtcgctggaggaggccgaggcctactcacggagtcagctcgaggaacaggccgcacggtccgccgaatatggtagcagtttacagtcatccaggagcgaaattgcagatcttaacgtgcgaatccagaaactgcgcagccagatcctctcagtgaagtcgcactgtctcaaactggaggagaatatcaaaacagctgaggagcaaggcgaactagcttttcaggatgccaagacaaagctggcccagttagaagccgctttgcagcaggctaaacaggatatggctcgccagctccggaagtaccaggaactgatgaatgtaaaactggccctcgatatcgaaatagcgacttacagaaagcttgtggaaggggaggaagggcgaatggatagtccctcggctacagtggtctcggccgtgcagagccgctgcaagaccgcaccctctctgccctacccactctgttccctgtag

SEQ ID NO: 37156 - DNA, 3894 bp, Artificial Sequence
  derived and/or modified sequence
cccagctgtgaccagagcaaccagagcctgccacccgacgcaaccccaggctcactcgctcacccccctgggccctcctgcttccggccgggggcaccatggcctgccgctcctgcgtggttggcttcagcagcctcagcagctgtgaggtgaccccggtgggcagcccccggcctggaacctcaggatgggacagctgcagggcccccgggccgggcttcagctcccgcagcctcacaggctgctggtcggctggcactatctccaaggtgactgtgaaccccggcctgctggtgcccctggatgtcaagttggaccccgctgttcagcagctgaagaaccaggagaaggaggagatgaaggccctcaatgataaatttgcctccctaattggcaaggtgcaagccctggaacagcgcaaccagctgctggagacacgctggagcttcctgcagggccaggactcagccatcttcgacctcgggcatctctatgaggaatatcagggccggctgcaggaggaactgcgcaaagtgagccaggagcgggggcagctggaggccaacctgctgcaggtgctggagaaggttgaggagtttcgaatcaggtatgaggatgagatctccaagcgcacagacatggagttcacctttgttcagctgaagaaggacctggatgcagagtgtcttcatcggactgaactggaaaccaagttaaaaagcctggagagcttcgtggagttgatgaaaaccatctatgagcaggagctgaaggacctggcagcacaggtgaaggatgtgtcggtgaccgtcggcatggacagccgctgccacatcgacctgagcggcatcgtggaggaggtgaaggcccagtatgacgccgtcgcggctcgcagcctggaggaggccgaggcatactctcggagccagctggaggagcaggccgcccgctcggccgagtatgggagcagcctccagagcagccgcagcgagatcgcggatctcaatgtgcgcatccagaagctgcggtcccagatcctctctgtcaagagccattgcctgaaactggaggagaacatcaagacagctgaggagcagggtgagctggccttccaggatgccaagaccaagctggcccagctggaggccgccctgcagcaggccaagcaggacatggcgcggcagctgcgcaagtaccaggagctgatgaacgtcaagctggccctggacatcgagatcgccacctacaggaagctggtggagggcgaggagggcaggatggactcgccctcagccactgtggtcagcgctgtgcagtccaggtgcaaaaccgccccttccctcccctaccccttatgttccctgtagctgcctccagatcaggcctctccaaggccccctcccgaaagaagaagggcagcaaaggccccgtgatcaaaatcaccgaaatgtcagagaagtacttctcgcaggagtcggaggtctcagagtaaggcggctggaccccaggaaccccagggcactccactgcagcaggagggacttaagctagactcaagaaagcagcttggagcctctaggttgagaagagaggcaaaacctgatattgaactgagagaggggttcaaaactgactgtgttttgtgggctgccagggtgggagaggagcatcaccagctcctcagagccactccgctccatatcagtatctcacagtcccatccttccaaccttctggccagaggttttcctgatgggtgagtcggaattaggggtcagttttgtctccacctcctcgctcctctgaggctcctcctccagcatcaggctctgccaaggcccctctgactcttgcccaatccttgaccttgactcctatctcaagccttgccttgtctctgcctcggaactgggactgggactggctcatccacctatgtgcgggagccgaggaggacggcgtgggccctgtcctgtatctggaattcctgggaaggctggctgctgaagaccctcttggctttcccgtgctctttgggctccccagagacctgacagtattagggagtgaagggaggaggggccctggctatttgggacctaagcctaggccccagagatcagcccgaacacccgcatcccttcctcctcccatgggtccctcccagtaggcagtagtcagaactggatgggctgcccccagccagctcccagcagcttctccggaagctgctcttgccataatcaactccctgggagtggaagccagatggcagcttgagattgggcaggagcattcgatcttcctttcacctccctgccatgctggggtcctacccagcctggatctgagctctgtgcccccagccgggttgttcccagcctgagcaccgggctttggtgcaccaggccttggagacccctggtcccacccctgccgtgaagccccaggcccacttcccaagaatctcacttctcagggcctctgttctcctctccactgggccaaatagcctggccctcccctccttggcattcatgggggagcccaggaaccccccacacctatggggttagagctcctcctttcttctcactccttccccttcctccctccatgcccactccccctgcctccagcaggccaggaagaaggcacagtccaggcaagtctgggagcttccaagcccttgaggtccagctgtggggcccaaatgacagccttacaagggttctaccagagaggaaaattccacatcccaccagaagacaggggtgttggcaggcatactcctatctcctcctcttggctctcaatgctgaggcttgcagaggcatcccagcggcaccagcctcccactgcacagcttccttccctccttcactctcctctcccctccctgccccttgcctcacctcctcttctagactgcattagattcattcatctcatttgccaggacatgttggccagaggtctgggcccatcccaggcctcaaggccctccaggcctgtggggagcactggagggttactgactctctggccatgggaactcagagattctcatccccaaagtcccaaaagagggtgctgattggtgcttttcctcaggctcttcattggtttccaagggagcaaatcctcagtggggatacaagacatataaagtatatattattttttcataacttatgtggcttttaacttattgcttcccttcctgtttctgcatgatcagtctgtatgtactatctggaaagataacacatactccagccacctcacctgattggctatcttggggccatgtccccttcttgctgccacaggatgaataaagtgttgagatttgtctatggagaaagctgtgtgtctgtttttatctcccctctcaggaccagtcagccactggtcaatcaggctgatcatggaacattaggaattctccaattaagggagaaaaagtccagggacttagttatatcttcagaccagtgcagctggtacacacaaagttctcctgtctcaccatctgatatggtttggatgctcgtcccctccaaatctcatgttgaaatgtaattcccagtgttggaagtggagcctggtgggaagtatttggatcatgagagaggatccttcatgaatggctcagcaccatctccttggtgatgagtgagttctcactcaattcacatagatatggttgtttaaaagagtctgagacctctcccctctttctcgccatgtgatatgcctgctcccccttcaccttccgcctttactgtaagcttcctgaggccctcaccagaagctgagcaaatgttggtgccatgccagtacagcctgcagaattgtgagccaaaataaatgtcttttctttataaatta

SEQ ID NO: 37157 - DNA, 1269 bp, Artificial Sequence
  derived and/or modified sequence
atggcctgccgcagctgtgtggtgggcttcagcagcctgagcagctgtgaggtgacccctgtgggcagcccccggcccggcaccagcggctgggacagctgccgggcccctggccctggcttcagcagccgcagcctgaccggctgctggagcgctggcaccatcagcaaggtgacagtgaaccctggcctgctggtgcccctggatgtgaagctggaccctgctgtgcagcagctgaagaaccaggagaaggaggagatgaaggccctgaatgacaagtttgccagcctcatcggcaaggtgcaggccctggagcagaggaaccagctgctggagacccgctggagcttcctgcagggccaggacagcgccatctttgacctgggccacctgtatgaggagtaccagggccgcctgcaggaggagctgaggaaggtgtcccaggagcggggccagctggaggccaacctgctgcaggtgctggagaaggtggaggagttccgcatccgctatgaagatgagatcagcaagaggacagacatggagttcacctttgtgcagctgaagaaggacctggatgctgaatgtctgcacaggacagagctggagaccaagctgaagagcctggagagctttgtggagctgatgaagaccatctatgagcaggagctgaaggacctggccgcccaggtgaaggatgtgtctgtgacagtgggcatggacagccgctgccacatcgacctgtctggaattgtggaggaggtgaaggcccagtatgatgctgtggccgcccggagcctggaggaggccgaggcctacagccgcagccagctggaggagcaggccgcccggtctgcagaatatggcagcagcctgcagagcagccgctcagaaattgctgacctgaatgtgcgcatccagaagctgcggagccagatcctgtctgtgaagagccactgcctgaagctggaggagaacatcaagacagctgaggagcagggcgagctggccttccaggatgccaagaccaagctggcccagctggaggccgccctgcagcaggccaagcaggacatggcccggcagctgaggaagtaccaggagctgatgaatgtgaagctggccctggacatcgagatcgccacctacaggaagctggtggagggggaggagggccgcatggacagccccagcgccaccgtggtgtctgctgtgcagagccgctgcaagacagcccccagcctgccctaccccctgtgcagcctgtag

SEQ ID NO: 37158 - DNA, 1269 bp, Artificial Sequence
  derived and/or modified sequence
atggcctgccggagctgcgtggtgggcttcagcagcctgagcagctgtgaggtgactccggtcggcagtcccaggccgggcacttccgggtgggactcttgtcgggctcccggaccaggcttttcctcccgcagtttgaccggctgttggagtgccggcactatttccaaggtgacggtgaacccagggctgctggtcccactagacgtgaagctagaccctgccgtgcagcaactcaagaatcaggagaaagaagaaatgaaggccctcaatgacaagtttgctagtctgattggcaaggtgcaggcgctcgaacagcgcaaccaattgctcgaaactcgatggtcgttcctgcagggacaggactccgctatcttcgacctggggcacttgtacgaagagtatcagggccggctgcaagaggaactgcgcaaggtctcacaggaacgaggtcaactcgaagccaatctgttacaagtcctggagaaagtcgaggaattccgcatcaggtatgaagacgaaatcagtaagagaaccgatatggaatttacatttgtgcaacttaagaaagacttagatgccgagtgcctgcacagaacggagctggagactaaactgaaatctctggagagcttcgtggaacttatgaaaaccatttatgagcaggagctgaaggatctggcagcccaggtgaaagatgtatccgttaccgttgggatggactcacggtgccatatcgatctttccgggatcgtcgaggaggtgaaggcccagtatgacgctgtggccgctagatcattggaggaagcagaagcctactccaggtcacagctggaggagcaggctgctagatctgcagaatacggtagttcgctacaatctagccgttccgagattgctgatcttaatgtgcggatccagaagctacgatctcagatcctgagcgtgaaaagtcactgcttaaaactggaggaaaacattaaaacagccgaggaacaaggtgaactggcattccaggacgcaaagaccaagctggctcagttagaagccgcgctccagcaggccaaacaggatatggctcgccagcttcgcaagtaccaggagctcatgaacgtaaaattggccctggacatcgagatcgcaacctaccgcaaattagtggagggcgaggaaggccggatggattcccctagcgcaacagttgtgtccgccgtgcaatccagatgcaaaacagccccaagtctcccttaccctctgtgtagcctgtag

SEQ ID NO: 37159 - DNA, 1269 bp, Artificial Sequence
  derived and/or modified sequence
atggcttgtcgctcatgcgtcgttggcttttcttcgctatcttcatgtgaagtgactcccgtgggcagtccgagacctggtaccagcggttgggacagctgtcgggcacccggtcccggattctctagcagatctctcaccggatgttggagcgccggaacaataagtaaggtgaccgtgaacccaggtcttctggtcccactggatgtcaagcttgacccagctgtgcaacagcttaagaatcaggaaaaggaagagatgaaggccctgaacgataagttcgcctccttgattggcaaagttcaggcgctcgagcagcgcaaccagctgctggaaactaggtggtccttcttacagggccaggactctgcaatctttgatttaggtcatttatacgaagagtatcagggcaggctacaagaagagctgaggaaggtgagccaggagcgcggacagctagaagccaatctacttcaggttttagaaaaggtggaagagtttcgcattcggtacgaggatgaaatttcgaagaggaccgacatggaatttacattcgtccaactaaaaaaggacttggatgccgagtgtcttcacaggaccgaacttgagacgaaattgaaaagccttgagagttttgtggagctcatgaagaccatctacgaacaggaactaaaggatctcgccgctcaggtgaaggacgtgagcgtgaccgtcggtatggatagtcggtgccacattgatctgtctggcatcgtcgaggaagtgaaggctcaatacgacgccgttgcagccagatctctggaggaagcagaggcctactcaaggagtcagctggaggaacaggcagcaagatcagctgagtatggcagcagtctacagtcctcccgatccgaaatcgcagatcttaacgtccgcatccagaaactccgctctcagatcctctcagtgaagagccactgtcttaaactggaggaaaacatcaagactgcagaggaacagggcgaactggcatttcaggacgctaaaacaaagttggcacagctggaagcggcactgcagcaggctaagcaggatatggcaaggcagctcagaaaatatcaggagctgatgaacgtaaagctggctcttgacatcgaaatcgcaacctatagaaagttagtggagggagaagaggggcgaatggattcccctagtgcaaccgtggtctccgcagttcagtcacgctgcaaaaccgcacctagccttccttatcccctgtgttccctatag

SEQ ID NO: 37160 - DNA, 1269 bp, Artificial Sequence
  derived and/or modified sequence
atggcctgcagaagctgcgtggtgggcttcagcagcctgagcagctgcgaggtgacccccgtgggcagccccagacccggcaccagcggctgggacagctgcagagcccccggccccggcttcagcagcagaagcctgaccggctgctggagcgccggcaccatcagcaaggtgaccgtgaaccccggcctgctggtgcccctggacgtgaagctggaccccgccgtgcagcagctgaagaaccaggagaaggaggagatgaaggccctgaacgacaagttcgccagcctgatcggcaaggtgcaggccctggagcagagaaaccagctgctggagaccagatggagcttcctgcagggccaggacagcgccatcttcgacctgggccacctgtacgaggagtaccagggcagactgcaggaggagctgagaaaggtgagccaggagagaggccagctggaggccaacctgctgcaggtgctggagaaggtggaggagttcagaatcagatacgaggacgagatcagcaagagaaccgacatggagttcaccttcgtgcagctgaagaaggacctggacgccgagtgcctgcacagaaccgagctggagaccaagctgaagagcctggagagcttcgtggagctgatgaagaccatctacgagcaggagctgaaggacctggccgcccaggtgaaggacgtgagcgtgaccgtgggcatggacagcagatgccacatcgacctgagcggcatcgtggaggaggtgaaggcccagtacgacgccgtggccgccagaagcctggaggaggccgaggcctacagcagaagccagctggaggagcaggccgccagaagcgccgagtacggcagcagcctgcagagcagcagaagcgagatcgccgacctgaacgtgagaatccagaagctgagaagccagatcctgagcgtgaagagccactgcctgaagctggaggagaacatcaagaccgccgaggagcagggcgagctggccttccaggacgccaagaccaagctggcccagctggaggccgccctgcagcaggccaagcaggacatggccagacagctgagaaagtaccaggagctgatgaacgtgaagctggccctggacatcgagatcgccacctacagaaagctggtggagggcgaggagggcagaatggacagccccagcgccaccgtggtgagcgccgtgcagagcagatgcaagaccgcccccagcctgccctaccccctgtgcagcctgtag

SEQ ID NO: 37161 - protein, 875 aa, Artificial Sequence
  derived and/or modified sequence
MERAGPSFGQQRQQQQPQQQKQQQRDQDSVEAWLDDHWDFTFSYFVRKATREMVNAWFAERVHTIPVCKEGIRGHTESCSCPLQQSPRADNSAPGTPTRKISASEFDRPLRPIVVKDSEGTVSFLSDSEKKEQMPLTPPRFDHDEGDQCSRLLELVKDISSHLDVTALCHKIFLHIHGLISADRYSLFLVCEDSSNDKFLISRLFDVAEGSTLEEVSNNCIRLEWNKGIVGHVAALGEPLNIKDAYEDPRFNAEVDQITGYKTQSILCMPIKNHREEVVGVAQAINKKSGNGGTFTEKDEKDFAAYLAFCGIVLHNAQLYETSLLENKRNQVLLDLASLIFEEQQSLEVILKKIAATIISFMQVQKCTIFIVDEDCSDSFSSVFHMECEELEKSSDTLTREHDANKINYMYAQYVKNTMEPLNIPDVSKDKRFPWTTENTGNVNQQCIRSLLCTPIKNGKKNKVIGVCQLVNKMEENTGKVKPFNRNDEQFLEAFVIFCGLGIQNTQMYEAVERAMAKQMVTLEVLSYHASAAEEETRELQSLAAAVVPSAQTLKITDFSFSDFELSDLETALCTIRMFTDLNLVQNFQMKHEVLCRWILSVKKNYRKNVAYHNWRHAFNTAQCMFAALKAGKIQNKLTDLEILALLIAALSHDLDHRGVNNSYIQRSEHPLAQLYCHSIMEHHHFDQCLMILNSPGNQILSGLSIEEYKTTLKIIKQAILATDLALYIKRRGEFFELIRKNQFNLEDPHQKELFLAMLMTACDLSAITKPWPIQQRIAELVATEFFDQGDRERKELNIEPTDLMNREKKNKIPSMQVGFIDAICLQLYEALTHVSEDCFPLLDGCRKNRQKWQALAEQQEKMLINGESGQAKRN

SEQ ID NO: 37162 - protein, 1593 aa, Artificial Sequence
  derived and/or modified sequence
MAAAAVVVPAEWIKNWEKSGRGEFLHLCRILSENKSHDSSTYRDFQQALYELSYHVIKGNLKHEQASNVLSDISEFREDMPSILADVFCILDIETNCLEEKSKRDYFTQLVLACLYLVSDTVLKERLDPETLESLGLIKQSQQFNQKSVKIKTKLFYKQQKFNLLREENEGYAKLIAELGQDLSGSITSDLILENIKSLIGCFNLDPNRVLDVILEVFECRPEHDDFFISLLESYMSMCEPQTLCHILGFKFKFYQEPNGETPSSLYRVAAVLLQFNLIDLDDLYVHLLPADNCIMDEHKREIAEAKQIVRKLTMVVLSSEKMDEREKEKEKEEEKVEKPPDNQKLGLLEALLKIGDWQHAQNIMDQMPPYYAASHKLIALAICKLIHITIEPLYRRVGVPKGAKGSPVNALQNKRAPKQAESFEDLRRDVFNMFCYLGPHLSHDPILFAKVVRIGKSFMKEFQSDGSKQEDKEKTEVILSCLLSITDQVLLPSLSLMDCNACMSEELWGMFKTFPYQHRYRLYGQWKNETYNSHPLLVKVKAQTIDRAKYIMKRLTKENVKPSGRQIGKLSHSNPTILFDYILSQIQKYDNLITPVVDSLKYLTSLNYDVLAYCIIEALANPEKERMKHDDTTISSWLQSLASFCGAVFRKYPIDLAGLLQYVANQLKAGKSFDLLILKEVVQKMAGIEITEEMTMEQLEAMTGGEQLKAEGGYFGQIRNTKKSSQRLKDALLDHDLALPLCLLMAQQRNGVIFQEGGEKHLKLVGKLYDQCHDTLVQFGGFLASNLSTEDYIKRVPSIDVLCNEFHTPHDAAFFLSRPMYAHHISSKYDELKKSEKGSKQQHKVHKYITSCEMVMAPVHEAVVSLHVSKVWDDISPQFYATFWSLTMYDLAVPHTSYEREVNKLKVQMKAIDDNQEMPPNKKKKEKERCTALQDKLLEEEKKQMEHVQRVLQRLKLEKDNWLLAKSTKNETITKFLQLCIFPRCIFSAIDAVYCARFVELVHQQKTPNFSTLLCYDRVFSDIIYTVASCTENEASRYGRFLCCMLETVTRWHSDRATYEKECGNYPGFLTILRATGFDGGNKADQLDYENFRHVVHKWHYKLTKASVHCLETGEYTHIRNILIVLTKILPWYPKVLNLGQALERRVHKICQEEKEKRPDLYALAMGYSGQLKSRKSYMIPENEFHHKDPPPRNAVASVQNGPGGGPSSSSIGSASKSDESSTEETDKSRERSQCGVKAVNKASSTTPKGNSSNGNSGSNSNKAVKENDKEKGKEKEKEKKEKTPATTPEARVLGKDGKEKPKEERPNKDEKARETKERTPKSDKEKEKFKKEEKAKDEKFKTTVPNAESKSTQEREREKEPSRERDIAKEMKSKENVKGGEKTPVSGSLKSPVPRSDIPEPEREQKRRKIDTHPSPSHSSTVKDSLIELKESSAKLYINHTPPPLSKSKEREMDKKDLDKSRERSREREKKDEKDRKERKRDHSNNDREVPPDLTKRRKEENGTMGVSKHKSESPCESPYPNEKDKEKNKSKSSGKEKGSDSFKSEKMDKISSGGKKESRHDKEKIEKKEKRDSSGGKEEKKHHKSSDKHR

SEQ ID NO: 37163 - DNA, 390 bp, Artificial Sequence
  derived and/or modified sequence
atgtggctgtggcaggacatccagtgctgcccagcccctccttctgccccaccccgggccctggagcccggccgggcccctcctcctcctggagagggcctgggcgccggcatccccagcctgagccccccccagaagaagccccagagcgtgggcatctgtgtgcggcagaagggccggcagaaggccggcctggagaagggcaacaggaagaaggagctgcggcaggccaactgccccagcctgcggccccagaggaaaggagctgacacccggcggctgccccgggagacccggcccaccaagaagaggacagctgctgcccagcccttcctgcagctgtggaacccagccccccacaccagcaatggaagaactggagacctgtag

SEQ ID NO: 37164 - DNA, 490 bp, Artificial Sequence
  derived and/or modified sequence
ccaggctgagccatctctgaggaatgtggctttggcaggacatccagtgctgccccgctcctccctcagccccgcccagggccctggagccgggccgggctcctcctcctccaggggaagggctcggggcaggaatcccttccctttccccaccccagaagaagccccagagcgtagggatatgcgtacggcagaaagggagacagaaggcagggctagagaaagggaacaggaaaaaagagcttcgacaagccaactgcccttcgctcaggccccagcggaaaggcgcagatacccggagacttcccagagagactcgacccaccaaaaagcgcaccgcggccgcgcagcccttccttcagctctggaacccagcgccccacacctcaaatgggagaactggtgacctctagtggcccatgaccagcctgcagggcctggggctggcggggattctctgacccaaactctcctgggctctaatgctgtt

SEQ ID NO: 37165 - DNA, 4782 bp, Artificial Sequence
  derived and/or modified sequence
atggccgccgccgccgtggtggtgcccgccgagtggatcaagaactgggagaagagcggcagaggcgagttcctgcacctgtgcagaatcctgagcgagaacaagagccacgacagcagcacctacagagacttccagcaggccctgtacgagctgagctaccacgtgatcaagggcaacctgaagcacgagcaggccagcaacgtgctgagcgacatcagcgagttcagagaggacatgcccagcatcctggccgacgtgttctgcatcctggacatcgagaccaactgcctggaggagaagagcaagagagactacttcacccagctggtgctggcctgcctgtacctggtgagcgacaccgtgctgaaggagagactggaccccgagaccctggagagcctgggcctgatcaagcagagccagcagttcaaccagaagagcgtgaagatcaagaccaagctgttctacaagcagcagaagttcaacctgctgagagaggagaacgagggctacgccaagctgatcgccgagctgggccaggacctgagcggcagcatcaccagcgacctgatcctggagaacatcaagagcctgatcggctgcttcaacctggaccccaacagagtgctggacgtgatcctggaggtgttcgagtgcagacccgagcacgacgacttcttcatcagcctgctggagagctacatgagcatgtgcgagccccagaccctgtgccacatcctgggcttcaagttcaagttctaccaggagcccaacggcgagacccccagcagcctgtacagagtggccgccgtgctgctgcagttcaacctgatcgacctggacgacctgtacgtgcacctgctgcccgccgacaactgcatcatggacgagcacaagagagagatcgccgaggccaagcagatcgtgagaaagctgaccatggtggtgctgagcagcgagaagatggacgagagagagaaggagaaggagaaggaggaggagaaggtggagaagccccccgacaaccagaagctgggcctgctggaggccctgctgaagatcggcgactggcagcacgcccagaacatcatggaccagatgcccccctactacgccgccagccacaagctgatcgccctggccatctgcaagctgatccacatcaccatcgagcccctgtacagaagagtgggcgtgcccaagggcgccaagggcagccccgtgaacgccctgcagaacaagagagcccccaagcaggccgagagcttcgaggacctgagaagagacgtgttcaacatgttctgctacctgggcccccacctgagccacgaccccatcctgttcgccaaggtggtgagaatcggcaagagcttcatgaaggagttccagagcgacggcagcaagcaggaggacaaggagaagaccgaggtgatcctgagctgcctgctgagcatcaccgaccaggtgctgctgcccagcctgagcctgatggactgcaacgcctgcatgagcgaggagctgtggggcatgttcaagaccttcccctaccagcacagatacagactgtacggccagtggaagaacgagacctacaacagccaccccctgctggtgaaggtgaaggcccagaccatcgacagagccaagtacatcatgaagagactgaccaaggagaacgtgaagcccagcggcagacagatcggcaagctgagccacagcaaccccaccatcctgttcgactacatcctgagccagatccagaagtacgacaacctgatcacccccgtggtggacagcctgaagtacctgaccagcctgaactacgacgtgctggcctactgcatcatcgaggccctggccaaccccgagaaggagagaatgaagcacgacgacaccaccatcagcagctggctgcagagcctggccagcttctgcggcgccgtgttcagaaagtaccccatcgacctggccggcctgctgcagtacgtggccaaccagctgaaggccggcaagagcttcgacctgctgatcctgaaggaggtggtgcagaagatggccggcatcgagatcaccgaggagatgaccatggagcagctggaggccatgaccggcggcgagcagctgaaggccgagggcggctacttcggccagatcagaaacaccaagaagagcagccagagactgaaggacgccctgctggaccacgacctggccctgcccctgtgcctgctgatggcccagcagagaaacggcgtgatcttccaggagggcggcgagaagcacctgaagctggtgggcaagctgtacgaccagtgccacgacaccctggtgcagttcggcggcttcctggccagcaacctgagcaccgaggactacatcaagagagtgcccagcatcgacgtgctgtgcaacgagttccacaccccccacgacgccgccttcttcctgagcagacccatgtacgcccaccacatcagcagcaagtacgacgagctgaagaagagcgagaagggcagcaagcagcagcacaaggtgcacaagtacatcaccagctgcgagatggtgatggcccccgtgcacgaggccgtggtgagcctgcacgtgagcaaggtgtgggacgacatcagcccccagttctacgccaccttctggagcctgaccatgtacgacctggccgtgccccacaccagctacgagagagaggtgaacaagctgaaggtgcagatgaaggccatcgacgacaaccaggagatgccccccaacaagaagaagaaggagaaggagagatgcaccgccctgcaggacaagctgctggaggaggagaagaagcagatggagcacgtgcagagagtgctgcagagactgaagctggagaaggacaactggctgctggccaagagcaccaagaacgagaccatcaccaagttcctgcagctgtgcatcttccccagatgcatcttcagcgccatcgacgccgtgtactgcgccagattcgtggagctggtgcaccagcagaagacccccaacttcagcaccctgctgtgctacgacagagtgttcagcgacatcatctacaccgtggccagctgcaccgagaacgaggccagcagatacggcagattcctgtgctgcatgctggagaccgtgaccagatggcacagcgacagagccacctacgagaaggagtgcggcaactaccccggcttcctgaccatcctgagagccaccggcttcgacggcggcaacaaggccgaccagctggactacgagaacttcagacacgtggtgcacaagtggcactacaagctgaccaaggccagcgtgcactgcctggagaccggcgagtacacccacatcagaaacatcctgatcgtgctgaccaagatcctgccctggtaccccaaggtgctgaacctgggccaggccctggagagaagagtgcacaagatctgccaggaggagaaggagaagagacccgacctgtacgccctggccatgggctacagcggccagctgaagagcagaaagagctacatgatccccgagaacgagttccaccacaaggaccccccccccagaaacgccgtggccagcgtgcagaacggccccggcggcggccccagcagcagcagcatcggcagcgccagcaagagcgacgagagcagcaccgaggagaccgacaagagcagagagagaagccagtgcggcgtgaaggccgtgaacaaggccagcagcaccacccccaagggcaacagcagcaacggcaacagcggcagcaacagcaacaaggccgtgaaggagaacgacaaggagaagggcaaggagaaggagaaggagaagaaggagaagacccccgccaccacccccgaggccagagtgctgggcaaggacggcaaggagaagcccaaggaggagagacccaacaaggacgagaaggccagagagaccaaggagagaacccccaagagcgacaaggagaaggagaagttcaagaaggaggagaaggccaaggacgagaagttcaagaccaccgtgcccaacgccgagagcaagagcacccaggagagagagagagagaaggagcccagcagagagagagacatcgccaaggagatgaagagcaaggagaacgtgaagggcggcgagaagacccccgtgagcggcagcctgaagagccccgtgcccagaagcgacatccccgagcccgagagagagcagaagagaagaaagatcgacacccaccccagccccagccacagcagcaccgtgaaggacagcctgatcgagctgaaggagagcagcgccaagctgtacatcaaccacacccccccccccctgagcaagagcaaggagagagagatggacaagaaggacctggacaagagcagagagagaagcagagagagagagaagaaggacgagaaggacagaaaggagagaaagagagaccacagcaacaacgacagagaggtgccccccgacctgaccaagagaagaaaggaggagaacggcaccatgggcgtgagcaagcacaagagcgagagcccctgcgagagcccctaccccaacgagaaggacaaggagaagaacaagagcaagagcagcggcaaggagaagggcagcgacagcttcaagagcgagaagatggacaagatcagcagcggcggcaagaaggagagcagacacgacaaggagaagatcgagaagaaggagaagagagacagcagcggcggcaaggaggagaagaagcaccacaagagcagcgacaagcacagatag

SEQ ID NO: 37166 - DNA, 4782 bp, Artificial Sequence
  derived and/or modified sequence
atggctgctgccgcagtcgtggtgccggccgagtggatcaaaaactgggaaaaatcaggccgcggagagttcctgcacctctgtcgaatacttagtgaaaacaagtcacatgactcctcaacataccgggactttcagcaggccctgtacgaactatcttatcacgtaatcaaggggaaccttaaacacgagcaagccagtaatgtcctgagtgacatatcggaatttcgcgaagatatgccttcgatcctggcggacgtattttgtatcctggacatcgagactaattgtctagaggaaaagtccaagagagactacttcacccagctggtgcttgcttgtctctacctggtcagcgacaccgtcctcaaagagaggctggatcccgagactctcgaatctctgggcctgatcaaacagtcgcaacagttcaaccagaagagtgtcaaaataaagacgaagctgttctacaagcaacaaaagttcaatttattgcgtgaagagaatgaggggtacgccaaactcatcgctgagcttggtcaagacctgtccggctccatcactagtgacctcatactggagaacatcaaaagtcttataggctgttttaatttggaccctaatcgtgtgctcgatgtgattctggaggtgttcgagtgcagaccggagcacgatgactttttcatctcccttcttgagtcctacatgtccatgtgtgaaccccagaccttatgtcatattctcggcttcaagtttaagttctaccaggagccgaacggcgaaaccccgtcaagcctgtacagggtggctgctgttctcctgcagttcaacttgatcgatctggatgatctgtacgtgcacctgctgccagctgataactgcatcatggacgaacataagagagagatagccgaagccaagcagatagtcagaaagcttactatggtcgtgcttagctccgagaaaatggatgaaagggagaaggagaaggagaaggaagaagagaaggtagaaaaaccccccgacaaccagaagttgggactcctggaagctctgctgaagattggagattggcagcacgctcagaatattatggatcaaatgcctccgtattatgcagcttcacacaagcttatcgccctggctatctgtaaacttatacatattaccatcgagcccctttaccggagagttggagtacccaaaggcgccaagggaagcccggtcaacgccctgcagaataagagggccccgaaacaggcagagtcttttgaagatttacggcgcgacgtgttcaacatgttttgctacctgggaccacatttgtcacacgacccaattctgtttgccaaagtagtgcgcattggtaaatcttttatgaaagaattccagtcagacggaagcaagcaagaagacaaggaaaagaccgaagtgatactgagttgtttactctctatcacggaccaggtgttgctgccatcgttgtctttgatggactgcaatgcatgtatgtcagaagagctgtggggaatgtttaaaaccttcccttatcagcacagataccggctgtatggccagtggaaaaacgaaacgtacaattcacaccccctcctggtaaaagttaaagcgcagaccatcgacagggcaaagtacatcatgaaacgactgaccaaggagaatgtgaagccaagtgggagacaaatcgggaaattgtcacactccaatcccacaattctgttcgactacatccttagtcagatccagaagtacgataacctgatcactcctgtggtcgattccctgaagtatctgacctctctgaactacgacgtgctggcctattgtattattgaagcgttggcgaatccagagaaggagaggatgaaacacgacgatacaaccatttccagttggctgcagagcttggctagtttttgcggagccgtgttccggaagtaccccattgatctcgccgggctgttgcagtatgtcgcgaatcagctcaaggcgggcaagtcttttgatctcttaatcctgaaggaagtagtgcaaaaaatggccgggatcgaaattacagaggagatgacaatggaacaactcgaggctatgaccggaggtgagcagttgaaggcagaaggtgggtatttcggacagatcaggaataccaaaaagtccagccagcggcttaaggacgctctgctggaccacgaccttgcgctgccactgtgcttgctcatggcccagcaacgcaacggtgtcatctttcaggaaggcggggagaagcatctgaaattggtgggaaaactgtacgaccagtgtcacgacacgcttgtgcagttcggcggcttccttgcgtctaacctcagtaccgaggattacatcaaacgcgtgcctagcatcgatgtactctgtaacgaattccacactcctcacgacgctgcattctttctttctcggcccatgtatgcgcatcacataagctcgaagtacgacgagctcaagaagagcgaaaaggggtcaaaacagcaacacaaggttcacaagtatatcacgtcttgcgagatggtgatggctcccgttcatgaggctgtcgtgtccttacatgtgagtaaagtgtgggatgacatctcaccccagttctacgccacattttggtccctaaccatgtacgacctggcagtcccacacacttcatatgagcgcgaagtaaataaactgaaagtacagatgaaagccatagatgacaatcaggaaatgccacccaataagaaaaaaaaagaaaaagaaaggtgcacagctctacaggacaagctactcgaggaggaaaagaaacaaatggagcacgtacaacgcgttttgcaacgcctgaaactggaaaaggacaattggctgctcgccaagtcaacgaagaacgaaacaattacgaaattcctccaactgtgcatattcccccgctgtatcttttctgctattgacgcggtttactgtgcgaggttcgtggagctggtccaccagcagaagactcctaacttcagcaccttactgtgctacgaccgtgtttttagcgacattatctatacggtcgccagctgcaccgagaacgaagctagccgctatgggcgtttcctttgttgcatgttggaaaccgtgacgaggtggcattccgaccgagctacctacgaaaaagaatgcggcaattatcctggttttcttacaattctgcgcgcaactgggtttgacggtgggaacaaagctgaccaacttgattatgaaaatttccgccacgtcgtacacaagtggcactacaagcttaccaaagctagtgttcattgtctcgagactggtgagtatacccacatcagaaatatactgattgtactaactaaaatcctcccatggtacccaaaagttctgaacctcgggcaagctctagaacggagagttcataagatctgccaggaggagaaggagaagagaccggatctatatgccctagctatgggctactcgggccagctgaaaagccgaaagtcgtacatgattcccgaaaatgagtttcaccacaaggatcccccgccacgaaacgcagttgcgtcggtgcagaacggtcccggggggggacccagcagtagctcaattgggtccgcctccaaatctgatgaaagctcaactgaggaaactgataagagccgtgagcggagtcagtgcggcgtgaaggcagtcaataaggcttccagcacaaccccaaaaggaaattcatccaatggaaatagcgggtcgaacagtaacaaggccgtaaaagagaacgacaaagagaaggggaaggaaaaagagaaagagaagaaggagaaaaccccagccaccacgcctgaggccagggtgctgggcaaagatggaaaagaaaaaccaaaagaagagagaccaaacaaagacgaaaaggcgcgggagactaaagagcggacccctaagtcagacaaggaaaaggaaaaatttaagaaagaggaaaaagcgaaggacgagaagttcaaaactacagtacccaacgcagaatcaaagtctacccaggagcgggaaagagagaaagagccctcacgcgaacgggatatcgcgaaggagatgaagtccaaggaaaatgtgaaagggggcgaaaaaactccagtcagtggatctctgaaatcgcccgtgcccagatcagacatacccgaaccagaaagggaacagaaaagaagaaagatcgacacacatccatctccgtcacattctagcaccgttaaagattcgctcatagaactgaaggagtctagcgccaaactttacattaaccatacccctccacccttgtcgaagtcaaaagaacgggaaatggataaaaaggatctggataagtctcgggaacgatcgcgcgaaagagagaagaaagacgagaaagaccgcaaagaaaggaagcgggaccattccaacaacgatcgcgaggtgcctcccgatttgaccaaacggcgcaaggaggaaaatgggaccatgggagtgtctaagcacaagtctgagagtccttgtgaaagcccttaccctaatgagaaggacaaggagaagaacaaaagtaagtcttcagggaaagagaaggggtctgactcctttaagagtgaaaaaatggacaagatcagttcaggtgggaaaaaagagtcccgacacgataaggagaagatcgagaaaaaggagaaacgggattctagcgggggtaaagaagagaagaaacaccacaagtcttccgataaacaccgctag

SEQ ID NO: 37167 - DNA, 4782 bp, Artificial Sequence
  derived and/or modified sequence
atggccgcagcggcagttgttgtacccgcggagtggataaaaaactgggagaaatctggaagaggtgagttcctccacctgtgtaggatactctccgagaacaagtctcatgattcctccacctaccgtgactttcaacaggcgctgtacgagctgagctaccacgtgatcaaaggaaacttgaaacacgaacaggcgagcaatgtcctgtccgacatctctgaatttagggaggacatgcctagtatcttggctgatgttttctgcatcttggacattgagacaaattgcctagaggagaaatccaaacgtgattactttacccagctggtattagcgtgtttatatctagtgagcgacacggttcttaaggaacgcctggaccctgagacgctcgaatctctgggtctcattaagcaaagccagcaatttaaccagaaatctgtgaaaattaaaaccaaactgttctacaaacagcagaagtttaatctcttgcgagaagaaaacgaaggctatgccaagctgatagctgagctcggacaggatctgagcggaagtatcacgtcagatttaatcctcgagaacattaagagccttatcggctgtttcaacttggatccaaatagagtcttggacgtcattttggaagtcttcgaatgtcggccagagcacgatgacttctttatttcccttttggagagctatatgtcaatgtgcgaacctcagacgctgtgtcacattcttggatttaaattcaagttctaccaggaacccaacggcgaaacaccgagttcactttaccgggtagcagcagtgttattacagttcaatctcattgacctggacgacctgtacgtacacctgctgcctgcagacaactgcataatggatgagcacaagagggagattgccgaggccaaacagatcgtgcgaaagctaacaatggtggtgctctctagcgaaaaaatggatgaacgggagaaggagaaggaaaaagaagaagagaaagtcgagaagccccctgataatcagaagctggggttgctcgaggccctgctcaaaatcggtgattggcaacacgcacagaacatcatggaccagatgcccccatactacgccgcgtctcacaaattaattgctctcgcaatctgtaagcttatccacattaccatcgaaccgctttataggcgtgtaggcgtgcccaagggcgctaaaggctccccagtgaacgctcttcagaataagagggcaccaaagcaggctgagagttttgaggatctgcggagagatgtgttcaatatgttctgttacttgggacctcatctcagtcatgaccccattttattcgccaaagtcgtgagaattgggaagtcttttatgaaggagttccagtccgacgggagcaaacaggaggataaagagaaaactgaggttatccttagttgcttactgagcatcaccgaccaggttcttctgccttctctctctctgatggactgcaatgcctgtatgtccgaggaactgtggggcatgtttaaaacgtttccataccagcaccgctatcgattatatggacagtggaaaaatgagacctataacagccaccccctcctcgtgaaagtgaaagctcagactattgatcgtgccaaatacatcatgaagagactaacgaaagaaaatgtgaagccaagtggccggcagattggaaaactgtcccactccaaccccaccattctttttgactatatcttatcccagatacagaaatatgataatctcataacccctgtggttgattcactcaagtacttaacatctctcaactacgacgtactggcatactgtatcatcgaggccctcgccaaccccgagaaagaacggatgaagcacgacgacactactatctctagttggttacagtcgcttgcaagtttttgcggagctgttttccgaaaatatcctatcgacctggcaggcctcctgcagtatgtcgccaaccaattaaaggcggggaaaagtttcgatctgctcatcctcaaggaggtcgtgcagaaaatggccggaattgagataacagaggagatgacgatggagcagctggaagccatgactggaggcgaacagctgaaagctgaaggagggtattttggacaaatcagaaacactaagaaaagtagtcagcggctcaaggatgccttactcgaccacgacctggctttaccactgtgcctcctgatggcacagcaacggaacggcgtgattttccaggagggcggtgaaaagcatctgaagctggtgggaaagctgtacgaccagtgtcacgacaccctcgtccaatttgggggatttctggcgagcaacctgtccactgaggactacattaaacgcgttccatcaatcgacgtgctatgcaatgagttccacactccacacgacgctgctttcttcctttcacgcccaatgtatgctcaccacattagtagcaaatacgacgagctaaaaaagtctgaaaaaggatcaaaacagcagcataaggtgcataaatacataacttcttgtgaaatggtcatggcccccgtccacgaggcagtagtttcattacacgtgtctaaagtctgggacgacatttcccctcagttctatgctacattttggagcctgactatgtatgatctcgcagtccctcatacctcttatgaacgcgaggtgaacaagttaaaggtacagatgaaggccattgacgacaatcaggaaatgcctcccaataagaaaaagaaagagaaagaaagatgtacggcgctccaggataagcttcttgaagaggagaagaagcaaatggaacatgtgcagcgggtactacaacgcttgaagcttgagaaggacaactggttgttggcaaagtcaacaaaaaatgagactatcacaaagtttctgcagctgtgtatttttccacgatgcattttttcagccatcgacgcagtatattgcgctcgctttgtggaactagtccatcaacaaaagaccccaaattttagtacacttctgtgttatgatcgggtgtttagcgacattatatacactgtggcatcctgtacagagaacgaagcatcacgctatgggcgctttctgtgttgcatgctggaaactgtgaccaggtggcattcagaccgggctacttatgaaaaggaatgcggcaattaccctggctttcttacaatactgcgcgccaccgggttcgacgggggcaataaagccgatcagcttgactacgagaattttagacatgtggtgcataaatggcactataaacttactaaggcgtccgtgcattgcctcgagactggtgagtacactcacatccgcaatatcctgatcgtcctcacaaagatccttccatggtacccgaaggtgttgaacctgggtcaagccctggagcgaagggtgcataagatctgccaggaggaaaaggagaagcgtcccgacctgtacgcattggccatgggttactcaggccagctcaaaagtcgtaagagctatatgatacctgaaaacgagttccaccacaaagatccacctccccgaaacgcggtagcgtcagtccagaatggcccaggggggggcccgagttcaagttctatcgggtctgcatcaaaatccgacgaatctagcaccgaggagactgacaaatctcgtgaacgctcacagtgtggggtcaaggcagtcaacaaagcatctagcaccactcctaaaggcaatagcagcaatggcaattcaggtagcaattccaacaaagctgtgaaggagaacgataaggagaagggcaaagagaaggaaaaggagaaaaaggaaaaaacacccgctactacaccagaggcgcgtgtgctcgggaaggacggcaaagagaagcccaaggaagaaagaccaaataaagacgaaaaagctcgggagactaaggagcggactcccaagtccgacaaagagaaggaaaagttcaagaaggaggaaaaggcaaaagatgagaaatttaagacaacagtgcctaacgctgaaagcaagtccactcaggagagagagcgggagaaagagccttcccgcgagcgggatattgctaaggaaatgaagtctaaggagaacgtcaaaggaggggagaagaccccggtgtccggctctctcaagagcccagtcccaagatctgacatccccgaaccggagcgtgagcagaaaagaagaaaaattgacacacatccaagtccgtcccacagcagcacagtgaaagacagcctgatcgagctgaaggagtcttcagccaaactgtatataaatcacaccccccctcccctcagtaaatccaaagagagagaaatggataaaaaagatctggacaagtctcgggaacggtctcgagaacgcgaaaagaaggatgagaaggataggaaagaacggaagcgtgatcattccaacaatgatagggaagtgccgccagatctgacaaagcgaagaaaagaagagaatggtacaatgggcgttagcaaacataaaagcgagtccccatgcgaaagcccttatcctaatgagaaggataaggagaagaacaagagcaaatcatcagggaaagagaaaggatccgactcatttaaaagcgaaaaaatggacaaaatttcatccggagggaagaaagaaagccgccatgataaggagaagatcgagaagaaggagaaaagagattcctctggaggcaaggaagagaaaaagcaccataaaagttcagacaaacatagatag

SEQ ID NO: 37168 - DNA, 4782 bp, Artificial Sequence
  derived and/or modified sequence
atggctgctgctgctgtggtggtgcctgctgagtggatcaagaactgggagaagagcggccgcggggagttcctgcacctgtgccgcatcctgtctgagaacaagagccatgacagcagcacctacagagacttccagcaggccctgtatgagctgagctaccacgtgatcaagggcaacctgaagcatgagcaggccagcaatgtgctgagtgacatcagcgagttccgggaggacatgcccagcatcctggctgatgtgttctgcatcctggacatcgagaccaactgcctggaggagaagagcaagagggactacttcacccagctggtgctggcctgcctgtacctggtgtctgacacagtgctgaaggagcggctggaccctgagaccctggagagcctgggcctcatcaagcagagccagcagttcaaccagaagtctgtgaagatcaagaccaagctgttctacaagcagcagaagttcaacctgctgcgggaggagaatgaaggctacgccaagctgattgctgagctgggccaggacctgagcggcagcatcaccagtgacctgatcctggagaacatcaagagcctcatcggctgcttcaacctggaccccaacagagtgctggatgtgatcctggaggtgtttgaatgtagacctgagcatgatgacttcttcatcagcctgctggagagctacatgtccatgtgtgagccccagaccctgtgccacatcctgggcttcaagttcaagttctaccaggagcccaatggagagacccccagcagcctgtacagagtggccgctgtgctgctgcagttcaacctgattgacctggatgacctgtatgtgcacctgctgcctgctgacaactgcatcatggatgagcacaagcgggagattgctgaggccaagcagatcgtgaggaagctgaccatggtggtgctgagcagcgagaagatggatgagcgggagaaggagaaggagaaggaggaggagaaggtggagaagcccccagacaaccagaagctgggcctgctggaggccctgctgaagattggagactggcagcacgcccagaacatcatggaccagatgccaccctactatgctgccagccacaagctgattgccctggccatctgcaagctgatccacatcaccatcgagcccctgtaccgccgggtgggcgtgcccaagggggccaagggcagccctgtgaatgccctgcagaacaagagggcccccaagcaggccgagagctttgaggacctgcggagagatgtgttcaacatgttctgctacctgggcccccacctgagccatgaccccatcctgtttgccaaggtggtgagaattggcaagagcttcatgaaggagttccagagtgatggcagcaagcaggaggacaaggagaagacagaggtgatcctgagctgcctgctgagcatcacagaccaggtgctgctgcccagcctgagcctgatggactgcaatgcctgcatgtctgaggagctgtggggcatgttcaagaccttcccctaccagcaccgctaccgcctgtatggccagtggaagaatgagacctacaacagccaccccctgctggtgaaggtgaaggcccagaccatcgaccgggccaagtacatcatgaagaggctgaccaaggaaaatgtgaagcccagcggccggcagatcggcaagctgagccacagcaaccccaccatcctgtttgactacatcctgagccagatccagaagtatgacaacctgatcacccctgtggtggacagcctgaagtacctgaccagcctgaactatgatgtgctggcctactgcatcatcgaggccctggccaaccctgagaaggagaggatgaagcatgatgacaccaccatcagctcctggctgcagagcctggccagcttctgtggggctgtgttcaggaagtaccccatcgacctggccggcctgctgcagtatgtggccaaccagctgaaggccggcaagagctttgacctgctgatcctgaaggaggtggtgcagaagatggccggcatcgagatcacagaggagatgaccatggagcagctggaggccatgactggaggagagcagctgaaggccgagggcggctacttcggccagatccggaacaccaagaagagcagccagaggctgaaggatgccctgctggaccatgacctggccctgcccctgtgcctgctgatggcccagcagagaaatggagtcatcttccaggagggcggggagaagcacctgaagctggtgggcaagctgtatgaccagtgccacgacaccctggtgcagtttggaggcttcctggccagcaacctgagcacagaggactacatcaagagggtgcccagcattgatgtgctgtgcaatgagttccacacccctcatgatgctgccttcttcctgagccggcccatgtatgcccaccacatcagcagcaaatatgatgagctgaagaagtctgagaagggcagcaagcagcagcacaaggtgcacaagtacatcaccagctgtgagatggtgatggcccctgtgcatgaagctgtggtgtccctgcacgtgtccaaggtgtgggatgacatcagcccccagttctacgccaccttctggagcctgaccatgtatgacctggccgtgccccacaccagctatgagcgggaggtgaacaagctgaaggtgcagatgaaggccattgatgacaaccaggagatgccacccaacaagaagaagaaggagaaggagcgctgcacagccctgcaggacaagctgctggaggaggagaagaagcagatggagcacgtgcagagggtgctgcagaggctgaagctggagaaggacaactggctgctggccaagagcaccaagaatgagaccatcaccaagttcctgcagctgtgcatcttcccccgctgcatcttcagcgccattgatgctgtgtactgtgccaggtttgtggagctggtgcaccagcagaagacccccaacttcagcaccctgctgtgctatgacagagtcttcagtgacatcatctacacagtggccagctgcacagaaaatgaggccagccgctatggccgcttcctgtgctgcatgctggagaccgtgacccgctggcacagcgaccgggccacctatgagaaggaatgtggcaactacccaggcttcctgaccatcctgcgggccactggatttgatggcggcaacaaggctgaccagctggactatgagaacttcagacatgtggtgcacaagtggcactacaagctgaccaaggcctctgtgcactgcctggagaccggggagtacacccacatccggaacatcctgattgtgctgaccaagatcctgccctggtaccccaaggtgctgaacctgggccaggccctggagcggcgggtgcacaagatctgccaggaggagaaggagaagaggccagacctgtatgccctggccatgggctacagcggccagctgaagagcaggaagagctacatgatcccagaaaatgagttccaccacaaggaccccccaccaagaaatgctgtggcctctgtgcagaatggacctgggggcggccccagcagcagcagcatcggcagcgccagcaagagtgatgagagcagcacagaggagacagacaagagccgggagaggagccagtgtggggtgaaggctgtgaacaaggccagcagcaccacccccaagggcaacagcagcaatggaaacagcggcagcaacagcaacaaggctgtgaaggaaaatgacaaggagaagggcaaggagaaggagaaggagaagaaggagaagaccccagccaccaccccagaggcccgggtgctgggcaaggatggcaaggagaagcccaaggaggagcggcccaacaaggatgagaaggcccgggagaccaaggagaggacccccaagagtgacaaggagaaggagaagttcaagaaggaggagaaggccaaggatgagaagttcaagaccaccgtgcccaatgctgagagcaagagcacccaggagcgggagcgggagaaggagcccagccgggagcgggacatcgccaaggagatgaagagcaaagaaaatgtgaagggcggggagaagacccctgtgtctggcagcctgaagagccctgtgcccaggagtgacatccctgagcctgagcgggagcagaagaggaggaagattgacacccaccccagccccagccacagcagcacagtgaaggacagcctgattgagctgaaggagagcagcgccaagctgtacatcaaccacaccccaccacccctgagcaagagcaaggagcgggagatggacaagaaggacctggacaagagccgggagaggagccgggagcgggagaagaaggatgagaaggacaggaaggagaggaagagggaccacagcaacaatgaccgggaggtgcccccagacctgaccaagaggaggaaggaggagaatggcaccatgggcgtgtccaagcacaagtctgagagcccctgtgagagcccctacccaaatgagaaggacaaggagaagaacaagagcaagagcagcggcaaggagaagggcagtgacagcttcaagtctgagaagatggacaagatcagcagcggcggcaagaaggagagcagacatgacaaggagaagattgagaagaaggagaagagggacagcagcggcggcaaggaggagaagaagcaccacaagagcagtgacaagcacaggtag

SEQ ID NO: 37169 - DNA, 4782 bp, Artificial Sequence
  derived and/or modified sequence
atggccgccgccgccgtggtggtgcccgccgagtggatcaagaactgggagaaatcaggacgtggcgagttccttcacctctgccgaatcttgtctgagaacaagtcacatgactcaagtacctacagagatttccagcaggctctctatgagctctcctatcacgtcattaaaggcaaccttaagcatgaacaagccagcaatgtgttgtccgatatttctgagttccgcgaagacatgccgtcaatacttgctgacgtattttgtattctcgatatagaaacaaattgtctggaggaaaagagtaagcgggactatttcacccagttagtgctcgcatgtctgtaccttgtgtcagacaccgtgctgaaggaacgactggaccccgaaactctggaaagtctgggtctgattaagcaaagtcagcagttcaatcagaaatcagtgaaaatcaagacaaagcttttctacaagcagcaaaagtttaacttgctaagagaagagaacgagggttatgctaaactgatcgcagagctaggacaggatctcagcggctccattaccagtgatctgatacttgaaaatatcaaatctctgattggctgctttaacttagacccaaacagagtacttgacgtaattttggaagtgttcgaatgccgccccgaacacgacgatttcttcatttccttgctggaatcctacatgtcgatgtgtgagccccaaaccttatgtcatatccttggatttaagtttaagttctaccaagagccaaatggcgagactccgtcaagtctttacagggtagccgcagttcttctgcagttcaacctgattgacttagatgatctctatgtccacctgcttccagccgacaactgtataatggatgagcataagagagaaattgccgaagcaaagcagatcgtgaggaagttaaccatggtcgtattgagtagcgaaaaaatggacgaacgcgagaaggagaaggagaaggaggaagagaaggtggagaagccacctgataatcaaaaactaggactgctggaggctctcctcaagatcggcgattggcaacacgcccagaacattatggaccagatgccaccctactacgccgccagccacaagttaatcgctctggcgatttgcaaacttattcatatcactattgagcctctgtacaggcgtgttggagtccccaaaggcgccaaaggctcaccagttaacgcactgcagaacaaaagagcccccaagcaggccgaaagtttcgaggacctcagaagggatgtatttaacatgttctgctacctgggccctcatctgtctcacgatcccattctcttcgcaaaagtagtccgcattggcaaaagctttatgaaggagttccaatcagatgggagtaaacaagaggacaaggagaaaacagaagtgattctcagctgcctgctgagcattactgatcaggtgctcctgcctagcctctctctaatggactgcaacgcatgtatgagcgaggaactgtggggtatgttcaaaaccttcccctaccaacaccggtatcgcttgtacgggcagtggaagaatgaaacgtataactctcatcccctgctggtaaaagtcaaggcccagactattgatcgggccaagtatattatgaagcgtcttacaaaggagaatgttaagcccagtgggcggcagattggcaaactgtcgcatagcaaccctacaatcttgttcgattacattctgtctcagatccaaaagtatgacaacctcatcacacccgtcgtcgattcactaaaatatcttactagtctgaactatgatgtcttggcatattgtatcattgaagcactcgccaacccggagaaggaaagaatgaaacatgacgatactaccataagctcgtggctccagtctctcgcgtcgttctgtggtgccgtgttcaggaaatacccaattgatttggccggtctgctgcagtacgtggcgaatcagctaaaggctggcaagagtttcgatctactgatactcaaggaggtggtccagaagatggccgggatagaaattacggaggaaatgaccatggagcagctcgaagccatgactgggggtgaacagctgaaggctgagggtggatacttcggccagatccgcaatactaaaaaaagctctcaacgcctaaaagatgctctgctggatcatgaccttgccttgccgttatgccttttaatggcgcaacagaggaacggcgtgatcttccaggaggggggcgagaaacatttaaaactcgtcgggaagctgtacgaccaatgtcacgataccctggtgcaattcgggggctttcttgctagcaacctgagcacggaggattatatcaaaagggttccctctatagacgtgttatgcaatgagttccacactcctcacgatgctgccttttttctttctcggccaatgtacgcacaccatatctcatccaagtatgacgagctcaaaaagtctgaaaagggctccaagcagcagcacaaggtccacaagtacattacctcctgcgagatggtgatggctcctgtacacgaggcggtggtgagcctgcatgtgtcaaaggtctgggacgacatcagtccgcaattttacgctaccttttggagccttacaatgtacgacctggcagtaccccatacatcttatgagcgagaagtcaacaaacttaaggttcagatgaaggctatcgacgataatcaggagatgcctcccaataagaagaagaaggaaaaggaacgatgtactgccctgcaagacaagctgctggaggaggaaaagaaacagatggaacatgtgcagagggtgctacaacggctcaagttggagaaggataactggctgctcgccaaatccactaaaaacgaaacaataactaaatttttacagttgtgcattttcccgaggtgtatcttcagtgccattgacgcagtctactgcgcaagattcgtcgagctggtacaccaacagaaaactccaaactttagcacattgttatgctatgatcgagtcttttcagatatcatttacactgttgcgtcatgcacggagaacgaggcctcccgctacggcagatttctgtgctgtatgctagaaaccgttacgcgttggcattccgatagagcaacttacgaaaaggagtgtggcaactaccctggcttcctgacaatcctgcgtgctacgggatttgatgggggcaacaaagcggatcagctggattatgaaaactttaggcacgtggtccataaatggcactataagttgaccaaggcttcagtccattgtctggagactggcgaatacacacatatccggaatatactaattgtgctcacaaaaatacttccatggtaccccaaggtgttgaacctgggccaggcactagaacggcgggtacataagatttgtcaagaagagaaggaaaaaagacctgacttgtacgccctcgctatgggatactcgggtcagctgaaatcacggaaaagctacatgatccccgaaaacgagtttcaccacaaagaccccccacctcgcaacgcggtcgcctctgtccaaaacggccctggtggaggtcctagctcctcttctatcggtagtgcttcaaaaagcgacgaatctagcactgaagagaccgacaaaagcagagagcgaagccagtgtggtgtgaaagccgtcaataaagcttcctctacaaccccaaaaggaaacagctctaatggcaattctggcagtaatagcaacaaggccgtaaaggagaacgacaaggaaaaaggcaaggagaaagagaaagagaaaaaggaaaaaaccccggcaacaactcccgaagcccgtgtcctgggcaaggacgggaaggagaagccgaaggaagagcgaccgaataaggatgagaaagctagagagactaaagaacggactccaaaaagtgataaagagaaggaaaagttcaaaaaggaggagaaggcaaaagacgagaagtttaagactacggtaccgaacgccgaaagtaagtcgactcaggaaagggagcgggagaaagagcctagtagagagcgtgatatcgccaaagagatgaagtcgaaggaaaatgtgaagggtggcgaaaagacccccgtgagtggaagcctaaaaagccccgtgcctagaagcgatatccccgaacctgaaagggagcagaagagacggaagatagacacccacccttccccaagtcattcaagtacagtaaaggacagtttgatcgaattgaaagaatcaagtgcaaaactgtatatcaatcacaccccacccccactttccaagagcaaagagagagaaatggataagaaggacttggacaaaagcagagaaagatcccgggaacgcgagaaaaaggacgagaaggaccgcaaagaacggaagagggaccactctaataacgatagggaggtgccgcccgacttgactaagagacgcaaggaagaaaacggcaccatgggggtcagtaaacacaagtcggaatcaccgtgcgaatcaccttatccaaatgaaaaggataaggagaagaacaaatccaagtcatcaggtaaggaaaagggctctgactcatttaaaagcgagaagatggacaaaatctccagcgggggaaaaaaagagtcccgacacgataaagaaaagatagaaaagaaagaaaagagagacagctctgggggaaaagaagagaagaagcaccataaaagctctgacaagcataggtag

SEQ ID NO: 37170 - DNA, 4782 bp, Artificial Sequence
  derived and/or modified sequence
atggccgccgccgccgtggtggtgcccgccgagtggatcaagaactgggagaaaagcgggcgaggagagtttttgcatctgtgtcgcatcctgtccgagaacaagtcacacgatagcagtacctaccgtgactttcagcaggcgttgtacgaactgagctaccacgttatcaagggcaacttaaaacacgaacaggcctctaatgtgttgtcagacatctcggaatttagagaggatatgccctccatcctggccgacgttttctgcattttggatatagaaaccaactgtctggaggagaagtcaaagagggattacttcactcaactggtcctggcctgcctgtatcttgtcagcgacacggtgttgaaggaaaggctcgaccccgaaactctcgaaagcctggggctgataaagcagtcccaacaattcaaccagaagtctgtaaagattaagactaagctgttctacaaacagcagaagtttaacctcctccgagaagaaaatgagggttatgcaaagcttattgccgaattgggccaggatttaagtgggagcattacatccgatctgatccttgaaaacatcaagagtctgattggctgtttcaatcttgaccctaacagggtgctcgatgtgattctcgaggtgtttgagtgtagaccagagcacgatgacttcttcatttccctgttagaatcttatatgtcaatgtgcgagccacagaccctttgtcatattcttggattcaagtttaaattctaccaggaaccaaatggcgagacccccagctcattgtaccgcgtggcagccgtacttcttcagttcaacttgatcgatcttgacgacttatatgtccatttgctgccagctgataattgtataatggatgagcacaaaagggagatagctgaggccaaacaaattgtgagaaaactcaccatggtagtgctatctagtgaaaaaatggacgaacgcgagaaggagaaagaaaaggaagaggaaaaggttgaaaagcctcccgacaatcagaagctgggactattagaggccttgctgaagattggtgactggcagcatgctcagaatatcatggatcagatgcccccctactatgcagcttctcacaagttaattgccctggcaatctgtaagttgattcacatcaccatagagccactgtaccgaagggtgggcgtgcctaagggagcaaaaggttccccagtaaatgcactacaaaataagagggctccaaagcaggccgaatcttttgaggacctgaggcgagacgtgttcaatatgttttgctatcttgggccgcacctgagtcatgatcctattctcttcgccaaagtcgttaggatcggaaagtccttcatgaaagaatttcagtccgacggatcgaaacaggaggataaggaaaagactgaggtcatcctgtcttgtcttcttagtataacggaccaagtgctgcttcccagtctgagcctgatggactgtaacgcctgcatgtccgaagaactctggggcatgtttaaaacattcccctaccagcaccgctaccggctttatggccagtggaagaacgaaacctacaatagtcacccgctgctggttaaggtcaaggcacaaaccatagaccgcgctaaatacattatgaagcggctcactaaggagaacgtaaaaccgagtggtaggcaaatcgggaagttgagccatagtaatcctacaattttattcgactatatactgagccagatacagaaatatgacaacctgatcacccctgtcgtggattctctgaagtatctgacatccctgaattacgacgtgctggcctactgcattatcgaagccctggcaaatccggagaaagaacggatgaaacatgatgataccacaatttccagctggctccagtctctcgcctcattctgtggcgcagtttttcgtaaatatcctatcgacctcgctggtctgctgcagtatgtcgctaaccagctgaaggctggtaagagttttgatctgttgattctcaaagaagtggtgcaaaaaatggcggggatcgaaatcaccgaggaaatgacaatggagcaactggaagccatgactggaggggaacagcttaaggcagagggagggtatttcggccagatccgaaatactaaaaaatccagccagcgactcaaagatgcgctacttgatcatgatctagctctgcctctgtgccttcttatggcccagcagcgtaacggggtgatcttccaggaaggaggagaaaagcatcttaagctagtgggaaagctgtacgatcagtgtcatgatactctcgtgcagttcggcggattccttgcttcaaacttatcaaccgaagattacatcaaaagggttccatctatcgatgtactgtgtaacgaattccatacaccccatgatgcggctttttttttgtcaaggccaatgtatgcacaccacatttcaagcaagtacgacgagctgaagaagtccgagaaagggagcaagcaacagcataaggtgcacaagtatatcacctcatgcgagatggtcatggcccctgtgcatgaagccgttgttagcctccacgtgtccaaggtctgggatgatatttccccacagttttacgctactttctggtcattgaccatgtacgacctcgcagttccccacacatcctacgagcgagaggtcaataagctcaaggtccagatgaaagccattgatgacaatcaggagatgcctcccaataaaaagaagaaggagaaggagagatgcactgccctgcaggataaactgctggaggaggagaaaaagcagatggagcatgtgcagagagtgttgcagcggttgaagctggagaaggacaactggctgctggctaagtctacgaagaatgaaaccatcaccaagttcttgcagctgtgtatatttccacggtgtatttttagcgcaattgacgctgtttactgtgcgaggttcgttgagctcgtgcatcaacaaaagacacccaatttcagcaccctcctgtgttatgaccgcgtgttttctgacatcatctacactgttgcttcatgcacagaaaacgaagcaagtaggtacggaaggttcctgtgttgtatgcttgaaactgtcacacgatggcactcagacagagctacgtacgaaaaagagtgcgggaattaccccggattcttaactattttgcgggccacgggatttgacggaggaaataaggccgaccagttggactacgagaattttaggcacgtcgttcataagtggcactataagctgaccaaggccagcgtacactgtctggagaccggggagtacactcacatccggaacatcttaattgtgcttactaagatcctcccatggtatccgaaagtgttaaatctcggccaagccctcgagcgccgagtacataagatttgtcaggaggagaaagaaaaacgaccagacctgtatgccctggctatgggctatagcggccaattaaagagtaggaagtcatacatgatcccagagaatgaatttcaccataaggaccctccgccgcgtaatgcggttgcctccgttcagaacggcccggggggtggtccctccagtagcagcattggctctgcaagcaagtccgacgaatcaagcactgaggagacagataaaagtcgcgagaggagccagtgcggcgttaaggccgtaaataaggcctctagcactaccccaaagggtaacagtagcaatggcaattcaggtagcaactctaacaaagctgttaaggaaaatgacaaagaaaaaggcaaagagaaagagaaggaaaagaaagagaaaacacccgcaactacacctgaggccagggtgttgggaaaagacggtaaggagaaacctaaggaggagaggccgaacaaagacgaaaaagctagagagacaaaggagcggacgcccaagtccgacaaggagaaggagaagtttaagaaagaagagaaggcaaaggacgaaaaattcaagacaacagtgcccaatgctgagtctaagtccacacaggagcgagagagggagaaagagccaagtcgcgaacgagacatagctaaagagatgaagtcaaaggagaatgtgaagggaggagaaaagactccggtaagtggatcgctgaagtcaccagtgccacgctccgacatcccggaacccgagcgggagcaaaaacgccggaagatcgatactcacccatccccatctcactcttcaaccgtcaaggacagcctcattgagttaaaagagtcctcagccaagctctatataaaccacaccccccccccgctgtcaaagtctaaggagagagagatggacaagaaagacctcgataagagtagagaaagaagtcgagagagggaaaagaaggacgagaaggaccggaaagagcgcaaaagggaccattccaataacgaccgagaggtccctcccgatctgaccaaacgccggaaggaggaaaacggcacaatgggtgtgagcaagcacaagagtgaatctccatgtgaatccccgtatcctaatgaaaaggataaggagaagaacaagagcaagtcatctgggaaagaaaaaggaagtgacagctttaagtctgagaaaatggacaaaattagctccggaggaaaaaaggaaagccggcacgataaggagaaaatcgagaagaaggagaagagagattcctcaggggggaaagaggagaaaaagcatcacaaatcctcagacaagcaccgctag

SEQ ID NO: 37171 - DNA, 4782 bp, Artificial Sequence
  derived and/or modified sequence
atggccgctgctgccgtcgttgttccggcagaatggataaagaactgggaaaagtcaggcaggggtgagtttcttcacttgtgtcgaatcctgagtgagaataaatctcacgattcctcaacatacagagacttccaacaggcactttacgaattgagctatcatgttatcaaaggaaatcttaagcatgaacaggcaagcaacgtcctctccgatatatcagagttcagggaggacatgccctctattctggcagacgttttttgcattctggatattgagacaaactgtctcgaggagaagtcaaaacgggattactttacccagctggtcttggcttgcctgtatctcgtcagcgacacagtgctaaaggaacggctagatcctgaaacactggaaagcctaggactgattaaacaatcacagcagttcaatcagaaatccgttaagatcaaaacaaaacttttctacaagcagcagaaattcaacctgctccgggaggagaacgaaggctacgcgaagctgattgctgagcttgggcaggacctgagcggcagtataaccagtgaccttattctggaaaatataaaatcactgataggttgctttaatctggacccaaaccgggtgctggatgttattcttgaggtgttcgaatgcaggcctgagcacgatgattttttcatttccctgctcgagagctacatgagcatgtgcgagccgcaaacactttgtcacatcctcggcttcaaatttaagttttatcaggagccgaacggtgagactccctcctcactgtacagggttgctgccgtgctcctccagtttaacctcattgacctggacgatttgtacgtacatctgctccctgccgataattgtatcatggatgaacacaagagggagatcgctgaagccaagcagattgtccgcaaactaacaatggtggtgctgtcttccgaaaaaatggacgagcgcgagaaggagaaagagaaagaagaggaaaaagttgagaagccgcctgataatcagaagcttggattgctggaggctctgctgaaaattggtgattggcagcacgctcagaacattatggatcagatgcctccttattatgcggcttctcacaagctgattgccctggccatttgcaaactcatccacataacaatcgaacccctctatcggagggtcggagtgccaaaaggggctaaggggagcccagtgaacgcgctgcaaaacaaaagggcgcctaaacaggccgagtccttcgaggacctcaggcgcgatgttttcaatatgttctgctatttgggcccacacctgagtcatgatccaatcctctttgccaaagtggtgcgtatcggaaaaagttttatgaaggagtttcagtctgatgggagcaagcaggaagataaagagaagaccgaagtaattctctcctgcctgctttctattactgaccaggtcctcctgccttccctcagcctgatggactgcaacgcctgcatgtccgaggagttgtggggtatgttcaaaacttttccatatcaacatcggtataggctgtatggtcagtggaaaaatgaaacatataactcccatccactactggtcaaggtcaaggctcagacgatcgatcgcgcaaagtatatcatgaaacgcctcacgaaggaaaacgtcaagccaagtggacgccagataggtaaacttagtcatagtaatccgacaattcttttcgattacatcctgagccaaattcagaagtatgataaccttattacacctgtggttgatagcctgaagtacctcacaagccttaactacgacgtcttggcgtactgcatcatcgaggctttggctaatcccgagaaagagagaatgaagcacgatgacacaaccattagctcttggcttcagagcctggcttcattctgcggcgcagtgtttcgcaagtaccctattgacctcgccggacttctacagtacgtggctaatcaactaaaagccggaaaatcttttgacctgctgattctgaaagaagttgtgcagaagatggcagggattgaaataaccgaggaaatgacaatggaacagctcgaagcgatgactggcggagaacaactcaaggcggagggtggatatttcggacagattagaaatactaagaagtcttcccagcgattgaaggacgcattattggatcacgaccttgctctccctctttgcctcttgatggctcaacaacgaaacggggtgattttccaagagggaggagagaaacaccttaagttagttggaaagctgtatgaccagtgtcatgacacgctggtgcagttcgggggatttctagcatcaaatctcagtacggaggactacataaagagagtcccgtcaatcgatgttttgtgcaacgagttccacactccacatgacgcagccttctttctcagccgcccaatgtatgctcatcacatcagtagtaagtatgatgagttaaagaaaagtgaaaagggctccaagcaacagcacaaagttcacaagtacatcacctcatgtgaaatggttatggcaccagtccacgaggctgtagttagcctgcatgtgagcaaggtctgggacgacattagtcctcagttctacgccacattctggagtctcaccatgtatgatctggccgtgcctcatacttcttacgagcgggaggtcaataaactgaaggttcagatgaaagccattgacgataaccaggagatgcctccaaacaagaagaaaaaggagaaagagcgctgtactgcacttcaggataagttgctggaagaagagaaaaagcaaatggagcatgtccagagagtgcttcagcgtttaaaattggagaaggacaattggttactggccaagtcgacaaaaaacgagacaataacaaagtttttgcagctgtgcatattcccaagatgcatcttcagcgctattgatgcagtgtactgcgctagatttgttgagctcgtgcaccagcagaaaactccaaacttctccaccctcctgtgttatgatcgggtgtttagtgacattatttacaccgtagcttcctgtactgaaaatgaggcaagtcgctacggcagattcctgtgttgtatgctggaaacagttacccgatggcactccgaccgcgctacttacgagaaggagtgtggaaattaccccggatttttgacaatactccgcgcaactggttttgacggtgggaacaaggcagatcagctcgattatgaaaattttcgccatgtggtacacaaatggcattataagctgacgaaggcctctgtgcactgcctagaaaccggcgaatacacccatattcggaatattttgattgtccttacaaaaatcctgccctggtaccccaaggtgctgaacctgggacaagcactcgagaggcgcgtacataagatctgtcaggaggagaaggaaaagaggcctgacctttatgctctggccatgggttactctggccaactgaagtctcgtaaatcttatatgattcctgaaaacgaattccatcacaaggaccctcctccacggaatgccgtcgcaagcgtgcagaacgggcctggcggtgggccttcctcctcttctatagggtccgcaagcaaatctgatgaatccagcactgaggagaccgacaaaagtcgcgagcgcagccaatgcggagtaaaagctgtaaataaggctagttccaccaccccaaaaggaaacagctctaacgggaatagcggaagcaattctaacaaagctgtaaaggaaaatgataaagaaaagggaaaagaaaaggagaaggagaaaaaggagaaaaccccagcgactacccctgaagcccgagttcttgggaaggacgggaaggagaaacccaaggaagagcgcccaaataaagacgagaaagcacgcgaaactaaggaaagaactcctaagtcagacaaagagaaggagaagtttaaaaaggaggagaaagccaaagatgaaaaattcaaaaccacagtgcctaatgcggagtccaagtcaactcaggaacgcgagagggagaaggaaccgagccgggagcgcgacatcgcgaaggaaatgaagagtaaggaaaatgtgaaagggggagagaagaccccagtttcaggatccttgaaaagtccagtcccaagaagcgatatccctgagccagagagggagcagaagaggagaaagattgacactcatcccagccctagccacagctccaccgtcaaagattcactgatcgaacttaaggaatcaagcgctaaactatatatcaaccacacacctccccctctgagtaagtcaaaggaaagggagatggacaagaaggacctggacaaaagtcgggaacgtagccgtgaaagagagaagaaagacgagaaggacaggaaggagcggaagagagaccactctaataatgatcgcgaagtgccgccagaccttacgaagagacgtaaagaagaaaacggtaccatgggtgtctcaaagcacaaaagtgaatccccttgtgagtccccctatcctaacgagaaagataaggagaaaaataaatctaagtcctcaggaaaggaaaagggaagtgacagcttcaagtccgaaaaaatggacaagattagcagtgggggaaagaaggagagcaggcatgacaaagaaaagatagagaagaaggaaaagcgtgattcgtcgggtggtaaagaagagaagaaacaccacaaaagtagtgacaagcacaggtag

SEQ ID NO: 37172 - DNA, 4782 bp, Artificial Sequence
  derived and/or modified sequence
atggccgcagctgccgtcgtcgtgcccgcagaatggatcaagaactgggagaagtcaggacggggagagtttctccacctctgtcggatcctctccgaaaacaaatcccacgacagctcgacttatcgtgactttcaacaggccctatacgagctgtcatatcacgttatcaaaggaaacttaaagcacgagcaggccagcaatgtcctctctgacatatcagaattcagggaggacatgcccagcattttggccgatgtcttttgcatattagacattgaaacaaactgcttggaagaaaagtccaaacgggattacttcacgcagttggttctagcctgtttatatctggtaagcgacaccgtccttaaagagagactggacccagagacgttggagtccctggggctaattaaacaaagccagcagtttaaccagaaatcagtgaagataaagacaaagttgttttataaacagcaaaagtttaacctcttgcgcgaagaaaacgaaggatacgctaaattgattgctgaattgggtcaggatctctctggaagcattacctctgacctgattctcgaaaacatcaaaagtctcatcgggtgcttcaacttagatcccaatcgtgttttagacgtcatattagaagtctttgagtgtcgccctgaacacgacgatttctttatttcactcctcgagtcatacatgtctatgtgtgagccacagaccctgtgtcacatactcggttttaagttcaagttttatcaagagcccaatggggagacaccatcatccctgtatcgcgtggccgctgtcctcttgcagtttaacttgatcgatctagatgatctatatgtgcatcttctgcccgcagataattgcataatggacgaacataagagggagatcgcagaagcaaagcagatcgtgagaaaacttaccatggtggttctctccagcgaaaagatggacgagcgagaaaaagagaaagaaaaggaggaggaaaaggtggaaaagccaccagacaaccagaaacttggcctgttagaagcgctgctcaagataggggattggcagcatgcccagaatatcatggaccagatgccaccttattacgctgcatctcataaacttattgccctggctatctgcaaacttatccatatcacgatcgagcctttatacaggcgggtgggcgtacctaagggcgctaaagggagccccgtcaacgcacttcaaaacaaacgggcacccaagcaagccgagagcttcgaggacttaagacgcgacgtgttcaatatgttttgttacttgggtcctcacttgagccatgatccgattctctttgctaaggtcgtccggatagggaagagctttatgaaggagttccagtccgatggcagtaaacaagaggataaggaaaagacggaggttatcctgtcctgtctcctgtcaataaccgatcaggttctgcttcccagtctgagcctgatggattgtaatgcctgtatgtctgaagagctctggggaatgtttaagaccttcccctaccagcatcgatataggttatacgggcagtggaagaatgaaacctacaattctcatcctctccttgtcaaagtgaaggcacaaaccattgaccgggcaaagtatattatgaaacgacttaccaaagaaaacgtcaaacctagcggcaggcaaatcggtaagttgtctcactctaatcctaccatcctgttcgattacattctgagccagatccagaaatatgacaacctgattactccagtcgtagattcactgaaatacctgaccagcctgaactacgacgtgttggcttactgtatcatcgaagccctcgcaaatcccgagaaggagcgaatgaaacatgacgatacaactatatcaagctggctgcagtcattggcctctttttgcggtgccgtgtttcgcaagtatccaatcgatttggccggtctgcttcagtacgtagccaaccaactgaaggcgggaaagagcttcgacttgcttatcttaaaggaggtcgtgcagaaaatggctggtatcgaaataactgaggagatgacgatggagcagctggaagctatgacgggaggagagcagctgaaggccgaaggcggttattttggacaaataaggaatacaaagaaatccagccagcggctgaaagacgccttattggatcacgatctggccctgccattgtgtcttctgatggcccaacagcgcaatggcgtgatatttcaggaaggcggtgagaagcacctcaaactggttggcaaactgtacgatcagtgccacgacactctggtgcagttcggtgggtttttagccagtaacctgagtacagaagactacattaagagggtgccatctatcgatgtcctttgtaacgaattccacaccccacacgacgccgcttttttcctctcccggcctatgtacgcgcaccacatttcctcgaaatacgatgagctgaaaaagagcgaaaaaggcagcaaacagcagcacaaagtgcacaaatacattacgtcatgcgagatggtgatggcaccagtgcacgaggcagtggtctcattacatgtgtccaaagtgtgggacgacattagcccacagttttatgcaaccttctggtcattgaccatgtacgacttagcggtgcctcatacttcatatgagagggaagtcaataagttaaaagtgcagatgaaagccatagacgacaaccaggagatgccccctaataagaaaaagaaggaaaaggaaagatgcactgcactgcaagacaaactgctggaggaagagaagaagcagatggagcatgtccagcgggtcctccaaagacttaaactggagaaggataactggttgctagcaaagagcaccaagaatgagaccattacaaagtttttacagctttgtatctttccccgttgcatcttcagtgccattgatgcggtctactgtgctcgcttcgtggagctagttcatcagcagaaaactcccaacttctccacactgctgtgttacgaccgtgtgttttccgacattatttacaccgtggcatcttgtaccgagaacgaggctagtaggtacggacgctttctgtgctgcatgctcgagacagtaacaagatggcacagcgacagagccacttatgaaaaggagtgcggcaattacccagggttcctgacaatccttcgcgcaaccggcttcgacggtggcaacaaagccgaccagttagattacgagaatttccggcacgtggtgcataagtggcactacaagctgactaaggcttctgtgcactgcctcgagactggagagtacacccatattcggaacatactgatcgtattaacaaaaatcctgccgtggtatcctaaagtcctcaacctgggccaagcattagaacggagggttcataagatctgccaggaggagaaggaaaagagaccagatctttatgctcttgcaatgggctattcggggcagcttaaatctcggaaaagctatatgattcccgaaaatgaatttcaccacaaagatccgcctcccaggaatgcggtggcttccgtccaaaacgggccaggaggcggtccatctagtagctccatcggttctgcctcgaaatcagatgagtcgtctaccgaagagaccgacaaaagcagagagcgctcacagtgcggcgtaaaagcggtgaacaaagcgagcagtactactcctaaaggcaattcctcgaatgggaactccggctctaattccaataaagcggttaaggaaaatgacaaagaaaaaggaaaggaaaaggagaaggagaaaaaagagaagacccctgccacgacacctgaggctagggtactcgggaaggatggtaaagagaagccaaaggaggagcgtcctaacaaagacgagaaagccagagaaactaaggagcggacgcctaagagtgataaggagaaagaaaaattcaagaaagaggaaaaggcaaaggacgaaaaatttaaaacgaccgttccaaatgcggaaagcaaatcgacacaagaacgtgagcgcgagaaagagccttctcgcgagagggacattgcgaaagagatgaagtcaaaagagaatgtcaaggggggtgagaaaacccccgtgtccgggtcattgaaaagccctgtgcctcggagcgacattcccgaaccagagcgtgagcagaagagaaggaagatcgatactcaccccagcccatcccactcaagtaccgttaaagattcattaattgagctgaaggagtctagcgccaagctctatatcaatcacactcctcctcctttgtcgaagtccaaggaaagggaaatggataagaaggatttggacaagagccgggaacgcagcagggagcgagaaaagaaggatgagaaggaccgaaaggagcggaagagggaccattctaacaacgatagggaggttccaccagatttaacaaagagaagaaaggaggaaaacggaacaatgggagttagcaagcataaatccgagtccccgtgtgaatctccctaccctaatgaaaaagacaaagaaaagaataaatccaagtccagcgggaaggagaagggcagcgattccttcaagagcgagaagatggacaaaatcagcagtggagggaagaaggagagtaggcatgacaaggagaagatagagaagaaggaaaagagggattcttccggtggcaaagaggagaagaagcaccataagtccagtgacaaacatcgttag

SEQ ID NO: 37173 - DNA, 5609 bp, Artificial Sequence
  derived and/or modified sequence
acatccgggcttctgctactagtgagaggaagatggcggccgcggctgtggtggttcccgcagagtggataaagaactgggagaaatcagggagaggcgaatttttgcatttatgtcggatcctcagtgaaaataaaagccatgatagttcaacatacagagatttccagcaagctctctatgagttgtcatatcatgtaattaaaggaaatctaaagcatgaacaggcatctaatgttcttagtgacattagtgaatttcgtgaggatatgccctccattcttgctgatgtattctgcatattagacattgagacaaattgtttagaagaaaaaagcaagagagactattttacacagttggtattagcatgtttgtatttagtttcagacacagttctaaaggaacgcctggatccagaaacactggaatcattagggcttatcaaacaatcacagcaattcaatcaaaagtcagttaaaatcaagacaaaactcttttataagcagcaaaaattcaatttgttaagagaagagaatgaaggttatgccaagctgattgctgaattggggcaagatttatctggaagtattactagtgatttaatcttagaaaatatcaaatctttaataggatgctttaatctggatcccaatagagttttggatgtcattttagaagtgtttgaatgcaggccagaacacgatgacttctttatatctttgttagaatcttacatgagtatgtgtgaaccgcaaacactgtgtcatattcttgggttcaaattcaagttttaccaggaaccaaatggcgagacaccatcatctttatacagagttgcagcagtacttctacaatttaatcttattgatttagatgatctttatgtacatcttcttccggctgataattgcattatggatgaacacaaacgagaaattgcggaagctaagcaaattgttagaaagcttacgatggttgtgttgtcttctgaaaaaatggatgagcgagagaaagaaaaggaaaaagaagaggagaaagtagagaaaccacctgataaccaaaaacttggcttgttggaagccttattaaagattggtgattggcaacatgcacagaacattatggatcagatgcctccatactatgcagcttcacacaagctaatagcccttgctatttgcaagctcattcatataactattgagcctctctaccgaagagttggagttcctaaaggtgctaaaggctcacctgttaatgctttgcaaaacaagagagcaccaaaacaagctgagagctttgaagatttgaggagagacgtgttcaatatgttctgttaccttggtcctcacctttctcacgatcccattttatttgcaaaagtggtgcgcataggcaagtcatttatgaaggagtttcagtctgatggaagcaaacaagaagataaagaaaaaacggaagttatccttagctgtttgcttagcattactgaccaggtactacttccatctctttctttgatggactgcaatgcttgtatgtctgaggaactatggggaatgtttaaaacatttccatatcagcatagatatcgtctgtatggccagtggaagaatgaaacttataacagtcacccacttttagtaaaagttaaagctcaaacaatagacagagccaaatatatcatgaagcgcctaaccaaggaaaatgtgaagccttctggaagacaaattgggaagttgagccacagcaatccaaccattttgtttgattatatcttgtcacaaatacagaagtatgataacttaataacacctgtagtagattcattgaaatacctcacttcactgaattatgatgtcttggcctattgtatcattgaagctttagctaatccagaaaaggaaagaatgaaacatgatgacacaaccatctcaagctggcttcagagtctggctagtttctgtggtgcagtttttcgtaaatatccaattgatcttgctggtcttcttcagtatgttgccaatcagctaaaggcgggcaaaagttttgacctgcttatattgaaagaagtggtacaaaaaatggcaggaatagaaattacagaggaaatgacaatggagcaactagaggctatgactggtggagagcagctaaaagctgagggtggttattttggtcagatcagaaacactaaaaaatcctctcagagattaaaggatgctctattggaccatgatcttgcccttcctctctgtctgcttatggctcagcagagaaatggggtaatctttcaggaaggtggagagaaacatttgaaacttgtgggaaagctctatgaccagtgtcatgataccctggtgcagtttggtgggtttttagcatctaatctgagcacagaagattatataaagcgagtgccttcaattgatgtactctgtaatgaatttcatacaccccatgatgcagcatttttcctgtctaggccaatgtatgcccatcatatttcgtcaaagtatgatgaacttaaaaaatcagaaaagggaagtaaacagcaacataaagttcataagtacattacatcatgtgagatggtgatggcgcctgtccatgaagcagtggtctccttacatgtttccaaagtctgggatgacatcagccctcaattctatgctacattctggtcattgacaatgtatgaccttgcagttccacacaccagctatgaacgagaagtcaataaacttaaagtccagatgaaagcaattgatgacaatcaggaaatgcccccaaataaaaagaaaaaagagaaggagcgctgtactgcccttcaggacaagcttcttgaagaagaaaagaaacagatggaacatgtacagagagttctacagagattgaaactggaaaaggacaactggcttttagcaaaatctaccaaaaatgagaccatcacaaaatttctacagctgtgtatatttcctcgatgtattttttcagcaattgatgctgtttactgtgctcgttttgttgaattggtacatcaacagaaaactccaaatttttccacacttctttgctatgatcgagttttctctgacataatttacacagttgcaagctgtactgaaaatgaagccagtcgatacggaaggtttctttgctgcatgttagagactgtgaccaggtggcatagtgatagagccacatatgaaaaggaatgtggaaactatccaggattccttaccatattacgggcaactggatttgatggtggaaataaggctgatcaattagactatgaaaattttcgacatgttgtacataaatggcattacaaactaaccaaggcatcggtacattgccttgaaacaggcgaatatactcacatcaggaatatcttgattgtgctaacaaaaatacttccttggtacccaaaagttttgaatctgggtcaagctttggaaagaagagtacacaaaatctgccaagaagaaaaagagaagaggccagatctatatgcattggctatgggctactctgggcagttgaaaagtagaaagtcatacatgatacctgaaaatgagtttcatcacaaagacccccctccgaggaatgcagttgccagtgtgcaaaatgggcctggtggtgggccttcttcatcatcaataggaagtgcatctaaatcggatgaaagcagtactgaggagactgataaatcaagggagagatctcagtgtggtgtgaaagctgttaataaagcttctagtaccacacctaaagggaattcaagcaatggaaatagtggctctaacagcaacaaagctgttaaagaaaatgacaaagaaaaagggaaagagaaagaaaaagagaaaaaagaaaagactccagctactactccagaggccagggtacttggtaaagatggtaaagaaaaaccaaaggaagagcggccaaataaagatgaaaaagcaagagagaccaaggaaagaacgccgaagtctgacaaagagaaagaaaaattcaagaaggaagaaaaagctaaagatgagaaatttaagaccactgtccccaacgcagaatcaaaatcaactcaagaaagggaaagagagaaggagccatccagagaaagagatatagcaaaggaaatgaaatcaaaggaaaatgttaaaggaggagaaaaaacaccagtttctgggtccttgaaatcacctgttcccagatcagatattccagagcctgaaagggaacaaaaacgccgcaaaattgatactcacccttctccatcacattcctccacagtaaaggacagtctcatcgaactcaaggaatcttcagcaaagctctacattaatcatactcctccaccactgtccaagagtaaggagagagaaatggacaagaaagatttggacaagtcaagggaaagatccagagaaagagagaaaaaagatgaaaaggacaggaaagagcggaaaagggatcactcaaacaacgaccgtgaagtgccaccggacttaaccaagagacgtaaagaggagaatggaacaatgggggtttcaaaacataaaagtgaaagtccttgtgaatctccttatccaaatgagaaagacaaggaaaaaaataagtcaaaatcttcaggcaaagaaaaaggcagtgattcatttaaatctgagaagatggataaaatctcctccggtggcaaaaaggagtccaggcatgataaagaaaagatagaaaagaaagagaaacgggacagttcaggaggaaaggaagagaagaaacatcataagtcctcggacaagcacagataatgaagactttccatcaaggtgagatcggactggaactgttcggctgcgaccagaaatttattttcctgagtaaattgccgagaattaagaatgaagagggccatttgcatctccttaaattattcagttacctgctttattgctccatgtggaaaacttaaaattgttaagttgtgcattactgtattttaacttgttgcttagtttctacatgtttattttcagtaatggctgaaagtgttaactgttccatacttttagcacaatgtgctgcataaggttacctgtgtacagagttttactttagattaactaaatattgcctgggttcagtttttatttccattctgaaatgcttcctttttattgtttgaaactgaaaataaacaattgttgaacccttttgattttacctcattttaaaactgttttaatttattatttggcttgttcttaatattagtcactaaaagcagtgggagcattgtcttatgaaatgcttaggaatcattttatatagtacatgtacaacattaaacgtgtttaaaaaagaaaaaggtaccagcgatcacttgtcccttgccattttttcttgtaattatgttagacaaatcttggcggcggggggatcaaaacataattgttttaattctacagctgtaggagctttgtattgctgaactttcatctggaaaagtttcacagtgacatttttaaaagagaatttttttatctgccgaattctaccagtgtaaccttttttctaaataaacaatagttttctcaaatggttgt

SEQ ID NO: 37174 - DNA, 4930 bp, Artificial Sequence
  derived and/or modified sequence
acacatccgggcttctgctactagtgagaggaagatggcggccgcggctgtggtggttcccgcagagtggataaagaactgggagaaatcagggagaggcgaatttttgcatttatgtcggatcctcagtgaaaataaaagccatgatagttcaacatacagagatttccagcaagctctctatgagttgtcatatcatgtaattaaaggaaatctaaagcatgaacaggcatctaatgttcttagtgacattagtgaatttcgtgaggatatgccctccattcttgctgatgtattctgcatattagacattgagacaaattgtttagaagaaaaaagcaagagagactattttacacagttggtattagcatgtttgtatttagtttcagacacagttctaaaggaacgcctggatccagaaacactggaatcattagggcttatcaaacaatcacagcaattcaatcaaaagtcagttaaaatcaagacaaaactcttttataagcagcaaaaattcaatttgttaagagaagagaatgaaggttatgccaagctgattgctgaattggggcaagatttatctggaagtattactagtgatttaatcttagaaaatatcaaatctttaataggatgctttaatctggatcccaatagagttttggatgtcattttagaagtgtttgaatgcaggccagaacacgatgacttctttatatctttgttagaatcttacatgagtatgtgtgaaccgcaaacactgtgtcatattcttgggttcaaattcaagttttaccaggaaccaaatggcgagacaccatcatctttatacagagttgcagcagtacttctacaatttaatcttattgatttagatgatctttatgtacatcttcttccggctgataattgcattatggatgaacacaaacgagaaattgcggaagctaagcaaattgttagaaagcttacgatggttgtgttgtcttctgaaaaaatggatgagcgagagaaagaaaaggaaaaagaagaggagaaagtagagaaaccacctgataaccaaaaacttggcttgttggaagccttattaaagattggtgattggcaacatgcacagaacattatggatcagatgcctccatactatgcagcttcacacaagctaatagcccttgctatttgcaagctcattcatataactattgagcctctctaccgaagagttggagttcctaaaggtgctaaaggctcacctgttaatgctttgcaaaacaagagagcaccaaaacaagctgagagctttgaagatttgaggagagacgtgttcaatatgttctgttaccttggtcctcacctttctcacgatcccattttatttgcaaaagtggtgcgcataggcaagtcatttatgaaggagtttcagtctgatggaagcaaacaagaagataaagaaaaaacggaagttatccttagctgtttgcttagcattactgaccaggtactacttccatctctttctttgatggactgcaatgcttgtatgtctgaggaactatggggaatgtttaaaacatttccatatcagcatagatatcgtctgtatggccagtggaagaatgaaacttataacagtcacccacttttagtaaaagttaaagctcaaacaatagacagagccaaatatatcatgaagcgcctaaccaaggaaaatgtgaagccttctggaagacaaattgggaagttgagccacagcaatccaaccattttgtttgattatatcttgtcacaaatacagaagtatgataacttaataacacctgtagtagattcattgaaatacctcacttcactgaattatgatgtcttggcctattgtatcattgaagctttagctaatccagaaaaggaaagaatgaaacatgatgacacaaccatctcaagctggcttcagagtctggctagtttctgtggtgcagtttttcgtaaatatccaattgatcttgctggtcttcttcagtatgttgccaatcagctaaaggcgggcaaaagttttgacctgcttatattgaaagaagtggtacaaaaaatggcaggaatagaaattacagaggaaatgacaatggagcaactagaggctatgactggtggagagcagctaaaagctgagggtggttattttggtcagatcagaaacactaaaaaatcctctcagagattaaaggatgctctattggaccatgatcttgcccttcctctctgtctgcttatggctcagcagagaaatggggtaatctttcaggaaggtggagagaaacatttgaaacttgtgggaaagctctatgaccagtgtcatgataccctggtgcagtttggtgggtttttagcatctaatctgagcacagaagattatataaagcgagtgccttcaattgatgtactctgtaatgaatttcatacaccccatgatgcagcatttttcctgtctaggccaatgtatgcccatcatatttcgtcaaagtatgatgaacttaaaaaatcagaaaagggaagtaaacagcaacataaagttcataagtacattacatcatgtgagatggtgatggcgcctgtccatgaagcagtggtctccttacatgtttccaaagtctgggatgacatcagccctcaattctatgctacattctggtcattgacaatgtatgaccttgcagttccacacaccagctatgaacgagaagtcaataaacttaaagtccagatgaaagcaattgatgacaatcaggaaatgcccccaaataaaaagaaaaaagagaaggagcgctgtactgcccttcaggacaagcttcttgaagaagaaaagaaacagatggaacatgtacagagagttctacagagattgaaactggaaaaggacaactggcttttagcaaaatctaccaaaaatgagaccatcacaaaatttctacagctgtgtatatttcctcgatgtattttttcagcaattgatgctgtttactgtgctcgttttgttgaattggtacatcaacagaaaactccaaatttttccacacttctttgctatgatcgagttttctctgacataatttacacagttgcaagctgtactgaaaatgaagccagtcgatacggaaggtttctttgctgcatgttagagactgtgaccaggtggcatagtgatagagccacatatgaaaaggaatgtggaaactatccaggattccttaccatattacgggcaactggatttgatggtggaaataaggctgatcaattagactatgaaaattttcgacatgttgtacataaatggcattacaaactaaccaaggcatcggtacattgccttgaaacaggcgaatatactcacatcaggaatatcttgattgtgctaacaaaaatacttccttggtacccaaaagttttgaatctgggtcaagctttggaaagaagagtacacaaaatctgccaagaagaaaaagagaagaggccagatctatatgcattggctatgggctactctgggcagttgaaaagtagaaagtcatacatgatacctgaaaatgagtttcatcacaaagacccccctccgaggaatgcagttgccagtgtgcaaaatgggcctggtggtgggccttcttcatcatcaataggaagtgcatctaaatcggatgaaagcagtactgaggagactgataaatcaagggagagatctcagtgtggtgtgaaagctgttaataaagcttctagtaccacacctaaagggaattcaagcaatggaaatagtggctctaacagcaacaaagctgttaaagaaaatgacaaagaaaaagggaaagagaaagaaaaagagaaaaaagaaaagactccagctactactccagaggccagggtacttggtaaagatggtaaagaaaaaccaaaggaagagcggccaaataaagatgaaaaagcaagagagaccaaggaaagaacgccgaagtctgacaaagagaaagaaaaattcaagaaggaagaaaaagctaaagatgagaaatttaagaccactgtccccaacgcagaatcaaaatcaactcaagaaagggaaagagagaaggagccatccagagaaagagatatagcaaaggaaatgaaatcaaaggaaaatgttaaaggaggagaaaaaacaccagtttctgggtccttgaaatcacctgttcccagatcagatattccagagcctgaaagggaacaaaaacgccgcaaaattgatactcacccttctccatcacattcctccacagtaaaggacagtctcatcgaactcaaggaatcttcagcaaagctctacattaatcatactcctccaccactgtccaagagtaaggagagagaaatggacaagaaagatttggacaagtcaagggaaagatccagagaaagagagaaaaaagatgaaaaggacaggaaagagcggaaaagggatcactcaaacaacgaccgtgaagtgccaccggacttaaccaagagacgtaaagaggagaatggaacaatgggggtttcaaaacataaaagtgaaagtccttgtgaatctccttatccaaatgagaaagacaaggaaaaaaataagtcaaaatcttcaggcaaagaaaaaggcagtgattcatttaaatctgagaagatggataaaatctcctccggtggcaaaaaggagtccaggcatgataaagaaaagatagaaaagaaagagaaacgggacagttcaggaggaaaggaagagaagaaacatcataagtcctcggacaagcacagataatgaagactttccatcaaggtaatgcacttaatgctttatgtgagatttaaaaagtattttacccatcttaaataaattgtgtttccatcatagtggatacagtgttcagaccct

SEQ ID NO: 37175 - DNA, 1365 bp, Artificial Sequence
  derived and/or modified sequence
gggaacaaaaacgccgcaaaattgatactcacccttctccatcacattcctccacagtaaaggacagtctcatcgaactcaaggaatcttcagcaaagctctacattaatcatactcctccaccactgtccaagagtaaggagagagaaatggacaagaaagatttggacaagtcaagggaaagatccagagaaagagagaaaaaagatgaaaaggacaggaaagagcggaaaagggatcactcaaacaacgaccgtgaagtgccaccggacttaaccaagagacgtaaagaggagaatggaacaatgggggtttcaaaacataaaagtgaaagtccttgtgaatctccttatccaaatgagaaagacaaggaaaaaaataagtcaaaatcttcaggcaaagaaaaaggcagtgattcatttaaatctgagaagatggataaaatctcctccggtggcaaaaaggagtccaggcatgataaagaaaagatagaaaagaaagagaaacgggacagttcaggaggaaaggaagagaagaaacatcataagtcctcggacaagcacagataatgaagactttccatcaaggtgagatcggactggaactgttcggctgcgaccagaaatttattttcctgagtaaattgccgagaattaagaatgaagagggccatttgcatctccttaaattattcagttacctgctttattgctccatgtggaaaacttaaaattgttaagttgtgcattactgtattttaacttgttgcttagtttctacatgtttattttcagtaatggctgaaagtgttaactgttccatacttttagcacaatgtgctgcataaggttacctgtgtacagagttttactttagattaactaaatattgcctgggttcagtttttatttccattctgaaatgcttcctttttattgtttgaaactgaaaataaacaattgttgaacccttttgattttacctcattttaaaactgttttaatttattatttggcttgttcttaatattagtcactaaaagcagtgggagcattgtcttatgaaatgcttaggaatcattttatatagtacatgtacaacattaaacgtgtttaaaaaagaaaaaggtaccagcgatcacttgtcccttgccattttttcttgtaattatgttagacaaatcttggcggcggggggatcaaaacataattgttttaattctacagctgtaggagctttgtattgctgaactttcatctggaaaagtttcacagtgacatttttaaaagagaatttttttatctgccgaattctaccagtgtaaccttttttctaaataaacaatagttttctcaaatggttgta

SEQ ID NO: 37176 - protein, 108 aa, Artificial Sequence
  derived and/or modified sequence
MRQRLLPSVTSLLLVALLFPGSSQARHVNHSATEALGELRERAPGQGTNGFQLLRHAVKRDLLPPRTPPYQGDVPLGIRNTICRMQQGICRLFFCHSGTGQQHRQRCG

SEQ ID NO: 37177 - DNA, 327 bp, Artificial Sequence
  derived and/or modified sequence
atgagacaaaggctactgccttctgtgacctctctcctcctggtggccctgctgtttcccggaagttctcaggcccgtcacgttaatcatagtgcaaccgaagccctgggagaattacgggagagggctcctggacaggggaccaacggcttccagctgctcaggcatgccgtgaaacgagatttactaccgccacgtacccccccttaccagggtgacgtccccctcggcatccggaacacaatttgcagaatgcagcaaggtatctgccgcctctttttctgccattctggcaccggccaacagcatcgccagcggtgcggttag

SEQ ID NO: 37178 - DNA, 327 bp, Artificial Sequence
  derived and/or modified sequence
atgcgccagcggctgctcccatccgtgacttccctgttgctggtggcactcctgtttcccggctcaagccaggctcgccatgtgaaccactccgccactgaagccttaggtgaactgcgtgagagggcccccggacaaggaacgaatggattccagctcttaagacatgccgttaaaagagatcttctgccaccccgtaccccgccctatcagggtgatgtgcccttgggtatccgaaatactatttgcagaatgcaacagggtatctgtagattatttttttgtcatagcggcactggacagcagcacaggcagagatgtggctag

SEQ ID NO: 37179 - DNA, 327 bp, Artificial Sequence
  derived and/or modified sequence
atgagacagcgacttctgccctcagtgacctctctgctcctcgtggctctgctgttccccggaagcagtcaggcacgtcatgtgaaccacagtgctacagaagccttaggagaactgcgtgagcgcgcacccggccaaggcactaacgggtttcagcttctcagacacgccgtaaaaagagacctcttgcctccccgaacacccccctatcaaggagatgtgcccttgggcattcggaacacaatttgtcggatgcagcagggtatttgtaggcttttcttttgccacagtggcacaggccagcaacatagacagcgatgcggatag

SEQ ID NO: 37180 - DNA, 327 bp, Artificial Sequence
  derived and/or modified sequence
atgagacagagactgctgcccagcgtgaccagcctgctgctggtggccctgctgttccccggcagcagccaggccagacacgtgaaccacagcgccaccgaggccctgggcgagctgagagagagagcccccggccagggcaccaacggcttccagctgctgagacacgccgtgaagagagacctgctgccccccagaacccccccctaccagggcgacgtgcccctgggcatcagaaacaccatctgcagaatgcagcagggcatctgcagactgttcttctgccacagcggcaccggccagcagcacagacagagatgcggctag

SEQ ID NO: 37181 - DNA, 612 bp, Artificial Sequence
  derived and/or modified sequence
ggcttgcagtgctcttggcagacatgaggcaacgattgctcccgtccgtcaccagccttctccttgtggccctgctgtttccaggatcgtctcaagccagacatgtgaaccactcagccactgaggctctcggagaactcagggaaagagcccctgggcaaggcacaaacgggtttcagctgctacgccacgcagtgaaacgggacctcttaccaccgcgcaccccaccttaccaaggggatgttccactgggaattagaaataccatctgccgtatgcagcaagggatctgcagactttttttctgccattctgggacaggccagcagcacagacaacgctgtggataaggagagtagagacttcctcttcctgcctcctgtcttctggagttgtgaccgcagggtggcccaggtggatcggcttcagaggccaggaggcagctctctgcagccgaagagcaggagcctcacccacggtctgtggctctgactaagcctggactgcctctcggctgtgctccgtggactggctccccagggatccatgtgagagaccggagtatgatcctcagtgcgaggacaaataaaagtagtgattatgtccacccca

SEQ ID NO: 37182 - DNA, 327 bp, Artificial Sequence
  derived and/or modified sequence
atgcggcaaagattacttccatcagtgacaagcctactgctcgtggctctgcttttccccggcagtagccaggccagacatgtaaatcactctgccaccgaagcgctcggcgagttgagggaacgagcacctggacagggtacaaacggctttcagctgctgcggcatgctgtaaagcgagatctcctgcccccaagaacccctccttaccagggtgacgtgcctcttggaatcaggaacacgatctgcagaatgcaacagggtatctgccgcctgttcttttgccattctggcaccggacaacagcatcgccaacgatgcgggtag

SEQ ID NO: 37183 - DNA, 327 bp, Artificial Sequence
  derived and/or modified sequence
atgaggcagaggctgctgcccagcgtgaccagcctgctgctggtggccctgctcttccctggcagcagccaggcccggcacgtgaaccacagcgccacagaggccctgggggagctgcgggagcgggcccctggccagggcaccaacggcttccagctgctgcggcatgctgtgaagagggacctgctgccccccaggaccccaccctaccagggagatgtgcccctgggcatccggaacaccatctgcaggatgcagcagggcatctgccgcctcttcttctgccacagcggcaccggccagcagcaccggcagagatgtggctag

SEQ ID NO: 37184 - DNA, 327 bp, Artificial Sequence
  derived and/or modified sequence
atgcggcagcggctgctgcccagcgtgaccagcctgctgctggtggctctgttgttccccggcagcagtcaggcccgccatgtcaaccattctgctaccgaagcgctgggggaactgagagagcgcgccccgggtcaaggcaccaacggtttccagctgctacgacacgccgtgaaacgtgacttgttacctccaagaactccaccctatcaaggcgacgtgcccctggggattcgcaacacgatctgcagaatgcagcagggaatctgcagactctttttctgccattcaggaacggggcaacagcaccgccagcgatgtgggtag

SEQ ID NO: 37185 - RNA, 327 nt, Artificial Sequence
  derived and/or modified sequence
augcgccagcggcugcucccauccgugacuucccuguugcugguggcacuccuguuucccggcucaagccaggcucgccaugugaaccacuccgccacugaagccuuaggugaacugcgugagagggcccccggacaaggaacgaauggauuccagcucuuaagacaugccguuaaaagagaucuucugccaccccguaccccgcccuaucagggugaugugcccuuggguauccgaaauacuauuugcagaaugcaacaggguaucuguagauuauuuuuuugucauagcggcacuggacagcagcacaggcagagauguggcuag

SEQ ID NO: 37186 - RNA, 327 nt, Artificial Sequence
  derived and/or modified sequence
augagacagcgacuucugcccucagugaccucucugcuccucguggcucugcuguuccccggaagcagucaggcacgucaugugaaccacagugcuacagaagccuuaggagaacugcgugagcgcgcacccggccaaggcacuaacggguuucagcuucucagacacgccguaaaaagagaccucuugccuccccgaacaccccccuaucaaggagaugugcccuugggcauucggaacacaauuugucggaugcagcaggguauuuguaggcuuuucuuuugccacaguggcacaggccagcaacauagacagcgaugcggauag

SEQ ID NO: 37187 - protein, 244 aa, Artificial Sequence
  derived and/or modified sequence
MQEIIASVDHIKFDLEIAVEQQLGAQPLPFPGMDKSGAAVCEFFLKAACGKGGMCPFRHISGEKTVVCKHWLRGLCKKGDQCEFLHEYDMTKMPECYFYSKFGECSNKECPFLHIDPESKIKDCPWYDRGFCKHGPLCRHRHTRRVICVNYLVGFCPEGPSCKFMHPRFELPMGTTEQPPLPQQTQPPAKQRTPQVIGVMQSQNSSAGNRGPRPLEQVTCYKCGEKGHYANRCTKGHLAFLSGQ

SEQ ID NO: 37188 - DNA, 735 bp, Artificial Sequence
  derived and/or modified sequence
atgcaagaaatcatcgcatctgtcgatcacattaagttcgatcttgagatcgctgtggagcaacagctgggcgcgcagcccctaccttttccaggtatggataagtcaggggccgctgtgtgcgagtttttccttaaagctgcttgcggcaagggaggaatgtgtccatttcgccacattagcggggaaaaaacagtggtttgtaagcattggctccgcggtctgtgtaaaaagggcgaccagtgtgagtttctccatgaatacgatatgacaaaaatgcccgagtgctatttctactccaaattcggagagtgttctaataaagaatgtcccttcctgcacatcgatcctgagtctaaaataaaggattgtccctggtacgatcgaggtttttgcaagcatggcccactgtgccggcacaggcacacgcgcagagtgatttgtgtgaactacttggtcggattctgccccgaaggcccatcctgtaaattcatgcacccccggttcgaacttcctatgggtacaaccgagcaaccgcctttaccccaacaaacgcaaccaccagcaaaacaacgtaccccccaggtgatcggcgtaatgcagagccagaactcaagcgccggcaacaggggcccacgacccctggagcaagtgacatgctacaaatgcggagagaaaggacattacgctaatagatgcacaaaaggccacctggcattcttaagtggccagtag

SEQ ID NO: 37189 - DNA, 735 bp, Artificial Sequence
  derived and/or modified sequence
atgcaggagatcatcgcctctgtggaccacatcaagtttgacctggagattgctgtggagcagcagctgggcgcccagcccctgcccttccctggcatggacaagagcggggctgctgtgtgtgagttcttcctgaaggccgcctgtgggaaaggaggcatgtgccccttccgccacatctctggagagaagacagtggtgtgcaagcactggctgcggggcctgtgcaagaagggggaccagtgtgagttcctgcacgagtatgacatgaccaagatgcctgagtgctacttctacagcaagtttggagagtgcagcaacaaggaatgtcccttcctgcacattgatcctgagagcaagatcaaggactgcccctggtatgaccggggcttctgcaagcacggccccctgtgccgccaccgccacacccggcgggtcatctgtgtgaactacctggtgggcttctgcccagagggccccagctgcaagttcatgcaccccaggtttgagctgcccatgggcaccacagagcagccccccctgccccagcagacccagcccccagccaagcagaggaccccccaggtgattggagtgatgcagagccagaacagcagcgctggcaacagaggcccccggcccctggagcaggtgacctgctacaagtgtggggagaagggccactacgccaaccgctgcaccaagggccacctggccttcctgagcggccagtag

SEQ ID NO: 37190 - DNA, 735 bp, Artificial Sequence
  derived and/or modified sequence
atgcaggagatcatcgccagcgtggaccacatcaagttcgacctggagattgctgtcgaacaacagttaggcgctcagccactgccattcccgggtatggataagtccggggccgctgtctgtgaattttttctcaaggccgcctgtgggaagggcgggatgtgccctttcaggcacatcagtggcgaaaagaccgtggtctgcaaacattggttgcggggcctgtgcaagaaaggcgatcaatgtgaattcctgcatgaatacgacatgacaaagatgcccgagtgctacttttatagtaaattcggggaatgctctaacaaagagtgcccctttctccacatcgaccccgaatccaaaataaaggactgcccgtggtatgaccgagggttctgcaagcatggacccctgtgccggcatcgccacactcgcagagtgatatgtgtcaactacctggtcggcttctgccctgaggggcccagctgtaagtttatgcaccctcgctttgagcttccaatgggcacaactgagcaaccccctttaccccagcagacgcaacctcccgcaaaacaacgaacaccacaggttatcggagtgatgcaatcccagaactcgtctgcgggtaatcggggtccccgccccctggaacaggtgacttgctataagtgtggggagaagggccattacgcaaaccgctgcaccaaggggcacttggcttttctgtcgggacagtag

SEQ ID NO: 37191 - DNA, 735 bp, Artificial Sequence
  derived and/or modified sequence
atgcaggagatcatagcctctgtggatcacattaagtttgatcttgagatagccgtggagcagcagttgggggcacagccactgccgtttccaggcatggataagtcaggcgcagcggtgtgtgagttcttcctaaaggccgcatgtggcaagggcggaatgtgcccctttcgtcatatcagcggagagaaaaccgtcgtctgtaagcattggctgagaggtttgtgtaagaagggcgaccagtgcgagttcctgcacgaatacgacatgaccaagatgccagagtgttacttctattccaaattcggcgagtgttccaacaaggaatgtccgtttctgcatatcgacccagagagcaaaatcaaagactgcccttggtatgatcgaggtttctgcaaacacggacccctgtgccgacataggcacactagaagagtgatatgcgtgaactaccttgtaggattttgcccagagggtccttcctgtaaatttatgcacccaaggttcgagctgccaatgggtacaacggaacaaccacctctgcctcagcagacccagccccctgcaaagcagaggaccccccaagtgatcggggtgatgcagtcacagaacagcagcgctggaaaccggggtccaagacccctagagcaggtcacttgctacaaatgcggcgagaagggacactacgcgaatcgctgcacaaaaggacatctggcctttctgtcagggcagtag

SEQ ID NO: 37192 - DNA, 1738 bp, Artificial Sequence
  derived and/or modified sequence
gcgcgggctccgggcgctcccggcatccctcgggcggcggcggcggcggcggcgaggcgaagcgaaggaggagtgtgtgcggcggggccggcggcgggtaaaggcgagaaggctgcaggagaccgagggggagccgggccggtggggccgccgccgccgccatgcaggaaatcatcgccagcgtggaccacatcaagtttgacttggagatcgcggtggagcagcagctgggggcgcagccgctgcccttccccggcatggacaagtcgggcgctgctgtctgtgaattctttttgaaagctgcctgcggcaaagggggcatgtgtccgtttcgccacatcagtggtgagaagacagttgtgtgcaaacactggctgcgtggcctatgcaagaaaggggaccagtgtgagttcctgcatgagtatgacatgaccaagatgcccgagtgctacttctactccaagttcggggagtgcagcaacaaggaatgtcccttcctgcacatcgaccccgagtccaagatcaaggactgtccttggtatgaccgtggcttctgcaagcacggtcccctctgcaggcaccggcacacacggagagtcatctgtgtgaattacctcgtgggattctgcccggaggggccctcgtgtaaattcatgcaccctcgatttgaactgcccatgggaaccaccgagcagcccccactgccgcagcagacacagcctccagcaaagcagagaaccccgcaggtcatcggggtcatgcagagtcaaaacagcagcgcgggcaaccggggaccccggccactggagcaggtcacctgttacaagtgtggcgagaaaggacactacgccaacagatgcaccaaagggcacttggcctttctcagtggacagtgacagcagctggagccagctccgagcagcccgggggccccgctgttgggagtgtgcatttaactgtttcatgcgcttgttggcgcgactgtggctcgagctggcccgcagacacgtgggtttcatcactctgaggggccacgtctgttagtttcctatcattttgccttagtattttttgaaaaagggacatgtgtcctgtgggtccctgcagtcgacatcatgtttggctgggcatcgatgcctcctttctgggactcccggcacaactcccctcatccagggagggaggcagctgctggggaggggcttggctaggtagttctgtgtggcggtggtcattcccctcattaaacaccagttcttggtgacgccaggggctggtaggtcattcaaagctgtggccagctcacgcctgcttcctccctccctgccctgctgaatcctaaagctgtgcctatatctgtgatttgaatgagggagccctttggggcaaattcaggtgcccccattgcctcaggctggccctggtcccaggtggcagcggttgaggaggggtacagggctctcaagcctgaggttttcttctctgggcttaattttctcttggggtacgtgcctgacagtgtttaaggtgtccgttgaactggagttgcagacttttaaatagatgaccccttcagatcatctgtgcctacctcctgcccatcaggcgtctacactgtcactcagacacctgtggcatgtggaggagactgccctgtcctgagcctggaaaatgtgaaactgtctcctgcaacctgctgggcatgtgggcctggctgtgttcaattgcaagaacaatt

SEQ ID NO: 37193 - DNA, 735 bp, Artificial Sequence
  derived and/or modified sequence
atgcaggagatcatcgccagcgtggaccacatcaagttcgacctggagatcgccgtggagcagcagctgggcgcccagcccctgcccttccccggcatggacaagagcggcgccgccgtgtgcgagttcttcctgaaggccgcctgcggcaagggcggcatgtgccccttcagacacatcagcggcgagaagaccgtggtgtgcaagcactggctgagaggcctgtgcaagaagggcgaccagtgcgagttcctgcacgagtacgacatgaccaagatgcccgagtgctacttctacagcaagttcggcgagtgcagcaacaaggagtgccccttcctgcacatcgaccccgagagcaagatcaaggactgcccctggtacgacagaggcttctgcaagcacggccccctgtgcagacacagacacaccagaagagtgatctgcgtgaactacctggtgggcttctgccccgagggccccagctgcaagttcatgcaccccagattcgagctgcccatgggcaccaccgagcagccccccctgccccagcagacccagccccccgccaagcagagaaccccccaggtgatcggcgtgatgcagagccagaacagcagcgccggcaacagaggccccagacccctggagcaggtgacctgctacaagtgcggcgagaagggccactacgccaacagatgcaccaagggccacctggccttcctgagcggccagtag

SEQ ID NO: 37194 - protein, 621 aa, Artificial Sequence
  derived and/or modified sequence
MSAEVRLRRLQQLVLDPGFLGLEPLLDLLLGVHQELGASELAQDKYVADFLQWAEPIVVRLKEVRLQRDDFEILKVIGRGAFSEVAVVKMKQTGQVYAMKIMNKWDMLKRGEVSCFREERDVLVNGDRRWITQLHFAFQDENYLYLVMEYYVGGDLLTLLSKFGERIPAEMARFYLAEIVMAIDSVHRLGYVHRDIKPDNILLDRCGHIRLADFGSCLKLRADGTVRSLVAVGTPDYLSPEILQAVGGGPGTGSYGPECDWWALGVFAYEMFYGQTPFYADSTAETYGKIVHYKEHLSLPLVDEGVPEEARDFIQRLLCPPETRLGRGGAGDFRTHPFFFGLDWDGLRDSVPPFTPDFEGATDTCNFDLVEDGLTAMETLSDIREGAPLGVHLPFVGYSYSCMALRDSEVPGPTPMELEAEQLLEPHVQAPSLEPSVSPQDETAEVAVPAAVPAAEAEAEVTLRELQEALEEEVLTRQSLSREMEAIRTDNQNFASQLREAEARNRDLEAHVRQLQERMELLQAEGATAVTGVPSPRATDPPSHLDGPPWLWASARWWGQMHRRHLLLPARVPRPGLSEALSLLLFAVVLSRAAALGCIGLVAHAGQLTAVWRRPGAARAP

SEQ ID NO: 37195 - protein, 624 aa, Artificial Sequence
  derived and/or modified sequence
MSAEVRLRRLQQLVLDPGFLGLEPLLDLLLGVHQELGASELAQDKYVADFLQWAEPIVVRLKEVRLQRDDFEILKVIGRGAFSEVAVVKMKQTGQVYAMKIMNKWDMLKRGEVSCFREERDVLVNGDRRWITQLHFAFQDENYLYLVMEYYVGGDLLTLLSKFGERIPAEMARFYLAEIVMAIDSVHRLGYVHRDIKPDNILLDRCGHIRLADFGSCLKLRADGTVRSLVAVGTPDYLSPEILQAVGGGPGTGSYGPECDWWALGVFAYEMFYGQTPFYADSTAETYGKIVHYKEHLSLPLVDEGVPEEARDFIQRLLCPPETRLGRGGAGDFRTHPFFFGLDWDGLRDSVPPFTPDFEGATDTCNFDLVEDGLTAMETLSDIREGAPLGVHLPFVGYSYSCMALRDSEVPGPTPMELEAEQLLEPHVQAPSLEPSVSPQDETAEVAVPAAVPAAEAEAEVTLRELQEALEEEVLTRQSLSREMEAIRTDNQNFASQLREAEARNRDLEAHVRQLQERMELLQAEGATAVTGVPSPRATDPPSHLDGPPAVAVGQCPLVGPGPMHRRHLLLPARVPRPGLSEALSLLLFAVVLSRAAALGCIGLVAHAGQLTAVWRRPGAARAP

SEQ ID NO: 37196 - DNA, 1866 bp, Artificial Sequence
  derived and/or modified sequence
atgagcgcggaggttcgtctccgccggctccagcagctcgtgctcgaccctggatttctcggcctggagccactccttgacttactgttaggcgtccaccaggaactcggtgcatccgagctagcgcaggacaaatatgttgccgactttcttcagtgggccgaacccattgtggttcggttgaaagaggtaagacttcagagggatgatttcgagattctgaaggtaattggacgcggcgctttcagtgaggttgccgtggtgaagatgaagcaaaccggccaggtctatgccatgaagatcatgaataaatgggatatgttaaagaggggcgaggtgtcatgtttcagggaggaacgtgatgttctcgtgaatggcgatcgtcggtggatcacacagctgcacttcgcatttcaggacgagaattacctgtatctggtgatggaatattatgtgggaggtgacctgctcacactcctcagcaagttcggggagcggatccccgcagaaatggctcgattctatctagcagagattgtgatggctattgactctgtgcaccgcttgggctacgtgcaccgcgatattaagccggacaatatactgctggaccgctgtggacacattcgcctggctgattttggctcttgtttgaagctgagagctgatggcacagtaaggagcctggtggctgtggggacccccgactatctatctcccgaaatcctgcaggccgtgggaggcggaccaggaacaggatcttacggacctgagtgcgactggtgggcacttggggtattcgcatacgagatgttttacggtcagacacctttttatgcggatagcactgccgagacctacggaaagattgtccactacaaagagcatctgagtcttcccctggtcgacgaaggggtccccgaggaggcgagagatttcattcagcggctcctgtgccccccagagacacgattgggccgggggggggctggggattttcgcactcacccattctttttcggacttgattgggacggacttcgggacagcgtcccacctttcactccagatttcgaaggcgccactgatacctgtaattttgacctcgttgaggatgggctcaccgctatggaaacattgtctgacatccgggaaggggcccccctgggtgtccacctcccttttgtggggtactcatacagctgtatggctctgagggacagtgaggtgccaggccccacccccatggaactggaagccgagcaactcctcgagccccacgttcaggccccttcacttgaaccgagcgtgtccccgcaggacgagacggcggaagtggcagtgcccgccgcggtccccgcggcggaagcggaggccgaagtcacgctgagagaacttcaagaagctcttgaggaggaagtgctcacaaggcagagcttgtctagggaaatggaggctataaggaccgataatcagaacttcgctagccagctcagagaagcggaggctcgaaacagggacctagaggcccacgtgaggcagctgcaggagcgcatggaactgctgcaagctgagggggcaacagctgtgactggtgtgcccagcccacgcgccacagatccaccttcccacctggacggccctccttggttatgggccagcgctcggtggtggggccagatgcaccggcgtcacctgttgctgcccgccagagtgccgagacctgggctatcggaggcgctttctctgctgctcttcgctgtcgttttatcccgcgccgctgccctggggtgtataggactggtcgcccatgcgggtcagctgacagccgtgtggagaagaccaggcgcagcacgagccccctag

SEQ ID NO: 37197 - DNA, 1875 bp, Artificial Sequence
  derived and/or modified sequence
atgtcagctgaagtccgtctgcgcagactgcagcagttggtgttggatccaggctttctggggttagaaccactgctggacctgctgcttggcgttcaccaggagttgggagcttccgagctcgctcaggataagtatgtcgcagatttcttgcagtgggcggagcccattgtggtgcgactaaaggaggttcgccttcagcgagacgacttcgagattctgaaagtcattggcaggggagccttctctgaagtcgccgttgtcaaaatgaagcagactgggcaggtttacgccatgaaaatcatgaacaaatgggacatgttgaagagaggcgaagtgagttgctttagagaggagcgagacgtgctcgtgaatggggaccgccggtggattactcagcttcatttcgctttccaagacgagaactacctttacctcgtaatggagtactacgtcggcggcgacttgttgacacttctctctaaatttggagagcggattcccgcagaaatggcgaggttctatctcgcagagatcgttatggctatcgattctgtgcatcggctaggttatgtccatagagacattaagccggacaatatacttctagaccggtgtggccatattagacttgctgattttggcagttgtcttaaacttagagctgatggaaccgttagatccctcgtcgctgtgggaacccccgattacctgtcacccgaaatcttgcaggcagtgggaggagggcctggaaccggctcttatggacctgaatgtgactggtgggccttgggggtattcgcttacgagatgttttatggccagacccctttctacgccgactccaccgccgaaacatatggtaagatcgtccactataaagagcaccttagtctgcctctggtggatgagggcgtgcccgaggaggcaagagacttcatacagcgtctgttgtgccctcccgagacaaggttgggtcggggcggagccggagatttccgaacccatccatttttctttggtctcgattgggacgggctgcgggatagcgtgccgcctttcaccccagattttgagggcgctaccgatacctgcaatttcgaccttgtcgaggatggactgactgctatggaaacactctcggatattagagaaggggccccactgggtgtccacttgccgttcgtaggctattcttacagttgtatggccctgcgcgatagtgaagtacccggcccaacacctatggaattagaggcggaacaactcttggagcctcatgtacaggcccccagcttagagccgagcgtcagcccacaggacgaaactgccgaggtcgctgttcctgccgcggtgcctgccgccgaggctgaagcggaggtgaccctgagggaactccaggaggccctagaggaagaagttctgacccgacaatctctctcccgcgaaatggaagctatacggaccgacaatcagaacttcgcttcacaacttcgggaagccgaggcacgcaatcgagacctggaagcgcatgtgcggcagttgcaggagagaatggaactgctgcaggccgagggtgccacagccgtcactggcgtgccgtctccccgggccaccgacccgccatctcatctcgacggtcccccagcggttgcggtaggacagtgtccgttagtcgggcccggtcccatgcaccgccgccatctgctattacccgcacgggtccccagaccagggctgtctgaggcgctcagtctgctgctgtttgcggtggtcctatcccgtgcagctgccctggggtgtattggtctggtggcccacgccgggcaactcaccgccgtctggagaagaccaggcgctgcgcgtgccccctag

SEQ ID NO: 37198 - DNA, 1866 bp, Artificial Sequence
  derived and/or modified sequence
atgtctgctgaggtgcggctgcggcggctgcagcagctggtgctggaccccggcttcctgggcctggagcccctgctggacctgctgctgggcgtgcaccaggagctgggcgccagcgagctggcccaggacaagtatgtggccgacttcctgcagtgggccgagcccatcgtggtgcggctgaaggaggtgcggctgcagagagatgactttgagatcctgaaggtgattggccgcggggccttcagcgaggtggccgtggtgaagatgaagcagacaggccaggtgtatgccatgaagatcatgaacaagtgggacatgctgaagagaggagaggtgtcctgcttccgggaggagagagatgtgctggtgaatggagaccggcgctggatcacccagctgcactttgccttccaggatgagaactacctgtacctggtgatggagtactacgtgggcggggacctgctgaccctgctgagcaagtttggagagcgcatcccagctgagatggcccgcttctacctggccgagatcgtgatggccattgattctgtgcaccggctgggctacgtgcaccgggacatcaagccagacaacatcctgctggacagatgtggccacatccggctggccgactttggcagctgcctgaagctgcgggcagatggcaccgtgcgcagcctggtggccgtgggcaccccagactacctgagccctgagatcctgcaggccgtgggcggcggccctggcaccggcagctatggcccagaatgtgactggtgggccctgggcgtgtttgcctatgagatgttttatggccagacccccttctacgccgacagcacagctgagacctacggcaagatcgtgcactacaaggagcacctgagcctgcccctggtggatgaaggagtgcctgaggaggcccgggacttcatccagaggctgctgtgccccccagagacccggctgggccggggcggggccggggacttccgcacccaccccttcttcttcggcctggactgggatggcctgcgggacagcgtgccccccttcaccccagactttgagggcgccacagacacctgcaactttgacctggtggaggatggcctgacagccatggagaccctgagtgacatccgggagggcgcccccctgggcgtgcacctgccctttgtgggctacagctacagctgcatggccctgcgggacagcgaggtgcccggccccacccccatggagctggaggccgagcagctgctggagccccacgtgcaggcccccagcctggagcccagcgtgagcccccaggatgaaacagctgaggtggccgtgcctgctgctgtgcctgctgctgaggccgaggccgaggtgaccctgcgggagctgcaggaggccctggaggaggaggtgctgacccggcagagcctgagccgggagatggaggccatcagaacagacaaccagaactttgccagccagctgcgggaggccgaggccaggaacagagacctggaggcccacgtgcggcagctgcaggagaggatggagctgctgcaggccgagggcgccacagctgtgactggagtgcccagcccccgggccacagatcctcccagccacctggatggccccccctggctgtgggccagcgcccgctggtggggccagatgcacagaagacacctgctgctgcctgcccgggtgcccaggcctggcctgtctgaggccctgagcctgctgctgtttgctgtggtgctgagcagagctgctgccctgggctgcatcggcctggtggcccatgctggccagctgacagctgtgtggaggaggcctggagctgcccgggccccctag

SEQ ID NO: 37199 - DNA, 1875 bp, Artificial Sequence
  derived and/or modified sequence
atgtctgctgaggtgcggctgcggcggctgcagcagctggtgctggaccccggcttcctgggcctggagcccctgctggacctgctgctgggcgtgcaccaggagctgggcgccagcgagctggcccaggacaagtatgtggccgacttcctgcagtgggccgagcccatcgtggtgcggctgaaggaggtgcggctgcagagagatgactttgagatcctgaaggtgattggccgcggggccttcagcgaggtggccgtggtgaagatgaagcagacaggccaggtgtatgccatgaagatcatgaacaagtgggacatgctgaagagaggagaggtgtcctgcttccgggaggagagagatgtgctggtgaatggagaccggcgctggatcacccagctgcactttgccttccaggatgagaactacctgtacctggtgatggagtactacgtgggcggggacctgctgaccctgctgagcaagtttggagagcgcatcccagctgagatggcccgcttctacctggccgagatcgtgatggccattgattctgtgcaccggctgggctacgtgcaccgggacatcaagccagacaacatcctgctggacagatgtggccacatccggctggccgactttggcagctgcctgaagctgcgggcagatggcaccgtgcgcagcctggtggccgtgggcaccccagactacctgagccctgagatcctgcaggccgtgggcggcggccctggcaccggcagctatggcccagaatgtgactggtgggccctgggcgtgtttgcctatgagatgttttatggccagacccccttctacgccgacagcacagctgagacctacggcaagatcgtgcactacaaggagcacctgagcctgcccctggtggatgaaggagtgcctgaggaggcccgggacttcatccagaggctgctgtgccccccagagacccggctgggccggggcggggccggggacttccgcacccaccccttcttcttcggcctggactgggatggcctgcgggacagcgtgccccccttcaccccagactttgagggcgccacagacacctgcaactttgacctggtggaggatggcctgacagccatggagaccctgagtgacatccgggagggcgcccccctgggcgtgcacctgccctttgtgggctacagctacagctgcatggccctgcgggacagcgaggtgcccggccccacccccatggagctggaggccgagcagctgctggagccccacgtgcaggcccccagcctggagcccagcgtgagcccccaggatgaaacagctgaggtggccgtgcctgctgctgtgcctgctgctgaggccgaggccgaggtgaccctgcgggagctgcaggaggccctggaggaggaggtgctgacccggcagagcctgagccgggagatggaggccatcagaacagacaaccagaactttgccagccagctgcgggaggccgaggccaggaacagagacctggaggcccacgtgcggcagctgcaggagaggatggagctgctgcaggccgagggcgccacagctgtgactggagtgcccagcccccgggccacagatcctcccagccacctggatggccccccagctgtggccgtgggccagtgccccctggtgggccctggccccatgcaccggcggcacctgctgctgcctgcccgggtgccccggcccggcctgtctgaggccctgagcctgctgctgtttgctgtggtgctgagcagagctgctgccctgggctgcatcggcctggtggcccacgccggccagctgacagctgtgtggaggaggcctggggccgcccgggccccctag

SEQ ID NO: 37200 - DNA, 1866 bp, Artificial Sequence
  derived and/or modified sequence
atgagcgccgaggtgcggctgcggcggctgcagcagctggtgctggacccaggctttctgggactggagccgctcctggatttgcttctcggcgtacatcaggaactaggtgcttctgaattggcccaggataagtatgtggcagacttcctccagtgggccgagccgatagtagtgcgcctgaaagaggttcgcctgcagcgggatgacttcgaaattctcaaggtgataggtcgtggggcattttccgaggtggcagtagttaaaatgaagcagactggacaggtgtatgccatgaaaattatgaataagtgggatatgctgaagcgtggcgaagtgtcttgtttccgcgaggagcgcgatgtgcttgtgaatggggaccgacggtggattactcagctgcactttgctttccaggatgagaattatctgtatctcgtgatggagtactacgtggggggggatcttctgaccctgcttagtaaatttggggaacgtatacccgccgagatggctagattctatctagcagaaatagtaatggcaatagactctgtccatcgcctcggctatgtgcaccgagacattaagccggacaatattctgttggacaggtgtgggcatattcgcttggcagactttggcagttgcctcaaactgagagcagacggtacagtgaggtcattagttgccgtcggaacccctgattatctttctcccgagatcctgcaggcagttggcggtggtccgggaacagggtcctatggccctgagtgcgactggtgggctttgggcgtattcgcatatgaaatgttctacgggcagaccccattctatgctgacagtactgccgaaacatatggcaaaatagtgcattacaaagagcatctttccctgccattggtagacgagggcgtgcccgaagaggcccgagacttcatccagcggctgttgtgcccccccgaaaccaggctcggtagagggggggctggagatttcagaactcatccgttcttcttcggcctggactgggacgggctgcgcgactctgtgccaccattcaccccagattttgaaggcgctactgatacgtgtaacttcgatcttgtggaagatgggctaacagccatggagacattatcggacatcagggaaggcgctcctttgggtgtgcacctgccttttgttgggtattcctacagctgtatggccctgcgcgactctgaggtccccgggcccacccccatggagctagaggccgaacaattgctggagccgcacgtccaggccccaagtctggaaccgtccgtttctccacaagatgagacagccgaggtagccgtgcctgccgccgtgccagctgctgaggcggaggctgaagtcactctccgtgaattgcaagaggcgttggaggaggaagttttgaccaggcagtcactgagtcgcgagatggaggccattaggacggacaaccaaaacttcgcctctcagctgagagaagccgaagctcggaatcgagatctggaggcccacgtgagacagttacaggaaagaatggagctgctccaggctgagggggcaactgcagtgacaggcgtgccctcccctcgcgctacggacccccccagccatttggatggacccccgtggctgtgggccagtgcacggtggtggggtcaaatgcacagaagacatctgctgctccctgcccgggtgcccagacctggtctgtccgaagccttgtcactgctcctatttgccgtggttctaagtagagcagccgctctgggctgtattgggctcgtggcccatgcaggacagctcacagctgtgtggaggagacctggagccgcgagggccccctag

SEQ ID NO: 37201 - DNA, 1875 bp, Artificial Sequence
  derived and/or modified sequence
atgagcgccgaggtgcggctgcggcggctgcagcagctggtgctggatcccggcttcctcggcttagaacccctgctcgatcttcttctgggcgtacaccaggagcttggagcgagtgagttggcccaggataagtacgttgccgactttttacaatgggccgagccaatcgtggttcgcttaaaggaagtcaggctccagcgggacgactttgaaattttgaaggtcattggcagaggtgctttctccgaagtggcggtggtgaagatgaaacagaccgggcaagtgtatgccatgaagatcatgaataaatgggatatgctgaaaagaggagaggtatcttgcttccgagaggagagagacgtgcttgtgaacggggacaggcggtggatcacccaactccattttgcattccaagatgagaattacctctacctggtgatggagtactatgtcggcggcgacttgcttacactgttgagcaagtttggtgagcgaatccccgccgaaatggcaagattctatctggccgagattgttatggcgatcgatagcgtgcacaggctaggttacgtgcatagggatatcaaacctgataacatcttgcttgatcggtgcggccacatcagactggcggatttcggctcttgcctcaagctgagggccgacggtaccgttcgctctctcgtggccgtcggcacccctgattacctgtcccctgagattcttcaggcagtgggcggaggccctgggactggatcttatgggccagagtgcgactggtgggcattgggcgtctttgcttatgaaatgttctatggccagacccctttctatgcagacagtaccgcagagacctacggcaagattgtgcactataaggagcatctctccttgcctcttgttgacgagggcgtaccagaggaagcccgggactttattcagcgcctgctgtgcccacctgagacaagactgggtcgtggtggagccggcgattttcgaacacatccattcttcttcgggcttgactgggacgggcttcgggactcggtccctccgttcacccctgattttgaaggggcaaccgatacctgcaactttgacctggtagaggacggtttgactgctatggagacactatcagacattagagaaggcgccccactgggggttcatttacccttcgtgggttattcttacagctgcatggctctgcgtgatagtgaagtccctggccctactcccatggagctcgaggcggaacagctgttggagcctcatgtgcaggcacctagcctcgaaccatcagtctcgccgcaggatgagaccgcagaagtggctgttccagccgcagtgcctgctgccgaggcggaggccgaggtaactctgcgggagttacaagaggcgcttgaagaggaggtcttgactagacagtccctgtcacgtgagatggaagcgatccggactgacaatcagaactttgcctctcaattgagagaggccgaggctcgcaatcgcgatctggaagcgcacgttagacagctgcaagagcgcatggagctgttacaggccgagggtgcaacggccgtcacgggtgtgccgagccctagggctaccgatccgccatctcacttggacggccctccagctgtggccgtcggtcagtgcccactcgtcggaccgggtcccatgcacaggagacacctgttactccccgcccgtgtgcccaggccaggattatcagaggctctatcccttctattatttgccgtcgtgctctcccgcgccgccgccttaggctgcataggactcgtggcacacgccggccagttgacagctgtttggcgccgacctggcgcagcccgcgccccgtag

SEQ ID NO: 37202 - DNA, 1866 bp, Artificial Sequence
  derived and/or modified sequence
atgtcagcagaagttcgcttgagaagacttcagcagctcgttttagaccctgggtttctgggccttgagcccctactggatttgctgctgggcgtacatcaggagcttggggcaagcgagctcgcgcaggataaatatgtggccgactttttacagtgggccgaacctatagtcgtgcgcctcaaagaggtcaggctccagcgcgatgatttcgagattttaaaggtcatcggacgaggcgctttctccgaggtagccgttgtcaagatgaagcagacggggcaggtgtatgccatgaaaatcatgaacaagtgggatatgctgaagcggggtgaggtgtcttgtttccgtgaggagagggatgtgctggtaaacggcgatcggaggtggatcacacagctgcactttgcattccaagatgaaaactacctgtacctggttatggaatactatgtgggaggggatctgctgaccctgctctccaaatttggggaacggatcccagctgagatggctagattttatctcgctgaaatcgtaatggccatcgacagcgtgcataggttaggctacgtgcatcgtgatattaaacctgacaatattctgctagacaggtgcggtcatattagactcgcagattttggctcatgccttaaactccgtgcagatggtactgtgcgcagtttagtagccgtggggacccccgactatctgtctcctgagattttacaggcagtcggaggaggacccggtactggctcctatggcccagagtgtgattggtgggcacttggagtctttgcctacgaaatgttctacggccagactccattctatgccgacagtaccgctgagacatacggcaaaatcgttcattacaaagagcatctctccctgccgctagtcgatgagggggtcccagaagaagccagagattttattcagcgcctgctgtgtccaccagagacaagattaggaagaggaggggcaggggacttcaggactcatccattcttcttcggtcttgattgggacggactcagggacagtgttcctccctttacacccgattttgagggggctaccgacacgtgcaatttcgacctggttgaggacggtctcaccgcgatggaaaccctaagcgatattagggagggcgcacctctgggggtgcaccttcctttcgtgggttactcatatagttgcatggctcttagagactccgaggttcccggtcctacccctatggaactcgaggctgaacagctattggaaccccatgtgcaggctccttctctcgagccatctgtaagcccccaggatgaaactgcggaagtggcagtccccgcagctgtgccagcggctgaggcagaagcggaagtgactctcagagaactccaggaagccctggaggaggaagtgttgacacggcagtccctgtctcgcgaaatggaggcaatcaggacggacaatcagaactttgcctctcagctgagagaggccgaagctaggaatagggacctagaggcccacgtgcggcagttgcaagagagaatggagctcctccaggccgagggcgcaactgccgtgaccggagtgcccagtcctcgtgcaaccgaccccccttcccatctggatggtcctccctggctttgggcttcggctaggtggtgggggcagatgcacaggcggcatctgcttctgccagcacgggtccccaggccaggactatcggaagccctctccctcctgttatttgccgtggttctgagccgcgctgccgctctgggctgcattggcctggtggctcatgcaggccagctgaccgctgtgtggagaaggcccggtgctgcacgggctccctag

SEQ ID NO: 37203 - DNA, 1875 bp, Artificial Sequence
  derived and/or modified sequence
atgtcagccgaagtgagactgcgcaggctccagcaactggttctcgacccgggtttcctggggttggagccgttgctcgatcttctgcttggcgtccaccaggagctgggggctagcgaactggcacaagataagtacgtcgccgacttcctgcagtgggctgaaccaatagttgtaagactaaaggaggttcggttacagagagatgatttcgagatcctgaaggtgattggccgaggggctttctcagaagttgcggtggtgaaaatgaaacagaccggacaagtgtacgctatgaaaattatgaataagtgggatatgctgaagcggggagaagtcagttgttttagagaagaacgtgacgttctcgtgaatggtgaccggaggtggatcactcaactgcatttcgctttccaggatgagaactacctgtaccttgtgatggagtactacgttggcggtgacctcctgactctactttccaaatttggcgaacggatacctgccgagatggccaggttttacctggcagagatcgtgatggctatagactcagtacacagacttgggtatgtgcatcgagatattaaaccagacaatatcctgctcgatcgctgcgggcatatcagactcgcagattttggttcatgcctcaagctgcgggctgacggaacagtccggagccttgtagccgtgggcacccccgactacctgtctccagaaatccttcaagctgtcggaggcggtcctgggacagggtcctatgggccagaatgtgactggtgggcactcggggtctttgcatacgaaatgttttacgggcagacgcccttctatgcggatagtaccgcagagacgtacggaaaaatcgtgcactataaagaacacttgtctctgcctcttgtcgacgagggcgtgcctgaagaagcgcgagattttattcagcggcttctgtgcccaccagagacacgactgggacggggaggcgctggggatttccgaactcatccgtttttttttgggcttgactgggacggtctgcgcgactctgtgcccccatttacccccgactttgagggcgcaacagatacttgcaattttgacctggtagaggatgggctcaccgcgatggagacactgagcgacatccgcgaaggcgctccactgggcgttcatctaccatttgtgggctattcttattcctgcatggcccttagagactcagaggtgcccggacccacaccaatggaacttgaagccgaacagctcctcgagccacatgtgcaagctccgagcctggaaccgtcagtcagcccccaggatgagacggccgaagtggcagtacccgcagctgtgcctgccgcagaggccgaggcagaagtgaccctccgcgaattgcaggaggcattggaggaggaggtcctcacgcgccagagtctatcaagggagatggaggccatacggacagacaaccaaaattttgcttctcagctgcgtgaagccgaggcaaggaaccgggatctggaggcccacgtgagacagctgcaggaacgaatggagctgctccaggctgagggagcaactgccgtcaccggggtccccagtccgagggctaccgaccctcccagtcacctcgacggaccacctgccgttgccgttggacagtgtccattggtagggccaggcccaatgcatagacggcacctgcttttgcccgcacgtgtgccccgtccaggattatcagaagcactcagtctgctgttattcgccgtggtgctatccagagctgctgctttgggctgtattggccttgtagcacatgctggtcagctgacagcggtctggcgaagacccggagccgctcgcgctccctag

SEQ ID NO: 37204 - DNA, 1872 bp, Artificial Sequence
  derived and/or modified sequence
atgagcgccgaggtgcgcctgcgccgcctgcagcagctggtgctggaccccggcttcctgggcctggagcccctgctggacctgctgctgggcgtgcaccaggagctgggcgccagcgagctggcccaggacaagtacgtggccgacttcctgcagtgggccgagcccatcgtggtgcgcctgaaggaggtgcgcctgcagcgcgacgacttcgagatcctgaaggtgatcggccgcggcgccttcagcgaggtggccgtggtgaagatgaagcagaccggccaggtgtacgccatgaagatcatgaacaagtgggacatgctgaagcgcggcgaggtgagctgcttccgcgaggagcgcgacgtgctggtgaacggcgaccgccgctggatcacccagctgcacttcgccttccaggacgagaactacctgtacctggtgatggagtactacgtgggcggcgacctgctgaccctgctgagcaagttcggcgagcgcatccccgccgagatggcccgcttctacctggccgagatcgtgatggccatcgacagcgtgcaccgcctgggctacgtgcaccgcgacatcaagcccgacaacatcctgctggaccgctgcggccacatccgcctggccgacttcggcagctgcctgaagctgcgcgccgacggcaccgtgcgcagcctggtggccgtgggcacccccgactacctgagccccgagatcctgcaggccgtgggcggcggccccggcaccggcagctacggccccgagtgcgactggtgggccctgggcgtgttcgcctacgagatgttctacggccagacccccttctacgccgacagcaccgccgagacctacggcaagatcgtgcactacaaggagcacctgagcctgcccctggtggacgagggcgtgcccgaggaggcccgcgacttcatccagcgcctgctgtgcccccccgagacccgcctgggccgcggcggcgccggcgacttccgcacccaccccttcttcttcggcctggactgggacggcctgcgcgacagcgtgccccccttcacccccgacttcgagggcgccaccgacacctgcaacttcgacctggtggaggacggcctgaccgccatggagaccctgagcgacatccgcgagggcgcccccctgggcgtgcacctgcccttcgtgggctacagctacagctgcatggccctgcgcgacagcgaggtgcccggccccacccccatggagctggaggccgagcagctgctggagccccacgtgcaggcccccagcctggagcccagcgtgagcccccaggacgagaccgccgaggtggccgtgcccgccgccgtgcccgccgccgaggccgaggccgaggtgaccctgcgcgagctgcaggaggccctggaggaggaggtgctgacccgccagagcctgagccgcgagatggaggccatccgcaccgacaaccagaacttcgccagccagctgcgcgaggccgaggcccgcaaccgcgacctggaggcccacgtgcgccagctgcaggagcgcatggagctgctgcaggccgagggcgccaccgccgtgaccggcgtgcccagcccccgcgccaccgacccccccagccacctggacggcccccccgccgtggccgtgggccagtgccccctggtgggccccggccccatgcaccgccgccacctgctgctgcccgcccgcgtgccccgccccggcctgagcgaggccctgagcctgctgctgttcgccgtggtgctgagccgcgccgccgccctgggctgcatcggcctggtggcccacgccggccagctgaccgccgtgtggcgccgccccggcgccgcccgcgccccc

SEQ ID NO: 37205 - DNA, 1866 bp, Artificial Sequence
  derived and/or modified sequence
atgagcgccgaggtgagactgagaagactgcagcagctggtgctggaccccggcttcctgggcctggagcccctgctggacctgctgctgggcgtgcaccaggagctgggcgccagcgagctggcccaggacaagtacgtggccgacttcctgcagtgggccgagcccatcgtggtgagactgaaggaggtgagactgcagagagacgacttcgagatcctgaaggtgatcggcagaggcgccttcagcgaggtggccgtggtgaagatgaagcagaccggccaggtgtacgccatgaagatcatgaacaagtgggacatgctgaagagaggcgaggtgagctgcttcagagaggagagagacgtgctggtgaacggcgacagaagatggatcacccagctgcacttcgccttccaggacgagaactacctgtacctggtgatggagtactacgtgggcggcgacctgctgaccctgctgagcaagttcggcgagagaatccccgccgagatggccagattctacctggccgagatcgtgatggccatcgacagcgtgcacagactgggctacgtgcacagagacatcaagcccgacaacatcctgctggacagatgcggccacatcagactggccgacttcggcagctgcctgaagctgagagccgacggcaccgtgagaagcctggtggccgtgggcacccccgactacctgagccccgagatcctgcaggccgtgggcggcggccccggcaccggcagctacggccccgagtgcgactggtgggccctgggcgtgttcgcctacgagatgttctacggccagacccccttctacgccgacagcaccgccgagacctacggcaagatcgtgcactacaaggagcacctgagcctgcccctggtggacgagggcgtgcccgaggaggccagagacttcatccagagactgctgtgcccccccgagaccagactgggcagaggcggcgccggcgacttcagaacccaccccttcttcttcggcctggactgggacggcctgagagacagcgtgccccccttcacccccgacttcgagggcgccaccgacacctgcaacttcgacctggtggaggacggcctgaccgccatggagaccctgagcgacatcagagagggcgcccccctgggcgtgcacctgcccttcgtgggctacagctacagctgcatggccctgagagacagcgaggtgcccggccccacccccatggagctggaggccgagcagctgctggagccccacgtgcaggcccccagcctggagcccagcgtgagcccccaggacgagaccgccgaggtggccgtgcccgccgccgtgcccgccgccgaggccgaggccgaggtgaccctgagagagctgcaggaggccctggaggaggaggtgctgaccagacagagcctgagcagagagatggaggccatcagaaccgacaaccagaacttcgccagccagctgagagaggccgaggccagaaacagagacctggaggcccacgtgagacagctgcaggagagaatggagctgctgcaggccgagggcgccaccgccgtgaccggcgtgcccagccccagagccaccgacccccccagccacctggacggccccccctggctgtgggccagcgccagatggtggggccagatgcacagaagacacctgctgctgcccgccagagtgcccagacccggcctgagcgaggccctgagcctgctgctgttcgccgtggtgctgagcagagccgccgccctgggctgcatcggcctggtggcccacgccggccagctgaccgccgtgtggagaagacccggcgccgccagagccccctag

SEQ ID NO: 37206 - DNA, 1875 bp, Artificial Sequence
  derived and/or modified sequence
atgagcgccgaggtgagactgagaagactgcagcagctggtgctggaccccggcttcctgggcctggagcccctgctggacctgctgctgggcgtgcaccaggagctgggcgccagcgagctggcccaggacaagtacgtggccgacttcctgcagtgggccgagcccatcgtggtgagactgaaggaggtgagactgcagagagacgacttcgagatcctgaaggtgatcggcagaggcgccttcagcgaggtggccgtggtgaagatgaagcagaccggccaggtgtacgccatgaagatcatgaacaagtgggacatgctgaagagaggcgaggtgagctgcttcagagaggagagagacgtgctggtgaacggcgacagaagatggatcacccagctgcacttcgccttccaggacgagaactacctgtacctggtgatggagtactacgtgggcggcgacctgctgaccctgctgagcaagttcggcgagagaatccccgccgagatggccagattctacctggccgagatcgtgatggccatcgacagcgtgcacagactgggctacgtgcacagagacatcaagcccgacaacatcctgctggacagatgcggccacatcagactggccgacttcggcagctgcctgaagctgagagccgacggcaccgtgagaagcctggtggccgtgggcacccccgactacctgagccccgagatcctgcaggccgtgggcggcggccccggcaccggcagctacggccccgagtgcgactggtgggccctgggcgtgttcgcctacgagatgttctacggccagacccccttctacgccgacagcaccgccgagacctacggcaagatcgtgcactacaaggagcacctgagcctgcccctggtggacgagggcgtgcccgaggaggccagagacttcatccagagactgctgtgcccccccgagaccagactgggcagaggcggcgccggcgacttcagaacccaccccttcttcttcggcctggactgggacggcctgagagacagcgtgccccccttcacccccgacttcgagggcgccaccgacacctgcaacttcgacctggtggaggacggcctgaccgccatggagaccctgagcgacatcagagagggcgcccccctgggcgtgcacctgcccttcgtgggctacagctacagctgcatggccctgagagacagcgaggtgcccggccccacccccatggagctggaggccgagcagctgctggagccccacgtgcaggcccccagcctggagcccagcgtgagcccccaggacgagaccgccgaggtggccgtgcccgccgccgtgcccgccgccgaggccgaggccgaggtgaccctgagagagctgcaggaggccctggaggaggaggtgctgaccagacagagcctgagcagagagatggaggccatcagaaccgacaaccagaacttcgccagccagctgagagaggccgaggccagaaacagagacctggaggcccacgtgagacagctgcaggagagaatggagctgctgcaggccgagggcgccaccgccgtgaccggcgtgcccagccccagagccaccgacccccccagccacctggacggcccccccgccgtggccgtgggccagtgccccctggtgggccccggccccatgcacagaagacacctgctgctgcccgccagagtgcccagacccggcctgagcgaggccctgagcctgctgctgttcgccgtggtgctgagcagagccgccgccctgggctgcatcggcctggtggcccacgccggccagctgaccgccgtgtggagaagacccggcgccgccagagccccctag

SEQ ID NO: 37207 - DNA, 2712 bp, Artificial Sequence
  derived and/or modified sequence
gggacagccagggacaggcagacatgcagccagggctccagggcctggacaggggctgccaggccctgtgacaggaggaccccgagcccccggcccggggaggggccatggtgctgcctgtccaacatgtcagccgaggtgcggctgaggcggctccagcagctggtgttggacccgggcttcctggggctggagcccctgctcgaccttctcctgggcgtccaccaggagctgggcgcctccgaactggcccaggacaagtacgtggccgacttcttgcagtgggcggagcccatcgtggtgaggcttaaggaggtccgactgcagagggacgacttcgagattctgaaggtgatcggacgcggggcgttcagcgaggtagcggtagtgaagatgaagcagacgggccaggtgtatgccatgaagatcatgaacaagtgggacatgctgaagaggggcgaggtgtcgtgcttccgtgaggagagggacgtgttggtgaatggggaccggcggtggatcacgcagctgcacttcgccttccaggatgagaactacctgtacctggtcatggagtattacgtgggcggggacctgctgacactgctgagcaagtttggggagcggattccggccgagatggcgcgcttctacctggcggagattgtcatggccatagactcggtgcaccggcttggctacgtgcacagggacatcaaacccgacaacatcctgctggaccgctgtggccacatccgcctggccgacttcggctcttgcctcaagctgcgggcagatggaacggtgcggtcgctggtggctgtgggcaccccagactacctgtcccccgagatcctgcaggctgtgggcggtgggcctgggacaggcagctacgggcccgagtgtgactggtgggcgctgggtgtattcgcctatgaaatgttctatgggcagacgcccttctacgcggattccacggcggagacctatggcaagatcgtccactacaaggagcacctctctctgccgctggtggacgaaggggtccctgaggaggctcgagacttcattcagcggttgctgtgtcccccggagacacggctgggccggggtggagcaggcgacttccggacacatcccttcttctttggcctcgactgggatggtctccgggacagcgtgcccccctttacaccggatttcgaaggtgccaccgacacatgcaacttcgacttggtggaggacgggctcactgccatggagacactgtcggacattcgggaaggtgcgccgctaggggtccacctgccttttgtgggctactcctactcctgcatggccctcagggacagtgaggtcccaggccccacacccatggaactggaggccgagcagctgcttgagccacacgtgcaagcgcccagcctggagccctcggtgtccccacaggatgaaacagctgaagtggcagttccagcggctgtccctgcggcagaggctgaggccgaggtgacgctgcgggagctccaggaagccctggaggaggaggtgctcacccggcagagcctgagccgggagatggaggccatccgcacggacaaccagaacttcgccagtcaactacgcgaggcagaggctcggaaccgggacctagaggcacacgtccggcagttgcaggagcggatggagttgctgcaggcagagggagccacagctgtcacgggggtccccagtccccgggccacggatccaccttcccatctagatggccccccgtggctgtgggccagtgcccgctggtggggccagatgcaccgccgccacctgctgctccctgccagggtccctaggcctggcctatcggaggcgctttccctgctcctgttcgccgttgttctgtctcgtgccgccgccctgggctgcattgggttggtggcccacgccggccaactcaccgcagtctggcgccgcccaggagccgcccgcgctccctgaaccctagaactgtcttcgactccggggccccgttggaagactgagtgcccggggcacggcacagaagccgcgcccaccgcctgccagttcacaaccgctccgagcgtgggtctccgcccagctccagtcctgtgatccgggcccgccccctagcggccggggagggaggggccgggtccgcggccggcgaacggggctcgaagggtccttgtagccgggaatgctgctgctgctggggggatcacagaccatttctttctttcggccaggctgaggccctgacgtggatgggcaaactgcaggcctgggaaggcagcaagccgggccgtccgtgttccatcctccacgcacccccacctatcgttggttcgcaaagtgcaaagctttcttgtgcatgacgccctgctctggggagcgtctggcgcgatctctgcctgcttactcgggaaatttgcttttgccaaacccgctttttcggggatcccgcgcccccctcctcacttgcgctgctctcggagccccagccggctccgcccgcttcggcggtttggatatttattgacctcgtcctccgactcgctgacaggctacaggacccccaacaaccccaatccacgttttggatgcactgagaccccgacattcctcggtatttattgtctgtccccacctaggacccccacccccgaccctcgcgaataaaaggccctccatctgccc

SEQ ID NO: 37208 - DNA, 2848 bp, Artificial Sequence
  derived and/or modified sequence
aggggggctggaccaaggggtggggagaaggggaggaggcctcggccggccgcagagagaagtggccagagaggcccaggggacagccagggacaggcagacatgcagccagggctccagggcctggacaggggctgccaggccctgtgacaggaggaccccgagcccccggcccggggaggggccatggtgctgcctgtccaacatgtcagccgaggtgcggctgaggcggctccagcagctggtgttggacccgggcttcctggggctggagcccctgctcgaccttctcctgggcgtccaccaggagctgggcgcctccgaactggcccaggacaagtacgtggccgacttcttgcagtgggcggagcccatcgtggtgaggcttaaggaggtccgactgcagagggacgacttcgagattctgaaggtgatcggacgcggggcgttcagcgaggtagcggtagtgaagatgaagcagacgggccaggtgtatgccatgaagatcatgaacaagtgggacatgctgaagaggggcgaggtgtcgtgcttccgtgaggagagggacgtgttggtgaatggggaccggcggtggatcacgcagctgcacttcgccttccaggatgagaactacctgtacctggtcatggagtattacgtgggcggggacctgctgacactgctgagcaagtttggggagcggattccggccgagatggcgcgcttctacctggcggagattgtcatggccatagactcggtgcaccggcttggctacgtgcacagggacatcaaacccgacaacatcctgctggaccgctgtggccacatccgcctggccgacttcggctcttgcctcaagctgcgggcagatggaacggtgcggtcgctggtggctgtgggcaccccagactacctgtcccccgagatcctgcaggctgtgggcggtgggcctgggacaggcagctacgggcccgagtgtgactggtgggcgctgggtgtattcgcctatgaaatgttctatgggcagacgcccttctacgcggattccacggcggagacctatggcaagatcgtccactacaaggagcacctctctctgccgctggtggacgaaggggtccctgaggaggctcgagacttcattcagcggttgctgtgtcccccggagacacggctgggccggggtggagcaggcgacttccggacacatcccttcttctttggcctcgactgggatggtctccgggacagcgtgcccccctttacaccggatttcgaaggtgccaccgacacatgcaacttcgacttggtggaggacgggctcactgccatggagacactgtcggacattcgggaaggtgcgccgctaggggtccacctgccttttgtgggctactcctactcctgcatggccctcagggacagtgaggtcccaggccccacacccatggaactggaggccgagcagctgcttgagccacacgtgcaagcgcccagcctggagccctcggtgtccccacaggatgaaacagctgaagtggcagttccagcggctgtccctgcggcagaggctgaggccgaggtgacgctgcgggagctccaggaagccctggaggaggaggtgctcacccggcagagcctgagccgggagatggaggccatccgcacggacaaccagaacttcgccagtcaactacgcgaggcagaggctcggaaccgggacctagaggcacacgtccggcagttgcaggagcggatggagttgctgcaggcagagggagccacagctgtcacgggggtccccagtccccgggccacggatccaccttcccatctagatggccccccggccgtggctgtgggccagtgcccgctggtggggccaggccccatgcaccgccgccacctgctgctccctgccagggtccctaggcctggcctatcggaggcgctttccctgctcctgttcgccgttgttctgtctcgtgccgccgccctgggctgcattgggttggtggcccacgccggccaactcaccgcagtctggcgccgcccaggagccgcccgcgctccctgaaccctagaactgtcttcgactccggggccccgttggaagactgagtgcccggggcacggcacagaagccgcgcccaccgcctgccagttcacaaccgctccgagcgtgggtctccgcccagctccagtcctgtgatccgggcccgccccctagcggccggggagggaggggccgggtccgcggccggcgaacggggctcgaagggtccttgtagccgggaatgctgctgctgctgctgctgctgctgctgctgctgctgctgctgctgctgctgctgctgctggggggatcacagaccatttctttctttcggccaggctgaggccctgacgtggatgggcaaactgcaggcctgggaaggcagcaagccgggccgtccgtgttccatcctccacgcacccccacctatcgttggttcgcaaagtgcaaagctttcttgtgcatgacgccctgctctggggagcgtctggcgcgatctctgcctgcttactcgggaaatttgcttttgccaaacccgctttttcggggatcccgcgcccccctcctcacttgcgctgctctcggagccccagccggctccgcccgcttcggcggtttggatatttattgacctcgtcctccgactcgctgacaggctacaggacccccaacaaccccaatccacgttttggatgcactgagaccccgacattcctcggtatttattgtctgtccccacctaggacccccacccccgaccctcgcgaataaaaggccctccatctgccc

SEQ ID NO: 37209 - protein, 625 aa, Artificial Sequence
  derived and/or modified sequence
MSAEVRLRRLQQLVLDPGFLGLEPLLDLLLGVHQELGASELAQDKYVADFLQWAEPIVVRLKEVRLQRDDFEILKVIGRGAFSEVAVVKMKQTGQVYAMKIMNKWDMLKRGEVSCFREERDVLVNGDRRWITQLHFAFQDENYLYLVMEYYVGGDLLTLLSKFGERIPAEMARFYLAEIVMAIDSVHRLGYVHRDIKPDNILLDRCGHIRLADFGSCLKLRADGTVRSLVAVGTPDYLSPEILQAVGGGPGTGSYGPECDWWALGVFAYEMFYGQTPFYADSTAETYGKIVHYKEHLSLPLVDEGVPEEARDFIQRLLCPPETRLGRGGAGDFRTHPFFFGLDWDGLRDSVPPFTPDFEGATDTCNFDLVEDGLTAMETLSDIREGAPLGVHLPFVGYSYSCMALRDSEVPGPTPMELEAEQLLEPHVQAPSLEPSVSPQDETAEVAVPAAVPAAEAEAEVTLRELQEALEEEVLTRQSLSREMEAIRTDNQNFASQLREAEARNRDLEAHVRQLQERMELLQAEGATAVTGVPSPRATDPPSHMAPRPWLWASARWWGQAPCTAATCCSLPGSLGLAYRRRFPCSCSPLFCLVPPPWAALGWWPTPANSPQSGAAQEPPALPEP

SEQ ID NO: 37210 - DNA, 1878 bp, Artificial Sequence
  derived and/or modified sequence
atgtccgccgaagtgagactccggaggcttcagcagttggtgctggacccgggtttcctgggtctcgaaccgctgttggatcttctgcttggcgttcaccaggagctgggggcctctgagctggctcaggataagtacgtcgcggactttctccagtgggcagaaccaatcgtggtgcgactcaaagaggtccgccttcaacgagacgatttcgagatactcaaggtgattggaagaggcgccttttccgaggtcgccgtcgtcaaaatgaagcaaaccggccaagtttacgcaatgaagattatgaataagtgggacatgctcaagcggggcgaagttagctgctttcgtgaagaacgtgacgtattggtgaacggagaccgcaggtggattacccagcttcacttcgcttttcaggatgagaattacctctacctagtcatggaatactatgttggcggagacttgctgaccctcctatccaaattcggggaacgaatccccgccgaaatggcaaggttttatctggctgaaatcgtaatggccattgactccgtgcacagattaggctacgtgcatagggacatcaagccagataatatccttctggataggtgtgggcatatccgcctggccgacttcggcagctgtctgaagctacgggccgatggaacagtccgcagtctcgtggctgtgggcacgcccgactacttgtctccggaaattttacaagctgttggcggtggacctgggaccggatcttacggacctgaatgcgactggtgggccctgggggtgtttgcatacgagatgttttatggtcagacccctttttacgccgatagcaccgccgagacttatggaaagatcgtccactataaagaacatctgagtctccccctagtggatgaaggtgtaccagaagaggcaagggacttcatccagagattactgtgccccccagagacaaggctggggcggggcggtgcaggagacttccgcacgcaccccttcttttttggcctggattgggacggactgagggattccgttcctccctttactccagacttcgagggagcgactgatacctgcaacttcgacctggtagaggacggcctgacggccatggagaccctttccgacatccgcgagggggcgccgcttggagtgcacctgccatttgtgggctattcttatagctgcatggctcttagggactctgaggtgccaggccccaccccaatggaacttgaggcggagcagttactagaaccccacgtgcaggcccctagcctggagccatctgtctctccccaggacgagacagccgaagtggccgtgcccgccgccgtccctgcagccgaggcagaggccgaggttactttaagagaattgcaggaggctcttgaggaagaggtgctgactaggcagagtctcagtcgggagatggaagctattcgaacagacaatcagaactttgcctcccagttacgggaggctgaagctagaaatcgcgaccttgaagctcacgtgcggcagctgcaagaaagaatggagctactacaagccgagggggccacggccgtgaccggggttccatctcctcgggctacagatcctccctcacacatggctcctcgaccatggctctgggccagtgccaggtggtggggccaggctccatgtactgcagcaacttgttgtagcctgcctggatctctaggcctggcttacagaagaagatttccttgctcctgcagcccactgttctgtttggtgccccccccctgggctgctctaggttggtggccaactcctgccaacagtccccagtcaggtgcggcacaggagccccccgcactgcctgagccgtag

SEQ ID NO: 37211 - DNA, 1878 bp, Artificial Sequence
  derived and/or modified sequence
atgtctgctgaggtgcggctgcggcggctgcagcagctggtgctggaccccggcttcctgggcctggagcccctgctggacctgctgctgggcgtgcaccaggagctgggcgccagcgagctggcccaggacaagtatgtggccgacttcctgcagtgggccgagcccatcgtggtgcggctgaaggaggtgcggctgcagagagatgactttgagatcctgaaggtgattggccgcggggccttcagcgaggtggccgtggtgaagatgaagcagacaggccaggtgtatgccatgaagatcatgaacaagtgggacatgctgaagagaggagaggtgtcctgcttccgggaggagagagatgtgctggtgaatggagaccggcgctggatcacccagctgcactttgccttccaggatgagaactacctgtacctggtgatggagtactacgtgggcggggacctgctgaccctgctgagcaagtttggagagcgcatcccagctgagatggcccgcttctacctggccgagatcgtgatggccattgattctgtgcaccggctgggctacgtgcaccgggacatcaagccagacaacatcctgctggacagatgtggccacatccggctggccgactttggcagctgcctgaagctgcgggcagatggcaccgtgcgcagcctggtggccgtgggcaccccagactacctgagccctgagatcctgcaggccgtgggcggcggccctggcaccggcagctatggcccagaatgtgactggtgggccctgggcgtgtttgcctatgagatgttttatggccagacccccttctacgccgacagcacagctgagacctacggcaagatcgtgcactacaaggagcacctgagcctgcccctggtggatgaaggagtgcctgaggaggcccgggacttcatccagaggctgctgtgccccccagagacccggctgggccggggcggggccggggacttccgcacccaccccttcttcttcggcctggactgggatggcctgcgggacagcgtgccccccttcaccccagactttgagggcgccacagacacctgcaactttgacctggtggaggatggcctgacagccatggagaccctgagtgacatccgggagggcgcccccctgggcgtgcacctgccctttgtgggctacagctacagctgcatggccctgcgggacagcgaggtgcccggccccacccccatggagctggaggccgagcagctgctggagccccacgtgcaggcccccagcctggagcccagcgtgagcccccaggatgaaacagctgaggtggccgtgcctgctgctgtgcctgctgctgaggccgaggccgaggtgaccctgcgggagctgcaggaggccctggaggaggaggtgctgacccggcagagcctgagccgggagatggaggccatcagaacagacaaccagaactttgccagccagctgcgggaggccgaggccaggaacagagacctggaggcccacgtgcggcagctgcaggagaggatggagctgctgcaggccgagggcgccacagctgtgactggagtgcccagcccccgggccacagatcctcccagccacatggccccccggccctggctgtgggccagcgcccgctggtggggccaggccccctgcacagctgccacctgctgcagcctgcccggcagcctgggcctggcctacagaagacgcttcccctgcagctgcagccccctcttctgcctggtgcccccaccctgggccgccctgggctggtggcccaccccagccaacagcccccagagcggggccgcccaggagcccccagccctgcctgagccctag

SEQ ID NO: 37212 - DNA, 1878 bp, Artificial Sequence
  derived and/or modified sequence
atgagcgccgaggtgcggctgcggcggctgcagcagctggtgctggaccccggatttcttggccttgaacccctactagatttgcttctaggcgttcatcaggaattgggcgcatccgaactggcacaggacaagtacgtagccgatttcctccagtgggcagagcccatcgtcgtccgcctgaaagaggtgcgcctgcagagagacgatttcgaaatcctgaaagtgattggcagaggtgccttttctgaagtggctgtggtcaagatgaagcagaccgggcaggtctatgccatgaaaatcatgaataagtgggatatgcttaagagaggagaagtctcgtgtttcagggaagagcgcgatgtgctggtcaacggcgacaggagatggatcacgcagctgcacttcgccttccaagacgagaattacttatacctcgtgatggaatattacgtcggcggggacctcctcacattattaagcaagtttggtgagcgcatcccagctgaaatggcacgattctatcttgctgaaatcgtcatggccatcgatagcgtccaccgccttggttacgtacaccgggacattaagcccgataatattttgttggaccggtgtggacacataaggcttgccgatttcggctcctgtttgaagctgcgtgcggacggcacagtgaggtcactcgtggctgtgggcactcccgactatctgtctcccgagattctgcaggccgttggcggaggacccgggaccggctcatacggaccggagtgcgactggtgggcccttggcgtgtttgcttatgagatgttctacggacaaacaccattttatgcagattccacagcagagacttacggcaagatcgtccactataaggaacacctcagtctgccgctggtggacgagggggtccctgaagaggcccgggatttcattcaaaggctgctttgtcctcctgagacccgactgggccgtggcggggccggagactttcggacacatccattcttttttgggctcgactgggatggactgcgtgactccgtgccaccatttacgcctgatttcgaaggtgccaccgacacctgcaattttgatttggtggaagatggccttaccgcaatggaaacgctgtcagacatcagggagggagcccccctgggagtgcatcttccctttgtgggctattcctacagctgtatggctctgcgtgactctgaggtcccagggcctacacctatggagcttgaggcagagcagcttttagagcctcacgttcaggctcccagcttagagccatccgtttcgcctcaagatgagaccgccgaagtggccgtgcccgccgcagtgcccgctgcagaggccgaggcagaggtgactctaagagaattacaggaagcactggaagaagaggtgttgactagacagtcactttccagggagatggaggcaatccgtactgataatcagaatttcgcctctcagctgagggaggccgaagcccgcaatagggatcttgaggcacacgtacggcagctgcaggagagaatggagctgctgcaggctgaaggggcaactgctgtgaccggcgtgccaagtccgcgtgctactgaccctccctcacacatggctccacgcccatggctctgggccagtgcacgttggtggggccaagcaccttgcactgctgccacctgctgctcgttgcccggctctctggggcttgcctataggaggaggttcccctgctcatgttcacccttgttttgtctcgtccctcctccctgggcggccctgggatggtggccgactcctgctaacagccctcagagcggtgccgctcaggaaccacctgcattgcccgaaccatag

SEQ ID NO: 37213 - DNA, 1878 bp, Artificial Sequence
  derived and/or modified sequence
atgtcagcagaagttaggctgcgcagactgcagcagctggtgctcgacccaggctttttgggtttagagcctctactggatctgctgctcggggtccaccaggagctgggggcatcagaactggcgcaagacaagtatgtcgccgatttccttcagtgggccgaacctattgtggtgcgtctgaaggaagtgagactgcagagggatgactttgaaattcttaaggtgatcggacggggagcattcagcgaggtggctgttgtcaagatgaagcagacaggacaggtttatgcgatgaaaattatgaataaatgggatatgttgaagcgaggggaggtctcctgttttagggaggagcgcgacgtcttagtcaatggtgatcggagatggatcacccagctgcactttgcgttccaggacgaaaactatctttatctagttatggagtattatgtgggcggagacctgttgactcttctgtcaaagtttggcgagagaatccccgcagagatggcgcgattctacctggccgaaatcgtcatggccatagattcagtccaccgcctgggatacgtccacagagacataaagcctgacaatattctgctggacaggtgtggccacattagactcgccgacttcggcagctgcttaaaattgcgagcagacggaactgtgaggtctctggtggcagtcggtactccagattatctgtcccctgagattctgcaggcagtcggcggtgggccagggacaggatcctacggcccagagtgtgattggtgggcactgggagttttcgcttacgagatgttctacggccagacccctttttacgccgatagtaccgctgaaacctatggcaagatcgtgcactacaaagagcacctttccctgccattggtggatgaaggagtcccagaagaagccagagattttatacagcggttgctgtgccctccggaaactcggctcggtcggggaggcgcaggtgactttaggactcacccattctttttcggcctggactgggacggcctgcgcgactccgtgccccctttcactcccgacttcgagggcgctactgacacctgcaattttgatctggtcgaagatggtttaaccgcaatggagaccctatctgatatacgggagggcgctcccctgggtgtgcatcttccttttgtcggctattcttactcatgcatggctctgagagattcagaagtgcctggcccaactcctatggagttggaagcagagcaactccttgagcctcatgtccaggccccttctttagagccaagtgtgtctcctcaggacgaaaccgcggaggttgcagtacctgccgcagtcccagctgccgaagcagaggctgaagtcacgctccgggaactgcaggaggctctagaggaagaggtgctgactcgccagtctctctctcgcgaaatggaggcgattcgcacggataatcagaatttcgcgtcacaattaagggaagccgaagccagaaaccgggacctggaagcacatgtccgtcagcttcaggaacggatggagctgctccaggcggagggagccacagcggtgactggagtgcccagtcctcgggcaactgaccccccatcccatatggcgccacgcccttggctgtgggctagtgccaggtggtggggacaagccccttgtactgcggctacttgttgtagcttgcccggtagcttggggctcgcttaccgtagaaggttcccctgctcttgctctccattgttttgtctcgtgccccctccctgggccgctctcgggtggtggccaacccctgccaacagtccccaaagcggagccgcacaggaaccacccgcattgccggagccctag

SEQ ID NO: 37214 - DNA, 1875 bp, Artificial Sequence
  derived and/or modified sequence
atgagcgccgaggtgcgcctgcgccgcctgcagcagctggtgctggaccccggcttcctgggcctggagcccctgctggacctgctgctgggcgtgcaccaggagctgggcgccagcgagctggcccaggacaagtacgtggccgacttcctgcagtgggccgagcccatcgtggtgcgcctgaaggaggtgcgcctgcagcgcgacgacttcgagatcctgaaggtgatcggccgcggcgccttcagcgaggtggccgtggtgaagatgaagcagaccggccaggtgtacgccatgaagatcatgaacaagtgggacatgctgaagcgcggcgaggtgagctgcttccgcgaggagcgcgacgtgctggtgaacggcgaccgccgctggatcacccagctgcacttcgccttccaggacgagaactacctgtacctggtgatggagtactacgtgggcggcgacctgctgaccctgctgagcaagttcggcgagcgcatccccgccgagatggcccgcttctacctggccgagatcgtgatggccatcgacagcgtgcaccgcctgggctacgtgcaccgcgacatcaagcccgacaacatcctgctggaccgctgcggccacatccgcctggccgacttcggcagctgcctgaagctgcgcgccgacggcaccgtgcgcagcctggtggccgtgggcacccccgactacctgagccccgagatcctgcaggccgtgggcggcggccccggcaccggcagctacggccccgagtgcgactggtgggccctgggcgtgttcgcctacgagatgttctacggccagacccccttctacgccgacagcaccgccgagacctacggcaagatcgtgcactacaaggagcacctgagcctgcccctggtggacgagggcgtgcccgaggaggcccgcgacttcatccagcgcctgctgtgcccccccgagacccgcctgggccgcggcggcgccggcgacttccgcacccaccccttcttcttcggcctggactgggacggcctgcgcgacagcgtgccccccttcacccccgacttcgagggcgccaccgacacctgcaacttcgacctggtggaggacggcctgaccgccatggagaccctgagcgacatccgcgagggcgcccccctgggcgtgcacctgcccttcgtgggctacagctacagctgcatggccctgcgcgacagcgaggtgcccggccccacccccatggagctggaggccgagcagctgctggagccccacgtgcaggcccccagcctggagcccagcgtgagcccccaggacgagaccgccgaggtggccgtgcccgccgccgtgcccgccgccgaggccgaggccgaggtgaccctgcgcgagctgcaggaggccctggaggaggaggtgctgacccgccagagcctgagccgcgagatggaggccatccgcaccgacaaccagaacttcgccagccagctgcgcgaggccgaggcccgcaaccgcgacctggaggcccacgtgcgccagctgcaggagcgcatggagctgctgcaggccgagggcgccaccgccgtgaccggcgtgcccagcccccgcgccaccgacccccccagccacatggccccccgcccctggctgtgggccagcgcccgctggtggggccaggccccctgcaccgccgccacctgctgcagcctgcccggcagcctgggcctggcctaccgccgccgcttcccctgcagctgcagccccctgttctgcctggtgccccccccctgggccgccctgggctggtggcccacccccgccaacagcccccagagcggcgccgcccaggagccccccgccctgcccgagccc

SEQ ID NO: 37215 - DNA, 1878 bp, Artificial Sequence
  derived and/or modified sequence
atgagcgccgaggtgagactgagaagactgcagcagctggtgctggaccccggcttcctgggcctggagcccctgctggacctgctgctgggcgtgcaccaggagctgggcgccagcgagctggcccaggacaagtacgtggccgacttcctgcagtgggccgagcccatcgtggtgagactgaaggaggtgagactgcagagagacgacttcgagatcctgaaggtgatcggcagaggcgccttcagcgaggtggccgtggtgaagatgaagcagaccggccaggtgtacgccatgaagatcatgaacaagtgggacatgctgaagagaggcgaggtgagctgcttcagagaggagagagacgtgctggtgaacggcgacagaagatggatcacccagctgcacttcgccttccaggacgagaactacctgtacctggtgatggagtactacgtgggcggcgacctgctgaccctgctgagcaagttcggcgagagaatccccgccgagatggccagattctacctggccgagatcgtgatggccatcgacagcgtgcacagactgggctacgtgcacagagacatcaagcccgacaacatcctgctggacagatgcggccacatcagactggccgacttcggcagctgcctgaagctgagagccgacggcaccgtgagaagcctggtggccgtgggcacccccgactacctgagccccgagatcctgcaggccgtgggcggcggccccggcaccggcagctacggccccgagtgcgactggtgggccctgggcgtgttcgcctacgagatgttctacggccagacccccttctacgccgacagcaccgccgagacctacggcaagatcgtgcactacaaggagcacctgagcctgcccctggtggacgagggcgtgcccgaggaggccagagacttcatccagagactgctgtgcccccccgagaccagactgggcagaggcggcgccggcgacttcagaacccaccccttcttcttcggcctggactgggacggcctgagagacagcgtgccccccttcacccccgacttcgagggcgccaccgacacctgcaacttcgacctggtggaggacggcctgaccgccatggagaccctgagcgacatcagagagggcgcccccctgggcgtgcacctgcccttcgtgggctacagctacagctgcatggccctgagagacagcgaggtgcccggccccacccccatggagctggaggccgagcagctgctggagccccacgtgcaggcccccagcctggagcccagcgtgagcccccaggacgagaccgccgaggtggccgtgcccgccgccgtgcccgccgccgaggccgaggccgaggtgaccctgagagagctgcaggaggccctggaggaggaggtgctgaccagacagagcctgagcagagagatggaggccatcagaaccgacaaccagaacttcgccagccagctgagagaggccgaggccagaaacagagacctggaggcccacgtgagacagctgcaggagagaatggagctgctgcaggccgagggcgccaccgccgtgaccggcgtgcccagccccagagccaccgacccccccagccacatggcccccagaccctggctgtgggccagcgccagatggtggggccaggccccctgcaccgccgccacctgctgcagcctgcccggcagcctgggcctggcctacagaagaagattcccctgcagctgcagccccctgttctgcctggtgccccccccctgggccgccctgggctggtggcccacccccgccaacagcccccagagcggcgccgcccaggagccccccgccctgcccgagccctag

SEQ ID NO: 37216 - DNA, 2844 bp, Artificial Sequence
  derived and/or modified sequence
aggggggctggaccaaggggtggggagaaggggaggaggcctcggccggccgcagagagaagtggccagagaggcccaggggacagccagggacaggcagacatgcagccagggctccagggcctggacaggggctgccaggccctgtgacaggaggaccccgagcccccggcccggggaggggccatggtgctgcctgtccaacatgtcagccgaggtgcggctgaggcggctccagcagctggtgttggacccgggcttcctggggctggagcccctgctcgaccttctcctgggcgtccaccaggagctgggcgcctccgaactggcccaggacaagtacgtggccgacttcttgcagtgggcggagcccatcgtggtgaggcttaaggaggtccgactgcagagggacgacttcgagattctgaaggtgatcggacgcggggcgttcagcgaggtagcggtagtgaagatgaagcagacgggccaggtgtatgccatgaagatcatgaacaagtgggacatgctgaagaggggcgaggtgtcgtgcttccgtgaggagagggacgtgttggtgaatggggaccggcggtggatcacgcagctgcacttcgccttccaggatgagaactacctgtacctggtcatggagtattacgtgggcggggacctgctgacactgctgagcaagtttggggagcggattccggccgagatggcgcgcttctacctggcggagattgtcatggccatagactcggtgcaccggcttggctacgtgcacagggacatcaaacccgacaacatcctgctggaccgctgtggccacatccgcctggccgacttcggctcttgcctcaagctgcgggcagatggaacggtgcggtcgctggtggctgtgggcaccccagactacctgtcccccgagatcctgcaggctgtgggcggtgggcctgggacaggcagctacgggcccgagtgtgactggtgggcgctgggtgtattcgcctatgaaatgttctatgggcagacgcccttctacgcggattccacggcggagacctatggcaagatcgtccactacaaggagcacctctctctgccgctggtggacgaaggggtccctgaggaggctcgagacttcattcagcggttgctgtgtcccccggagacacggctgggccggggtggagcaggcgacttccggacacatcccttcttctttggcctcgactgggatggtctccgggacagcgtgcccccctttacaccggatttcgaaggtgccaccgacacatgcaacttcgacttggtggaggacgggctcactgccatggagacactgtcggacattcgggaaggtgcgccgctaggggtccacctgccttttgtgggctactcctactcctgcatggccctcagggacagtgaggtcccaggccccacacccatggaactggaggccgagcagctgcttgagccacacgtgcaagcgcccagcctggagccctcggtgtccccacaggatgaaacagctgaagtggcagttccagcggctgtccctgcggcagaggctgaggccgaggtgacgctgcgggagctccaggaagccctggaggaggaggtgctcacccggcagagcctgagccgggagatggaggccatccgcacggacaaccagaacttcgccagtcaactacgcgaggcagaggctcggaaccgggacctagaggcacacgtccggcagttgcaggagcggatggagttgctgcaggcagagggagccacagctgtcacgggggtccccagtccccgggccacggatccaccttcccatatggccccccggccgtggctgtgggccagtgcccgctggtggggccaggccccatgcaccgccgccacctgctgctccctgccagggtccctaggcctggcctatcggaggcgctttccctgctcctgttcgccgttgttctgtctcgtgccgccgccctgggctgcattgggttggtggcccacgccggccaactcaccgcagtctggcgccgcccaggagccgcccgcgctccctgaaccctagaactgtcttcgactccggggccccgttggaagactgagtgcccggggcacggcacagaagccgcgcccaccgcctgccagttcacaaccgctccgagcgtgggtctccgcccagctccagtcctgtgatccgggcccgccccctagcggccggggagggaggggccgggtccgcggccggcgaacggggctcgaagggtccttgtagccgggaatgctgctgctgctgctgctgctgctgctgctgctgctgctgctgctgctgctgctgctgctggggggatcacagaccatttctttctttcggccaggctgaggccctgacgtggatgggcaaactgcaggcctgggaaggcagcaagccgggccgtccgtgttccatcctccacgcacccccacctatcgttggttcgcaaagtgcaaagctttcttgtgcatgacgccctgctctggggagcgtctggcgcgatctctgcctgcttactcgggaaatttgcttttgccaaacccgctttttcggggatcccgcgcccccctcctcacttgcgctgctctcggagccccagccggctccgcccgcttcggcggtttggatatttattgacctcgtcctccgactcgctgacaggctacaggacccccaacaaccccaatccacgttttggatgcactgagaccccgacattcctcggtatttattgtctgtccccacctaggacccccacccccgaccctcgcgaataaaaggccctccatctgccc

SEQ ID NO: 37217 - protein, 639 aa, Artificial Sequence
  derived and/or modified sequence
MGGHFWPPEPYTVFMWGSPWEADSPRVKLRGREKGRQTEGGAFPLVSSALSGDPRFFSPTTPPAEPIVVRLKEVRLQRDDFEILKVIGRGAFSEVAVVKMKQTGQVYAMKIMNKWDMLKRGEVSCFREERDVLVNGDRRWITQLHFAFQDENYLYLVMEYYVGGDLLTLLSKFGERIPAEMARFYLAEIVMAIDSVHRLGYVHRDIKPDNILLDRCGHIRLADFGSCLKLRADGTVRSLVAVGTPDYLSPEILQAVGGGPGTGSYGPECDWWALGVFAYEMFYGQTPFYADSTAETYGKIVHYKEHLSLPLVDEGVPEEARDFIQRLLCPPETRLGRGGAGDFRTHPFFFGLDWDGLRDSVPPFTPDFEGATDTCNFDLVEDGLTAMVSGGGETLSDIREGAPLGVHLPFVGYSYSCMALRDSEVPGPTPMELEAEQLLEPHVQAPSLEPSVSPQDETAEVAVPAAVPAAEAEAEVTLRELQEALEEEVLTRQSLSREMEAIRTDNQNFASQLREAEARNRDLEAHVRQLQERMELLQAEGATAVTGVPSPRATDPPSHLDGPPAVAVGQCPLVGPGPMHRRHLLLPARVPRPGLSEALSLLLFAVVLSRAAALGCIGLVAHAGQLTAVWRRPGAARAP

SEQ ID NO: 37218 - protein, 609 aa, Artificial Sequence
  derived and/or modified sequence
MGGHFWPPEPYTVFMWGSPWEADSPRVKLRGREKGRQTEGGAFPLVSSALSGDPRFFSPTTPPAEPIVVRLKEVRLQRDDFEILKVIGRGAFSEVAVVKMKQTGQVYAMKIMNKWDMLKRGEVSCFREERDVLVNGDRRWITQLHFAFQDENYLYLVMEYYVGGDLLTLLSKFGERIPAEMARFYLAEIVMAIDSVHRLGYVHRDIKPDNILLDRCGHIRLADFGSCLKLRADGTVRSLVAVGTPDYLSPEILQAVGGGPGTGSYGPECDWWALGVFAYEMFYGQTPFYADSTAETYGKIVHYKEHLSLPLVDEGVPEEARDFIQRLLCPPETRLGRGGAGDFRTHPFFFGLDWDGLRDSVPPFTPDFEGATDTCNFDLVEDGLTAMVSGGGETLSDIREGAPLGVHLPFVGYSYSCMALRDSEVPGPTPMELEAEQLLEPHVQAPSLEPSVSPQDETAEVAVPAAVPAAEAEAEVTLRELQEALEEEVLTRQSLSREMEAIRTDNQNFASQLREAEARNRDLEAHVRQLQERMELLQAEGATAVTGVPSPRATDPPSHVPRPGLSEALSLLLFAVVLSRAAALGCIGLVAHAGQLTAVWRRPGAARAP

SEQ ID NO: 37219 - DNA, 1920 bp, Artificial Sequence
  derived and/or modified sequence
atgggaggccacttttggccgcctgaaccttacaccgtgtttatgtggggctcaccctgggaggcggactcaccaagggtgaaacttcgaggtagggagaaaggccgccagactgagggcggggccttcccactggttagttcggcgctcagtggcgaccctagattcttcagtcccacaactccaccagccgagcctatcgtggtcagattgaaggaagtccggctgcaaagggacgacttcgaaattctcaaggtgatcggacggggggcattctccgaggttgcagttgtgaagatgaaacagaccggtcaggtttacgctatgaaaatcatgaacaaatgggacatgctcaaacggggtgaagtgagctgtttcagagaggaaagggacgtgttagtcaacggggatcggcgctggataacccagctgcacttcgccttccaggatgagaattatttgtacctggtcatggagtattatgtgggaggtgatctgctgactctcttaagcaagtttggagaacgcatccccgccgagatggcgaggttctatttagccgagattgtgatggcaatcgattccgtgcataggctggggtatgtacaccgcgacataaagccggacaacattctactcgaccggtgcgggcacatcagactcgccgacttcggtagctgtttgaaattacgagcggatggaaccgttcgcagcttggttgccgtggggactcccgactatctcagtcctgagatccttcaggccgtggggggagggcctggcactggcagctatggacccgaatgtgactggtgggcccttggcgttttcgcttatgagatgttctatggacagacgcccttttacgcagattccactgcagaaacctacgggaaaatagttcactataaagagcatctctcactccccctggtggacgaaggcgtcccagaggaagctcgagattttattcaaagattactatgtcctccagaaacccggcttggtcgggggggggccggagactttaggacacacccgtttttcttcggcttggattgggacggtcttcgcgacagcgtcccgcctttcacccctgacttcgagggcgctaccgacacatgtaactttgaccttgttgaggatggtctgactgccatggtgagcggaggaggtgagacactgagtgatattagagaaggggccccactcggcgtgcacttacccttcgtaggctattcttattcgtgcatggcactgagggactcggaggttcctggtcctacacccatggagctggaggccgaacagctgcttgagcctcacgttcaggcaccctccctcgagccatctgttagcccgcaggatgaaacagcggaggtggctgtgccagccgcagtgcccgccgccgaagcagaagcggaggtgactctgagagagttgcaagaggctctagaagaagaagtgttgacccggcagagtttgagtcgagaaatggaggccatcaggaccgataaccagaattttgcctctcaactgagggaggctgaggctcgcaaccgagacctggaggcccacgtgcgtcagctccaggagagaatggagcttctgcaggcagaaggggctacagccgtgaccggcgtcccctctccacgggcgacagaccctcctagccacttggacgggccacctgctgtggccgtgggtcagtgccctttggtgggccctggcccaatgcaccggcgacacctactgttaccggcaagggtgccacgaccagggctgtccgaggcattgtccctgttactttttgctgttgtgttgagtcgggccgctgctctcggctgcattgggctggtggctcacgctggtcaattgaccgccgtgtggcgtcgacccggtgcggcgcgtgcgccgtag

SEQ ID NO: 37220 - DNA, 1830 bp, Artificial Sequence
  derived and/or modified sequence
atgggaggccacttttggccccccgagccatatactgtttttatgtggggatctccctgggaggctgattcccctagggtaaagctgagggggagggaaaagggccggcagaccgagggcggcgctttcccactcgtgtcttctgccctgagtggcgatcctaggtttttttcacccacaacgcccccggcagaacctatcgtagtgcggctgaaagaagtacgccttcaacgagatgactttgagatcctgaaagtgattggccggggggccttcagcgaagtcgccgtggtgaaaatgaaacagaccggacaggtgtacgccatgaagattatgaataaatgggacatgctgaagcggggcgaagtaagttgtttccgcgaagaacgagacgtcctggtcaacggagaccgacggtggataacccagctgcattttgcatttcaggatgaaaactacctatatttggtaatggaatactatgttggaggtgatctgctcactttactgtccaaatttggggagagaatccctgcagaaatggcgcgcttctaccttgctgagattgtgatggctatcgatagcgtgcaccggctcggttatgtgcatagggatattaagccagataacatcctgctggacagatgcgggcatattcgtctagctgattttggtagttgtctgaaattgagagccgacgggactgtgcgcagcttggttgctgtcggcacgcccgactatctgagcccggagatcctccaagccgtaggcggcgggccgggcactggaagctatggccctgaatgtgactggtgggcactgggcgtgttcgcttacgagatgttttatggacagaccccgttttatgccgactctacggcagaaacctacggaaaaattgtccattataaagagcacctgtcgcttcctttggttgacgaaggcgtacctgaggaggctcgcgactttatccaaaggctgctttgtccaccggagacgagactgggcaggggcggcgcaggggattttagaacacaccctttctttttcggcctggattgggacggattaagagattcagtgcccccattcacccctgattttgaaggggcaacagatacttgcaatttcgatcttgttgaagacgggctgaccgccatggtgagtggtggcggggagacccttagcgatattagggagggggcccccctcggcgttcatctgccatttgttggctattcatattcgtgcatggcgctgcgggacagcgaggtccctgggcccacacccatggaactagaggcggaacagctgcttgaacctcacgtgcaagcccctagcctcgagccttccgtctccccacaagatgaaaccgccgaggtggcagtgccggcagccgttccggccgcagaggcggaggccgaagtgactttgcgcgaactgcaggaggctctggaagaagaggtgctgacccgtcaatcgctctcacgggagatggaggccattaggacggataatcaaaactttgcgagtcagctgagagaggcagaggcacgcaatagagatttagaagctcacgtcagacagctgcaggagcgaatggagcttctccaggcagagggagccaccgctgtcaccggggtgcctagtccgagagctacagatcctccgtcccacgtgcccaggccaggcttgtcagaagccctatccctgctgctcttcgcagtggtcttgtccagagccgccgccctggggtgtatcgggcttgtcgcacatgcaggacagctgacggccgtctggagacggcccggagccgcaagagcaccatag

SEQ ID NO: 37221 - DNA, 1920 bp, Artificial Sequence
  derived and/or modified sequence
atgggcggccacttctggcccccagagccctacaccgtcttcatgtggggcagcccctgggaggccgacagcccccgggtgaagctgcggggccgggagaagggccggcagacagagggcggggccttccccctggtgagcagcgccctgagcggggacccccgcttcttcagccccaccaccccacctgctgagcccatcgtggtgcggctgaaggaggtgcggctgcagagagatgactttgagatcctgaaggtgattggccgcggggccttcagcgaggtggccgtggtgaagatgaagcagacaggccaggtgtatgccatgaagatcatgaacaagtgggacatgctgaagagaggagaggtgtcctgcttccgggaggagagagatgtgctggtgaatggagaccggcgctggatcacccagctgcactttgccttccaggatgagaactacctgtacctggtgatggagtactacgtgggcggggacctgctgaccctgctgagcaagtttggagagcgcatcccagctgagatggcccgcttctacctggccgagatcgtgatggccattgattctgtgcaccggctgggctacgtgcaccgggacatcaagccagacaacatcctgctggacagatgtggccacatccggctggccgactttggcagctgcctgaagctgcgggcagatggcaccgtgcgcagcctggtggccgtgggcaccccagactacctgagccctgagatcctgcaggccgtgggcggcggccctggcaccggcagctatggcccagaatgtgactggtgggccctgggcgtgtttgcctatgagatgttttatggccagacccccttctacgccgacagcacagctgagacctacggcaagatcgtgcactacaaggagcacctgagcctgcccctggtggatgaaggagtgcctgaggaggcccgggacttcatccagaggctgctgtgccccccagagacccggctgggccggggcggggccggggacttccgcacccaccccttcttcttcggcctggactgggatggcctgcgggacagcgtgccccccttcaccccagactttgagggcgccacagacacctgcaactttgacctggtggaggatggcctgacagccatggtgtctgggggcggggagaccctgagtgacatccgggagggcgcccccctgggcgtgcacctgccctttgtgggctacagctacagctgcatggccctgcgggacagcgaggtgcccggccccacccccatggagctggaggccgagcagctgctggagccccacgtgcaggcccccagcctggagcccagcgtgagcccccaggatgaaacagctgaggtggccgtgcctgctgctgtgcctgctgctgaggccgaggccgaggtgaccctgcgggagctgcaggaggccctggaggaggaggtgctgacccggcagagcctgagccgggagatggaggccatcagaacagacaaccagaactttgccagccagctgcgggaggccgaggccaggaacagagacctggaggcccacgtgcggcagctgcaggagaggatggagctgctgcaggccgagggcgccacagctgtgactggagtgcccagcccccgggccacagacccccccagccacctggatggccccccagctgtggccgtgggccagtgccccctggtgggccctggccccatgcacagaagacacctgctgctgcctgcccgggtgcccaggcctggcctgtctgaggccctgagcctgctgctgtttgctgtggtgctgagcagagctgctgccctgggctgcatcggcctggtggcccatgctggccagctgacagctgtgtggaggaggcctggagctgcccgggccccctag

SEQ ID NO: 37222 - DNA, 1830 bp, Artificial Sequence
  derived and/or modified sequence
atgggcggccacttctggcccccagagccctacaccgtcttcatgtggggcagcccctgggaggccgacagcccccgggtgaagctgcggggccgggagaagggccggcagacagagggcggggccttccccctggtgagcagcgccctgagcggggacccccgcttcttcagccccaccaccccacctgctgagcccatcgtggtgcggctgaaggaggtgcggctgcagagagatgactttgagatcctgaaggtgattggccgcggggccttcagcgaggtggccgtggtgaagatgaagcagacaggccaggtgtatgccatgaagatcatgaacaagtgggacatgctgaagagaggagaggtgtcctgcttccgggaggagagagatgtgctggtgaatggagaccggcgctggatcacccagctgcactttgccttccaggatgagaactacctgtacctggtgatggagtactacgtgggcggggacctgctgaccctgctgagcaagtttggagagcgcatcccagctgagatggcccgcttctacctggccgagatcgtgatggccattgattctgtgcaccggctgggctacgtgcaccgggacatcaagccagacaacatcctgctggacagatgtggccacatccggctggccgactttggcagctgcctgaagctgcgggcagatggcaccgtgcgcagcctggtggccgtgggcaccccagactacctgagccctgagatcctgcaggccgtgggcggcggccctggcaccggcagctatggcccagaatgtgactggtgggccctgggcgtgtttgcctatgagatgttttatggccagacccccttctacgccgacagcacagctgagacctacggcaagatcgtgcactacaaggagcacctgagcctgcccctggtggatgaaggagtgcctgaggaggcccgggacttcatccagaggctgctgtgccccccagagacccggctgggccggggcggggccggggacttccgcacccaccccttcttcttcggcctggactgggatggcctgcgggacagcgtgccccccttcaccccagactttgagggcgccacagacacctgcaactttgacctggtggaggatggcctgacagccatggtgtctgggggcggggagaccctgagtgacatccgggagggcgcccccctgggcgtgcacctgccctttgtgggctacagctacagctgcatggccctgcgggacagcgaggtgcccggccccacccccatggagctggaggccgagcagctgctggagccccacgtgcaggcccccagcctggagcccagcgtgagcccccaggatgaaacagctgaggtggccgtgcctgctgctgtgcctgctgctgaggccgaggccgaggtgaccctgcgggagctgcaggaggccctggaggaggaggtgctgacccggcagagcctgagccgggagatggaggccatcagaacagacaaccagaactttgccagccagctgcgggaggccgaggccaggaacagagacctggaggcccacgtgcggcagctgcaggagaggatggagctgctgcaggccgagggcgccacagctgtgactggagtgcccagcccccgggccacagacccccccagccacgtgcccaggcctggcctgtctgaggccctgagcctgctgctgtttgctgtggtgctgagcagagctgctgccctgggctgcatcggcctggtggcccatgctggccagctgacagctgtgtggaggaggcctggagctgcccgggccccctag

SEQ ID NO: 37223 - DNA, 1920 bp, Artificial Sequence
  derived and/or modified sequence
atgggcggccacttctggccccccgagccctacaccgtgttcatgtgggggagcccgtgggaagccgattctcctcgcgttaagttgagaggacgggagaaggggagacagacagagggcggtgcctttcctttggtgtcctctgctctgtccggggacccaaggtttttcagcccaaccaccccccccgccgaaccgatcgtggttaggctcaaagaggtgcgacttcagagggacgattttgaaatcctcaaggtaatcggccggggagccttcagcgaggtggcggttgtgaaaatgaagcaaacgggacaggtctacgccatgaaaattatgaataaatgggacatgctgaaaagaggggaggtcagctgcttcagagaagagcgcgatgtcctagttaatggagacaggaggtggattactcaactgcacttcgcttttcaggacgaaaactatctttatctggtgatggaatattacgttggaggggatctgctgacactgcttagcaaattcggggagagaatcccggccgaaatggctaggttttacctggctgaaatcgtcatggccatcgactcggttcatcgcctcgggtatgtgcatagagatatcaagccagacaacatcctgctcgaccgctgcggacatattcgtctcgccgatttcggttcatgtctcaagttgcgcgccgatggaactgttcggagtctagtggctgtgggcaccccagattacctttctccggagattcttcaggctgtggggggaggaccaggaacaggctcctatggccctgagtgtgactggtgggccctgggggtatttgcgtacgagatgttctacggccaaacccctttttatgcggacagcacggcagagacctacgggaagatagtgcattacaaggaacacctcagtcttccacttgtagacgaaggcgtgcccgaggaggcccgcgacttcatacagagactcctgtgtccgcccgaaactcgcctcgggaggggtggcgcgggcgatttccgcacccatccatttttcttcgggctggattgggacggcctgagagactcagtccctcctttcacccctgattttgaaggtgcaactgatacttgcaactttgatctggttgaggatggacttaccgctatggtgagtggcggaggtgagacactcagtgatattcgcgagggtgcaccattgggagtacatctacctttcgtgggatattcctacagttgcatggccctgagagacagtgaagtgcccggacccacacccatggaactggaagctgagcagctgctcgagccacacgtgcaggctccatcactcgagccttcggtgtcaccccaggacgaaacagccgaagtggcggtccccgctgccgttccagctgcagaggctgaggccgaggtcacattgcgagagctgcaagaggcactcgaagaggaggtgctgacaagacaatccctgagtcgagagatggaggcaataaggaccgataatcagaactttgcctcacaattacgcgaggctgaggcacggaaccgcgatctggaagctcatgttaggcagttacaggagagaatggaattgttacaggccgaaggcgccacagccgttactggcgtgccatccccgagggccaccgaccctccctctcacctggacggtccccccgctgttgctgtgggccaatgtccacttgtgggccccgggcctatgcataggagacacctcttactgcctgcccgggttccaagacctgggttgagtgaagccctctccttgctgcttttcgccgtcgtcctatccagggcggccgccctgggctgcatcgggctggtggcccatgcaggccagctcaccgcagtgtggaggaggccaggggcggctagagctccttag

SEQ ID NO: 37224 - DNA, 1830 bp, Artificial Sequence
  derived and/or modified sequence
atgggcggccacttctggccccccgagccctacaccgtgttcatgtggggctcaccttgggaggcagactcgcccagagtcaagctgagaggtagagagaagggccggcagactgaggggggagcttttcctctcgtcagctcagctcttagcggggatccaaggtttttttcgccaactacccctcctgccgaacccatcgtcgtaaggctgaaagaggttaggctgcagagagacgatttcgagattctgaaggtgattggtagaggggcttttagcgaggtcgctgttgtcaagatgaaacagacaggccaggtgtacgcaatgaaaataatgaataaatgggatatgctgaagcgcggagaggtgagctgttttagagaggagcgggacgtcttggttaacggggaccgccggtggatcacacagttgcacttcgcttttcaggatgaaaactacctgtacctggtgatggagtattacgtgggcggcgatctgctgacactgctgtctaaattcggtgaacgtatccctgccgagatggctaggttttacctggctgagatcgtcatggctattgatagtgttcacaggctaggctatgtgcatcgggacatcaagccagacaacatcctgcttgatcggtgcgggcatataagactggccgattttgggtcctgcctaaagctgcgagccgacgggacagtcagatcactggtggccgtcgggactccagactacctgtcgcctgagattctgcaagccgtgggagggggcccaggaaccggatcttacgggccagagtgtgattggtgggccttgggcgtcttcgcctacgagatgttctacggtcaaacacctttctacgcagattctactgccgaaacctatggtaaaattgttcactataaggagcatctaagtctgcctttagtcgatgaaggagttccagaggaggccagagacttcatccagaggctgctgtgcccacccgaaacccgcctcgggaggggaggggctggggacttccgtacacacccctttttctttgggctcgactgggacggtctgcgcgatagtgtaccacccttcactccggacttcgaaggcgcgacagacacctgtaactttgaccttgtggaagatgggctgactgcgatggtcagtggcgggggggagacactgtctgacatcagagaaggcgctccactcggcgtgcacctgccatttgtgggctatagctactcatgtatggctttgcgcgatagcgaggtccccggaccaacaccaatggaacttgaggcagaacagctcctggaaccgcacgtgcaggcccccagcttggagccctccgtaagcccccaggacgagaccgcagaggttgcagttccagcggcagtgcccgctgcggaggctgaggccgaggtcaccctaagggaattacaggaggctcttgaagaagaagtacttacacgccagtcattgagccgggaaatggaagccatcaggactgacaaccagaactttgcctcccagctgcgagaagccgaagccagaaatcgcgaccttgaggcccacgtcaggcagctgcaggaaagaatggaacttctccaggccgaaggtgccaccgcagtaacgggagtaccaagccccagggccaccgatcctccttcacacgtgccgcgaccagggctcagcgaagctctgtcactcctgctgttcgctgtagttctgagcagggccgcagcattaggctgcattggcctcgtagcccatgcaggacagctcacggccgtgtggagacgccccggggccgcccgggccccttag

SEQ ID NO: 37225 - DNA, 1920 bp, Artificial Sequence
  derived and/or modified sequence
atgggcggacacttctggccccctgagccatacactgtttttatgtgggggtccccttgggaagcggatagtccaagggttaagttgcggggacgggagaagggacgccagacggaggggggtgcctttccactggtgagttcggccctgagtggcgacccaagattcttttcccccactactccgcctgctgagccaattgtggtaaggttgaaggaggtgcgcctgcagcgagacgactttgaaattctgaaagtaataggcagaggcgctttctccgaagtggccgttgtcaagatgaagcagaccggccaggtgtacgcgatgaaaatcatgaataagtgggatatgctgaaacggggtgaggtttcctgtttcagggaggagagggacgtgctggtgaacggcgaccgcagatggatcacgcaactccatttcgcttttcaggacgaaaactatttatatctcgtaatggagtattacgtgggtggggacttgctgacccttctttcgaagttcggcgagcgcatccccgctgagatggcccgtttttatttagctgagattgtgatggccattgactctgttcaccggctaggctacgtgcaccgcgatatcaaacctgataacatactgctggaccgctgtggccatatcagactcgctgacttcgggtcatgtctcaaactgcgcgctgatggtactgtgcgaagtctcgtggcagtaggcacaccagattacttgtctcctgagattctacaggcggtgggtgggggtccgggtactggctcctacggcccagagtgcgattggtgggcactcggcgtgttcgcctatgagatgttttacggccagacccctttctatgcagactctaccgctgagacctatggaaagattgtccactacaaagaacacctgtcgctgcctctggtggacgaaggcgtgcccgaggaagcacgcgatttcattcagcggctgctatgtcctccagagacgagactcggcaggggtggcgctggcgattttagaactcacccatttttctttggattagactgggatggattgcgcgatagcgtcccccctttcactccagactttgaaggagccactgacacatgcaactttgatctggtggaagatggcctcacggctatggtatctggcggtggagagactctgagcgatataagagaaggcgctcccctgggagtccacctgccttttgtcggatattcctacagctgtatggcattgcgcgactcagaggtcccaggcccaacacctatggaactggaagctgagcagctgctggagccccacgtccaggctccctccctcgaaccttcagtgtctccacaagatgagaccgcagaagttgctgttcctgcggcagtgcccgctgcagaggctgaagccgaggtcacgctgcgggagctgcaggaggctttggaggaagaagtgctgacaagacagagcctttcccgtgagatggaggctattaggaccgataatcagaactttgcttcccagcttagggaggcagaggctaggaatagggatttggaggcacacgtaaggcagttacaggaaagaatggagttactgcaggccgagggcgctacagcggtgaccggggtcccaagccctagggctacagacccaccatctcatctggatggccctcctgctgtcgctgtggggcagtgccccctggtgggcccaggtcccatgcaccgacggcatctcttgttgccggcaagagtgccacgcccaggtctctcagaggcactgtctcttctgctgttcgctgtggtgttatctagagctgctgccttagggtgtatcgggcttgtcgcgcacgcagggcagcttacggccgtgtggagacgacctggtgccgctagggctccatag

SEQ ID NO: 37226 - DNA, 1830 bp, Artificial Sequence
  derived and/or modified sequence
atggggggacacttttggccacccgagccttacactgtattcatgtggggtagcccctgggaagccgacagtccgagggtaaagctaaggggcagggaaaagggccgtcaaactgaaggcggagcctttcctctcgtgtcatcagctctctcaggcgacccacgattcttctctccgacaactcctccagccgagccaatcgtagtcagactcaaagaggtgcgtctgcagcgggacgactttgagattctgaaagtgattggacgcggagccttttctgaggtggccgtggtgaagatgaaacagacagggcaggtgtatgcaatgaagattatgaataagtgggacatgctgaagaggggagaagtatcctgttttcgggaggaacgcgacgtcttggtgaacggcgacaggcgttggattacccagctgcatttcgcttttcaagacgaaaattacctctatcttgtgatggagtattacgtgggtggggatctcctgactctcctttccaagttcggggagcgcataccagccgagatggccaggttttatctggctgaaatagtgatggctattgactcggtgcacaggcttgggtatgtacatagggatattaagccagacaacattttgttggatcgttgcggccacattcggttagctgattttggatcttgcctgaagctgagggcagatggcaccgtgcgttctctggtcgccgtgggaacacccgactacctttcaccggagatactgcaagctgtgggtgggggaccaggcaccggatcctatggaccagagtgtgattggtgggcactcggtgtatttgcgtatgaaatgttttacggacagacacccttttacgcagactcaaccgccgaaacatacggaaaaatcgtgcactataaagagcacctgtctcttccattagtagacgagggggtgccagaggaagcgagggattttattcagcgattactctgtccacccgagacaaggctcggacgcggtggggcaggagattttagaacccatccattcttttttgggctagactgggacggcctacgagattcagtgcctccttttacgccggacttcgagggggctacagatacgtgtaatttcgatctggtggaagacggcctcacggcgatggtcagcgggggaggggaaactctttctgatatcagagagggcgcacccctaggggtccacctgccgtttgtcgggtatagctatagctgtatggctctccgggactccgaagtacccggacctacacctatggagctagaggccgagcaactgctggaaccacatgtgcaggctccttcgttggagccaagcgtctcccctcaggacgagaccgcagaagtcgcggtgcccgctgcagtgcccgctgcagaggctgaagctgaggtgactttacgcgaactgcaagaagccctggaagaagaggtgctgacccgccagagcctgtcccgggaaatggaagcaatacgtacagacaaccagaacttcgcttcacagctcagagaagcagaggccagaaacagggacctggaggctcatgtacggcagctgcaggaaagaatggagttgctacaagcagaaggcgctaccgctgttacgggagtaccttccccacgcgcaaccgaccccccatcccatgtgcctagaccagggttatctgaagccctgtccctactgttatttgccgtcgtcctcagtagagcggctgcccttggttgtattggcttagtcgcccatgctgggcaattgactgccgtctggaggcgccctggcgcagctcgggctccttag

SEQ ID NO: 37227 - DNA, 1917 bp, Artificial Sequence
  derived and/or modified sequence
atgggcggccacttctggccccccgagccctacaccgtgttcatgtggggcagcccctgggaggccgacagcccccgcgtgaagctgcgcggccgcgagaagggccgccagaccgagggcggcgccttccccctggtgagcagcgccctgagcggcgacccccgcttcttcagccccaccaccccccccgccgagcccatcgtggtgcgcctgaaggaggtgcgcctgcagcgcgacgacttcgagatcctgaaggtgatcggccgcggcgccttcagcgaggtggccgtggtgaagatgaagcagaccggccaggtgtacgccatgaagatcatgaacaagtgggacatgctgaagcgcggcgaggtgagctgcttccgcgaggagcgcgacgtgctggtgaacggcgaccgccgctggatcacccagctgcacttcgccttccaggacgagaactacctgtacctggtgatggagtactacgtgggcggcgacctgctgaccctgctgagcaagttcggcgagcgcatccccgccgagatggcccgcttctacctggccgagatcgtgatggccatcgacagcgtgcaccgcctgggctacgtgcaccgcgacatcaagcccgacaacatcctgctggaccgctgcggccacatccgcctggccgacttcggcagctgcctgaagctgcgcgccgacggcaccgtgcgcagcctggtggccgtgggcacccccgactacctgagccccgagatcctgcaggccgtgggcggcggccccggcaccggcagctacggccccgagtgcgactggtgggccctgggcgtgttcgcctacgagatgttctacggccagacccccttctacgccgacagcaccgccgagacctacggcaagatcgtgcactacaaggagcacctgagcctgcccctggtggacgagggcgtgcccgaggaggcccgcgacttcatccagcgcctgctgtgcccccccgagacccgcctgggccgcggcggcgccggcgacttccgcacccaccccttcttcttcggcctggactgggacggcctgcgcgacagcgtgccccccttcacccccgacttcgagggcgccaccgacacctgcaacttcgacctggtggaggacggcctgaccgccatggtgagcggcggcggcgagaccctgagcgacatccgcgagggcgcccccctgggcgtgcacctgcccttcgtgggctacagctacagctgcatggccctgcgcgacagcgaggtgcccggccccacccccatggagctggaggccgagcagctgctggagccccacgtgcaggcccccagcctggagcccagcgtgagcccccaggacgagaccgccgaggtggccgtgcccgccgccgtgcccgccgccgaggccgaggccgaggtgaccctgcgcgagctgcaggaggccctggaggaggaggtgctgacccgccagagcctgagccgcgagatggaggccatccgcaccgacaaccagaacttcgccagccagctgcgcgaggccgaggcccgcaaccgcgacctggaggcccacgtgcgccagctgcaggagcgcatggagctgctgcaggccgagggcgccaccgccgtgaccggcgtgcccagcccccgcgccaccgacccccccagccacctggacggcccccccgccgtggccgtgggccagtgccccctggtgggccccggccccatgcaccgccgccacctgctgctgcccgcccgcgtgccccgccccggcctgagcgaggccctgagcctgctgctgttcgccgtggtgctgagccgcgccgccgccctgggctgcatcggcctggtggcccacgccggccagctgaccgccgtgtggcgccgccccggcgccgcccgcgccccc

SEQ ID NO: 37228 - DNA, 1920 bp, Artificial Sequence
  derived and/or modified sequence
atgggcggccacttctggccccccgagccctacaccgtgttcatgtggggcagcccctgggaggccgacagccccagagtgaagctgagaggcagagagaagggcagacagaccgagggcggcgccttccccctggtgagcagcgccctgagcggcgaccccagattcttcagccccaccaccccccccgccgagcccatcgtggtgagactgaaggaggtgagactgcagagagacgacttcgagatcctgaaggtgatcggcagaggcgccttcagcgaggtggccgtggtgaagatgaagcagaccggccaggtgtacgccatgaagatcatgaacaagtgggacatgctgaagagaggcgaggtgagctgcttcagagaggagagagacgtgctggtgaacggcgacagaagatggatcacccagctgcacttcgccttccaggacgagaactacctgtacctggtgatggagtactacgtgggcggcgacctgctgaccctgctgagcaagttcggcgagagaatccccgccgagatggccagattctacctggccgagatcgtgatggccatcgacagcgtgcacagactgggctacgtgcacagagacatcaagcccgacaacatcctgctggacagatgcggccacatcagactggccgacttcggcagctgcctgaagctgagagccgacggcaccgtgagaagcctggtggccgtgggcacccccgactacctgagccccgagatcctgcaggccgtgggcggcggccccggcaccggcagctacggccccgagtgcgactggtgggccctgggcgtgttcgcctacgagatgttctacggccagacccccttctacgccgacagcaccgccgagacctacggcaagatcgtgcactacaaggagcacctgagcctgcccctggtggacgagggcgtgcccgaggaggccagagacttcatccagagactgctgtgcccccccgagaccagactgggcagaggcggcgccggcgacttcagaacccaccccttcttcttcggcctggactgggacggcctgagagacagcgtgccccccttcacccccgacttcgagggcgccaccgacacctgcaacttcgacctggtggaggacggcctgaccgccatggtgagcggcggcggcgagaccctgagcgacatcagagagggcgcccccctgggcgtgcacctgcccttcgtgggctacagctacagctgcatggccctgagagacagcgaggtgcccggccccacccccatggagctggaggccgagcagctgctggagccccacgtgcaggcccccagcctggagcccagcgtgagcccccaggacgagaccgccgaggtggccgtgcccgccgccgtgcccgccgccgaggccgaggccgaggtgaccctgagagagctgcaggaggccctggaggaggaggtgctgaccagacagagcctgagcagagagatggaggccatcagaaccgacaaccagaacttcgccagccagctgagagaggccgaggccagaaacagagacctggaggcccacgtgagacagctgcaggagagaatggagctgctgcaggccgagggcgccaccgccgtgaccggcgtgcccagccccagagccaccgacccccccagccacctggacggcccccccgccgtggccgtgggccagtgccccctggtgggccccggccccatgcacagaagacacctgctgctgcccgccagagtgcccagacccggcctgagcgaggccctgagcctgctgctgttcgccgtggtgctgagcagagccgccgccctgggctgcatcggcctggtggcccacgccggccagctgaccgccgtgtggagaagacccggcgccgccagagccccctag

SEQ ID NO: 37229 - DNA, 1830 bp, Artificial Sequence
  derived and/or modified sequence
atgggcggccacttctggccccccgagccctacaccgtgttcatgtggggcagcccctgggaggccgacagccccagagtgaagctgagaggcagagagaagggcagacagaccgagggcggcgccttccccctggtgagcagcgccctgagcggcgaccccagattcttcagccccaccaccccccccgccgagcccatcgtggtgagactgaaggaggtgagactgcagagagacgacttcgagatcctgaaggtgatcggcagaggcgccttcagcgaggtggccgtggtgaagatgaagcagaccggccaggtgtacgccatgaagatcatgaacaagtgggacatgctgaagagaggcgaggtgagctgcttcagagaggagagagacgtgctggtgaacggcgacagaagatggatcacccagctgcacttcgccttccaggacgagaactacctgtacctggtgatggagtactacgtgggcggcgacctgctgaccctgctgagcaagttcggcgagagaatccccgccgagatggccagattctacctggccgagatcgtgatggccatcgacagcgtgcacagactgggctacgtgcacagagacatcaagcccgacaacatcctgctggacagatgcggccacatcagactggccgacttcggcagctgcctgaagctgagagccgacggcaccgtgagaagcctggtggccgtgggcacccccgactacctgagccccgagatcctgcaggccgtgggcggcggccccggcaccggcagctacggccccgagtgcgactggtgggccctgggcgtgttcgcctacgagatgttctacggccagacccccttctacgccgacagcaccgccgagacctacggcaagatcgtgcactacaaggagcacctgagcctgcccctggtggacgagggcgtgcccgaggaggccagagacttcatccagagactgctgtgcccccccgagaccagactgggcagaggcggcgccggcgacttcagaacccaccccttcttcttcggcctggactgggacggcctgagagacagcgtgccccccttcacccccgacttcgagggcgccaccgacacctgcaacttcgacctggtggaggacggcctgaccgccatggtgagcggcggcggcgagaccctgagcgacatcagagagggcgcccccctgggcgtgcacctgcccttcgtgggctacagctacagctgcatggccctgagagacagcgaggtgcccggccccacccccatggagctggaggccgagcagctgctggagccccacgtgcaggcccccagcctggagcccagcgtgagcccccaggacgagaccgccgaggtggccgtgcccgccgccgtgcccgccgccgaggccgaggccgaggtgaccctgagagagctgcaggaggccctggaggaggaggtgctgaccagacagagcctgagcagagagatggaggccatcagaaccgacaaccagaacttcgccagccagctgagagaggccgaggccagaaacagagacctggaggcccacgtgagacagctgcaggagagaatggagctgctgcaggccgagggcgccaccgccgtgaccggcgtgcccagccccagagccaccgacccccccagccacgtgcccagacccggcctgagcgaggccctgagcctgctgctgttcgccgtggtgctgagcagagccgccgccctgggctgcatcggcctggtggcccacgccggccagctgaccgccgtgtggagaagacccggcgccgccagagccccctag

SEQ ID NO: 37230 - DNA, 3232 bp, Artificial Sequence
  derived and/or modified sequence
gccacaagcctccaccccagctggtcccccacccaggctgcccagtttaacattcctagtcataggaccttgacttctgagaggcctgattgtcatctgtaaataaggggtaggactaaagcactcctcctggaggactgagagatgggctggaccggagcacttgagtctgggatatgtgaccatgctacctttgtctccctgtcctgttccttcccccagccccaaatccagggttttccaaagtgtggttcaagaaccacctgcatctgaatctagaggtactggatacaaccccacgtctgggccgttacccaggacattctacatgagaacgtgggggtggggccctggctgcacctgaactgtcacctggagtcagggtggaaggtggaagaactgggtcttatttccttctccccttgttctttagggtctgtccttctgcagactccgttaccccaccctaaccatcctgcacacccttggagccctctgggccaatgccctgtcccgcaaagggcttctcaggcatctcacctctatgggagggcatttttggcccccagaaccttacacggtgtttatgtggggaagcccctgggaagcagacagtcctagggtgaagctgagaggcagagagaaggggagacagacagagggtggggctttcccccttgtctccagtgccctttctggtgaccctcggttcttttcccccaccacccccccagcggagcccatcgtggtgaggcttaaggaggtccgactgcagagggacgacttcgagattctgaaggtgatcggacgcggggcgttcagcgaggtagcggtagtgaagatgaagcagacgggccaggtgtatgccatgaagatcatgaacaagtgggacatgctgaagaggggcgaggtgtcgtgcttccgtgaggagagggacgtgttggtgaatggggaccggcggtggatcacgcagctgcacttcgccttccaggatgagaactacctgtacctggtcatggagtattacgtgggcggggacctgctgacactgctgagcaagtttggggagcggattccggccgagatggcgcgcttctacctggcggagattgtcatggccatagactcggtgcaccggcttggctacgtgcacagggacatcaaacccgacaacatcctgctggaccgctgtggccacatccgcctggccgacttcggctcttgcctcaagctgcgggcagatggaacggtgcggtcgctggtggctgtgggcaccccagactacctgtcccccgagatcctgcaggctgtgggcggtgggcctgggacaggcagctacgggcccgagtgtgactggtgggcgctgggtgtattcgcctatgaaatgttctatgggcagacgcccttctacgcggattccacggcggagacctatggcaagatcgtccactacaaggagcacctctctctgccgctggtggacgaaggggtccctgaggaggctcgagacttcattcagcggttgctgtgtcccccggagacacggctgggccggggtggagcaggcgacttccggacacatcccttcttctttggcctcgactgggatggtctccgggacagcgtgcccccctttacaccggatttcgaaggtgccaccgacacatgcaacttcgacttggtggaggacgggctcactgccatggtgagcgggggcggggagacactgtcggacattcgggaaggtgcgccgctaggggtccacctgccttttgtgggctactcctactcctgcatggccctcagggacagtgaggtcccaggccccacacccatggaactggaggccgagcagctgcttgagccacacgtgcaagcgcccagcctggagccctcggtgtccccacaggatgaaacagctgaagtggcagttccagcggctgtccctgcggcagaggctgaggccgaggtgacgctgcgggagctccaggaagccctggaggaggaggtgctcacccggcagagcctgagccgggagatggaggccatccgcacggacaaccagaacttcgccagtcaactacgcgaggcagaggctcggaaccgggacctagaggcacacgtccggcagttgcaggagcggatggagttgctgcaggcagagggagccacagctgtcacgggggtccccagtccccgggccacggatccaccttcccatctagatggccccccggccgtggctgtgggccagtgcccgctggtggggccaggccccatgcaccgccgccacctgctgctccctgccagggtccctaggcctggcctatcggaggcgctttccctgctcctgttcgccgttgttctgtctcgtgccgccgccctgggctgcattgggttggtggcccacgccggccaactcaccgcagtctggcgccgcccaggagccgcccgcgctccctgaaccctagaactgtcttcgactccggggccccgttggaagactgagtgcccggggcacggcacagaagccgcgcccaccgcctgccagttcacaaccgctccgagcgtgggtctccgcccagctccagtcctgtgatccgggcccgccccctagcggccggggagggaggggccgggtccgcggccggcgaacggggctcgaagggtccttgtagccgggaatgctgctgctgctgctgctgctgctgctgctgctgctgctgctgctgctgctgctgctgctggggggatcacagaccatttctttctttcggccaggctgaggccctgacgtggatgggcaaactgcaggcctgggaaggcagcaagccgggccgtccgtgttccatcctccacgcacccccacctatcgttggttcgcaaagtgcaaagctttcttgtgcatgacgccctgctctggggagcgtctggcgcgatctctgcctgcttactcgggaaatttgcttttgccaaacccgctttttcggggatcccgcgcccccctcctcacttgcgctgctctcggagccccagccggctccgcccgcttcggcggtttggatatttattgacctcgtcctccgactcgctgacaggctacaggacccccaacaaccccaatccacgttttggatgcactgagaccccgacattcctcggtatttattgtctgtccccacctaggacccccacccccgaccctcgcgaataaaaggccctccatctgccc

SEQ ID NO: 37231 - DNA, 2550 bp, Artificial Sequence
  derived and/or modified sequence
atgggagggcatttttggcccccagaaccttacacggtgtttatgtggggaagcccctgggaagcagacagtcctagggtgaagctgagaggcagagagaaggggagacagacagagggtggggctttcccccttgtctccagtgccctttctggtgaccctcggttcttttcccccaccacccccccagcggagcccatcgtggtgaggcttaaggaggtccgactgcagagggacgacttcgagattctgaaggtgatcggacgcggggcgttcagcgaggtagcggtagtgaagatgaagcagacgggccaggtgtatgccatgaagatcatgaacaagtgggacatgctgaagaggggcgaggtgtcgtgcttccgtgaggagagggacgtgttggtgaatggggaccggcggtggatcacgcagctgcacttcgccttccaggatgagaactacctgtacctggtcatggagtattacgtgggcggggacctgctgacactgctgagcaagtttggggagcggattccggccgagatggcgcgcttctacctggcggagattgtcatggccatagactcggtgcaccggcttggctacgtgcacagggacatcaaacccgacaacatcctgctggaccgctgtggccacatccgcctggccgacttcggctcttgcctcaagctgcgggcagatggaacggtgcggtcgctggtggctgtgggcaccccagactacctgtcccccgagatcctgcaggctgtgggcggtgggcctgggacaggcagctacgggcccgagtgtgactggtgggcgctgggtgtattcgcctatgaaatgttctatgggcagacgcccttctacgcggattccacggcggagacctatggcaagatcgtccactacaaggagcacctctctctgccgctggtggacgaaggggtccctgaggaggctcgagacttcattcagcggttgctgtgtcccccggagacacggctgggccggggtggagcaggcgacttccggacacatcccttcttctttggcctcgactgggatggtctccgggacagcgtgcccccctttacaccggatttcgaaggtgccaccgacacatgcaacttcgacttggtggaggacgggctcactgccatggtgagcgggggcggggagacactgtcggacattcgggaaggtgcgccgctaggggtccacctgccttttgtgggctactcctactcctgcatggccctcagggacagtgaggtcccaggccccacacccatggaactggaggccgagcagctgcttgagccacacgtgcaagcgcccagcctggagccctcggtgtccccacaggatgaaacagctgaagtggcagttccagcggctgtccctgcggcagaggctgaggccgaggtgacgctgcgggagctccaggaagccctggaggaggaggtgctcacccggcagagcctgagccgggagatggaggccatccgcacggacaaccagaacttcgccagtcaactacgcgaggcagaggctcggaaccgggacctagaggcacacgtccggcagttgcaggagcggatggagttgctgcaggcagagggagccacagctgtcacgggggtccccagtccccgggccacggatccaccttcccatgtccctaggcctggcctatcggaggcgctttccctgctcctgttcgccgttgttctgtctcgtgccgccgccctgggctgcattgggttggtggcccacgccggccaactcaccgcagtctggcgccgcccaggagccgcccgcgctccctgaaccctagaactgtcttcgactccggggccccgttggaagactgagtgcccggggcacggcacagaagccgcgcccaccgcctgccagttcacaaccgctccgagcgtgggtctccgcccagctccagtcctgtgatccgggcccgccccctagcggccggggagggaggggccgggtccgcggccggcgaacggggctcgaagggtccttgtagccgggaatgctgctgctgctggggggatcacagaccatttctttctttcggccaggctgaggccctgacgtggatgggcaaactgcaggcctgggaaggcagcaagccgggccgtccgtgttccatcctccacgcacccccacctatcgttggttcgcaaagtgcaaagctttcttgtgcatgacgccctgctctggggagcgtctggcgcgatctctgcctgcttactcgggaaatttgcttttgccaaacccgctttttcggggatcccgcgcccccctcctcacttgcgctgctctcggagccccagccggctccgcccgcttcggcggtttggatatttattgacctcgtcctccgactcgctgacaggctacaggacccccaacaaccccaatccacgttttggatgcactgagaccccgacattcctcggtatttattgtctgtccccacctaggacccccacccccgaccctcgcgaataaaaggccctccatctgccc

SEQ ID NO: 37232 - DNA, 1764 bp, Artificial Sequence
  derived and/or modified sequence
atgagcgccggcgacgccgtgtgcaccggctggctggtgaagagcccccccgagagaaagctgcagagatacgcctggagaaagagatggttcgtgctgagaagaggcagaatgagcggcaaccccgacgtgctggagtactacagaaacaagcacagcagcaagcccatcagagtgatcgacctgagcgagtgcgccgtgtggaagcacgtgggccccagcttcgtgagaaaggagttccagaacaacttcgtgttcatcgtgaagaccaccagcagaaccttctacctggtggccaagaccgagcaggagatgcaggtgtgggtgcacagcatcagccaggtgtgcaacctgggccacctggaggacggcgccgccgacagcatggagagcctgagctacacccccagcagcctgcagcccagcagcgccagcagcctgctgaccgcccacgccgccagcagcagcctgcccagagacgaccccaacaccaacgccgtggccaccgaggagaccagaagcgagagcgagctgctgttcctgcccgactacctggtgctgagcaactgcgagaccggcagactgcaccacaccagcctgcccaccagatgcgacagctggagcaacagcgacagaagcctggagcaggccagcttcgacgacgtgttcgtggactgcctgcagcccctgcccagcagccacctggtgcaccccagctgccacggcagcggcgcccaggaggtgcccagcagcagaccccaggccgccctgatctggagcagagagatcaacggcccccccagagaccacctgagcagcagccccctgctggagagcagcctgagcagcaccatccaggtggacaagaaccagggcagcctgccctgcggcgccaaggagctggacatcatgagcaacacccccccccccagaccccccaagcccagccacctgagcgagagaagacaggaggagtggagcacccacagcggcagcaagaagcccgagtgcaccctggtgcccagaagaatcagcctgagcggcctggacaacatgagaacctggaaggccgacgtggagggccagagcctgagacacagagacaagagactgagcctgaacctgccctgcagattcagccccatgtaccccaccgccagcgccagcatcgaggacagctacgtgcccatgagcccccaggccggcgccagcggcctgggcccccactgcagccccgacgactacatccccatgaacagcggcagcatcagcagccccctgcccgagctgcccgccaacctggagcccccccccgtgaacagagacctgaagccccagagaaagagcagacccccccccctggacctgagaaacctgagcatcatcagagagcacgccagcctgaccagaaccagaaccgtgccctgcagcagaaccagcttcctgagccccgagagaaacggcatcaacagcgccagattcttcgccaaccccgtgagcagagaggacgaggagagctacatcgagatggaggagcacagaaccgccagcagcctgagcagcggcgccctgacctggaccaagaagttcagcctggactacctggccctggacttcaacagcgccagccccgcccccatgcagcagaagctgctgctgagcgaggagcagagagtggactacgtgcaggtggacgagcagaagacccaggccctgcagagcaccaagcaggagtggaccgacgagagacagagcaaggtgtag

SEQ ID NO: 37233 - DNA, 1764 bp, Artificial Sequence
  derived and/or modified sequence
atgtccgcaggagatgccgtttgtacaggatggctcgtgaagagtccccctgagcgcaagctgcagagatacgcatggagaaagagatggttcgtgttgcggagagggcgcatgtccggaaaccccgatgtcctcgagtactatagaaataaacactctagcaagcccattcgcgtcatcgatctgtcagagtgcgctgtatggaagcatgtcggaccctcgtttgttcgaaaagagttccagaacaacttcgtgttcatcgttaaaacgacgtcaagaaccttctaccttgtggccaagaccgaacaggagatgcaggtgtgggttcatagtattagccaggtctgtaatttggggcatttagaggatggggccgcagactccatggagtccctatcttacacgccatctagtctgcagcccagtagcgcatcttccttgctgactgcccacgctgcctcctcatcactccctcgggacgatcctaatactaatgcagtcgcaacagaggagacacgtagtgaatccgaactgcttttcctacctgattacctggtgctgagtaactgcgagactggacgcctccatcatactagtctgcccaccaggtgcgacagctggtccaactcagataggtccttggagcaggcttccttcgatgatgtgtttgtggattgcctccagccgctgccttcttctcatcttgtccacccgagctgtcacggctctggtgcccaagaggttccatcctctaggccacaggccgctctaatctggtccagagagattaatggaccacctcgcgatcatctgtctagttccccactgcttgagagctccttgagttcgaccattcaggttgacaaaaaccaaggatccctcccgtgcggggcgaaggagctggatataatgtccaatacgccaccacctagacctcccaagcctagccacctgtctgagcggcgccaagaagagtggtccacacatagtggctctaaaaaacctgaatgcacactggtcccccggaggatctcactctctggactcgacaacatgcgcacctggaaggctgatgtagaaggccagagtctgcgtcatcgtgacaagagattatccttgaatctgccatgtcggttctccccaatgtatcccaccgctagcgccagcatcgaggatagctatgttccaatgtctcctcaggccggtgccagtggcctcggccctcactgctctccagatgactatattccgatgaactctggcagcatttcatcgccgctgcctgagctgcccgcaaatctagagcccccccccgtgaatcgtgatctgaaacctcagcgtaagagtaggccaccccctctggatctgcgaaacctctccatcatcagggagcacgcaagtcttaccagaactaggactgtgccttgttccaggacttcattcctgagccccgagcgaaacggaatcaatagtgctaggttctttgccaatccagtgtcaagagaggatgaggagtcctacattgagatggaggagcacaggactgcctcttccctgtctagcggagctcttacctggaccaaaaagttttctctggattacctggccctcgacttcaatagtgcctccccggcaccaatgcagcagaagttattgctcagtgaagaacaacgcgtagattatgtacaggtggacgaacagaagacacaggccctgcaatccaccaaacaggagtggactgatgagcgccagagcaaagtgtag

SEQ ID NO: 37234 - DNA, 1764 bp, Artificial Sequence
  derived and/or modified sequence
atgtctgctggagatgctgtgtgcaccggctggctggtgaagagccccccagagaggaagctgcagagatatgcctggaggaagcgctggtttgtgctgcggcggggccgcatgagcggcaacccagatgtgctggagtactacagaaacaagcacagcagcaagcccatccgggtcatcgacctgtctgaatgtgctgtgtggaagcacgtgggccccagctttgtgaggaaggagttccagaacaactttgtgttcatcgtgaagaccaccagcaggaccttctacctggtggccaagacagagcaggagatgcaggtgtgggtgcacagcatcagccaggtgtgcaacctgggccacctggaggatggagctgctgacagcatggagagcctgagctacacccccagcagcctgcagcccagcagcgccagcagcctgctgacagcccacgccgccagcagcagcctgcccagagatgaccccaacaccaatgctgtggccacagaggagaccaggtctgagagcgagctgctcttcctgcctgactacctggtgctgagcaactgtgagaccggccgcctgcaccacaccagcctgcccacccgctgtgacagctggagcaacagcgacaggagcctggagcaggccagctttgatgatgtgtttgtggactgcctgcagcccctgcccagcagccacctggtgcaccccagctgccacggcagcggggcccaggaggtgcccagcagccggccccaggccgccctgatctggagccgggagatcaatggccccccccgggaccacctgagcagcagccccctgctggagagcagcctgagcagcaccatccaggtggacaagaaccagggcagcctgccctgtggggccaaggagctggacatcatgagcaacaccccaccaccccggccccccaagcccagccacctgtctgaaagacggcaggaggagtggagcacccacagcggcagcaagaagccagagtgcaccctggtgccccggcgcatcagcctgagcggcctggacaacatgaggacctggaaggcagatgtggagggccagagcctgcggcaccgggacaagaggctgagcctgaacctgccctgccgcttcagccccatgtaccccacagccagcgccagcattgaagattcctatgtgcccatgagcccccaggccggggccagcggcctgggcccccactgcagcccagatgactacatccccatgaacagcggcagcatcagcagccccctgcctgagctgcctgccaacctggagcccccacctgtgaacagagacctgaagccccagaggaagagccggcccccacccctggacctgaggaacctgagcatcatccgggagcacgccagcctgaccaggaccaggacagtgccctgcagcaggaccagcttcctgagccctgagagaaatggcatcaacagcgcccgcttctttgccaaccctgtgtcccgggaggatgaggagagctacatcgagatggaggagcacaggacagccagcagcctgagcagcggggccctgacctggaccaagaagttcagcctggactacctggccctggacttcaacagcgccagccctgcccccatgcagcagaagctgctgctgtctgaggagcagagggtggactatgtgcaggtggatgagcagaagacccaggccctgcagagcaccaagcaggagtggacagatgagcggcagagcaaggtgtag

SEQ ID NO: 37235 - DNA, 1764 bp, Artificial Sequence
  derived and/or modified sequence
atgagcgccggcgacgccgtgtgcaccggctggctggtgaagagcccccctgagcgaaaactgcaaaggtacgcgtggcggaagagatggttcgtattgcgcagaggccgaatgtcaggcaaccccgatgtgcttgagtattaccggaataagcactcctcgaagccaatcagggtcatagatctttcagagtgtgccgtctggaagcacgttgggccctccttcgttcgcaaagagttccagaacaatttcgttttcattgtcaagacgactagtcgcacattttatctggtggcaaaaacggagcaggagatgcaggtttgggtacactcaatatcacaggtgtgcaatctggggcacctcgaggatggcgccgccgactctatggagtctctgagttacaccccatcaagtttacaaccctcgtcggcatcttcattactgaccgcccacgcggccagctcctcgctccccagggacgaccctaacaccaatgctgtggcgactgaagaaacacgcagtgaaagtgaactactcttcctgccggattatctggtgctgagcaactgcgaaacggggcgcttacatcacacgtctctccctacccggtgcgatagttggagcaatagtgataggagtttggagcaagcttcttttgacgacgtgtttgttgactgtttgcagccactcccttcatcgcatttggtgcaccctagctgccatgggagcggcgcccaggaggtgccctcatcacgtccccaggctgctttaatctggtcaagagagatcaacggacctcccagggaccacctcagctcttcaccactactggagagtagcctcagctcaaccattcaggtggataagaaccaggggagtctgccctgtggagccaaggaacttgacatcatgtcaaataccccaccaccaaggccccctaagccttcccatctttctgagcgtagacaggaggaatggagtacccattcagggtctaaaaaaccagaatgcaccttggtgcctcgtcggatctccctatcaggcttggacaacatgagaacctggaaggcagacgtcgaaggtcagagcctgcgccacagggacaaacgactgtctctgaacttgccatgcagatttagccctatgtatccaaccgcttccgccagcattgaggattcctacgttccaatgagtccccaggccggggctagcggccttggcccccactgcagtcctgatgattatatccccatgaactcaggcagtataagttccccccttcccgagcttccagccaatctggaacctccccctgtaaacagggatctcaagccacaacggaaaagcaggcctcctccccttgatctgcgcaacctgtccattatacgggagcacgctagcctgacgcgcactcgcaccgtaccctgctcccggacaagcttccttagccctgagcgcaacggaatcaactctgctaggtttttcgctaaccccgtgtcaagggaagatgaagagtcatatattgagatggaggaacatcgaacagcttcgtctctatcaagtggagctctcacatggacaaagaaatttagcctggattacctcgcattagactttaatagcgcttcaccagctccaatgcagcagaagctgttgctctctgaagagcagcgagtcgactatgttcaggtagatgaacaaaaaacgcaggccctgcagagtactaagcaggaatggaccgatgagaggcagtcaaaagtgtag

SEQ ID NO: 37236 - DNA, 1764 bp, Artificial Sequence
  derived and/or modified sequence
atgtccgccggagatgccgtttgcactggctggctggttaagagccctcctgagcgaaaattgcaaaggtatgcttggagaaaaagatggttcgtcctcaggcggggtcggatgagcggcaatccggatgtgctggagtactataggaataaacattcatcaaagccaattagagttatcgatctcagcgaatgtgctgtctggaaacacgttggccctagctttgtgcggaaagaatttcagaacaacttcgttttcatcgtcaagacaacgagcagaaccttctacttggttgccaaaaccgaacaggaaatgcaagtttgggttcacagcatctctcaagtgtgcaatctgggccacttagaggatggcgctgcagattctatggaatccctatcgtatactccttctagtctgcaaccttcatcagctagctcgcttctgactgctcacgccgctagttcatcgctgcccagagatgaccctaatactaacgcggtggctaccgaggaaacccggagcgaatccgaactcctgtttcttccagactacctggtactttctaattgcgagactggcagacttcatcacactagcctgcctactaggtgtgactcctggtccaactcagaccgcagtttggagcaggcaagcttcgacgacgtctttgttgactgcctccagcccctgccttcttcccacctggtccaccctagttgtcacggaagcggggcacaggaagtcccctcttcaaggcctcaggcggctttgatatggtccagagagataaacggcccacccagagatcacctcagctcttcccctctcttagaaagtagcttgtcatctacaattcaggtggacaagaatcaaggcagtttgccctgtggagcaaaggaactggacattatgagcaacacccccccaccaagaccaccaaagccgtcccacctctctgaacggcgtcaagaggaatggagtacacactccgggagcaagaagccggaatgcactctggtgccacgccgtatcagcctaagcggcctggataatatgcggacgtggaaggccgatgtggaaggccagagcctcaggcatagggataaacgcttgtctctcaatctgccatgcaggttctctcccatgtacccaacagcatcagcgtccattgaggactcgtacgttccgatgtctcctcaagcaggagcttcaggtcttgggcctcattgtagtccagacgattatatccccatgaattctgggtccatcagctcccccctgcccgagctccccgctaacttggagcctcctcctgttaatcgtgatctgaagcctcaaagaaagagccgtcccccaccgctagacctccgcaacctttccatcatcagggagcacgctagtttgaccagaactcgtactgtcccatgtagcagaaccagctttcttagtcctgagcgcaacggaatcaactccgccagatttttcgccaatcccgtgtcacgggaggatgaagagtcatatattgagatggaagaacaccgaactgcttcatctctgtcctccggcgctctcacctggactaagaaattctctctggattatctggctttggattttaattctgccagccccgcacctatgcaacagaaactgctccttagcgaggaacagcgggtggattacgtgcaggtcgacgaacaaaaaacacaagccctgcagagtaccaaacaggaatggaccgacgagaggcaatctaaggtgtag

SEQ ID NO: 37237 - protein, 651 aa, Artificial Sequence
  derived and/or modified sequence
MTPILTVLICLGLSLGPRTHVQAGHLPKPTLWAEPGSVITQGSPVTLRCQGGQETQEYRLYREKKTALWITRIPQELVKKGQFPIPSITWEHAGRYRCYYGSDTAGRSESSDPLELVVTGAYIKPTLSAQPSPVVNSGGNVILQCDSQVAFDGFSLCKEGEDEHPQCLNSQPHARGSSRAIFSVGPVSPSRRWWYRCYAYDSNSPYEWSLPSDLLELLVLGVSKKPSLSVQPGPIVAPEETLTLQCGSDAGYNRFVLYKDGERDFLQLAGAQPQAGLSQANFTLGPVSRSYGGQYRCYGAHNLSSEWSAPSDPLDILIAGQFYDRVSLSVQPGPTVASGENVTLLCQSQGWMQTFLLTKEGAADDPWRLRSTYQSQKYQAEFPMGPVTSAHAGTYRCYGSQSSKPYLLTHPSDPLELVVSGPSGGPSSPTTGPTSTSAGPEDQPLTPTGSDPQSGLGRHLGVVIGILVAVILLLLLLLLLFLILRHRRQGKHWTSTQRKADFQHPAGAVGPEPTDRGLQWRSSPAADAQEENLYAAVKHTQPEDGVEMDTRSPHDEDPQAVTYAEVKHSRPRREMASPPSPLSGEFLDTKDRQAEEDRQMDTEAAASEAPQDVTYAQLHSLTLRREATEPPPSQEGPSPAVPSIYATLAIH

SEQ ID NO: 37238 - protein, 651 aa, Artificial Sequence
  derived and/or modified sequence
MTPILTVLICLGLSLGPRTHVQAGHLPKPTLWAEPGSVITQGSPVTLRCQGGQETQEYRLYREKKTALWITRIPQELVKKGQFPIPSITWEHAGRYRCYYGSDTAGRSESSDPLELVVTGAYIKPTLSAQPSPVVNSGGNVILQCDSQVAFDGFSLCKEGEDEHPQCLNSQPHARGSSRAIFSVGPVSPSRRWWYRCYAYDSNSPYEWSLPSDLLELLVLGVSKKPSLSVQPGPIVAPEETLTLQCGSDAGYNRFVLYKDGERDFLQLAGAQPQAGLSQANFTLGPVSRSYGGQYRCYGAHNLSSEWSAPSDPLDILIAGQFYDRVSLSVQPGPTVASGENVTLLCQSQGWMQTFLLTKEGAADDPWRLRSTYQSQKYQAEFPMGPVTSAHAGTYRCYGSQSSKPYLLTHPSDPLELVVSGPSGGPSSPTTGPTSTSGPEDQPLTPTGSDPQSGLGRHLGVVIGILVAVILLLLLLLLLFLILRHRRQGKHWTSTQRKADFQHPAGAVGPEPTDRGLQWRSSPAADAQEENLYAAVKHTQPEDGVEMDTRQSPHDEDPQAVTYAEVKHSRPRREMASPPSPLSGEFLDTKDRQAEEDRQMDTEAAASEAPQDVTYAQLHSLTLRREATEPPPSQEGPSPAVPSIYATLAIH

SEQ ID NO: 37239 - protein, 4096 aa, Artificial Sequence
  derived and/or modified sequence
MAGSGAGVRCSLLRLQETLSAADRCGAALAGHQLIRGLGQECVLSSSPAVLALQTSLVFSRDFGLLVFVRKSLNSIEFRECREEILKFLCIFLEKMGQKIAPYSVEIKNTCTSVYTKDRAAKCKIPALDLLIKLLQTFRSSRLMDEFKIGELFSKFYGELALKKKIPDTVLEKVYELLGLLGEVHPSEMINNAENLFRAFLGELKTQMTSAVREPKLPVLAGCLKGLSSLLCNFTKSMEEDPQTSREIFNFVLKAIRPQIDLKRYAVPSAGLRLFALHASQFSTCLLDNYVSLFEVLLKWCAHTNVELKKAALSALESFLKQVSNMVAKNAEMHKNKLQYFMEQFYGIIRNVDSNNKELSIAIRGYGLFAGPCKVINAKDVDFMYVELIQRCKQMFLTQTDTGDDRVYQMPSFLQSVASVLLYLDTVPEVYTPVLEHLVVMQIDSFPQYSPKMQLVCCRAIVKVFLALAAKGPVLRNCISTVVHQGLIRICSKPVVLPKGPESESEDHRASGEVRTGKWKVPTYKDYVDLFRHLLSSDQMMDSILADEAFFSVNSSSESLNHLLYDEFVKSVLKIVEKLDLTLEIQTVGEQENGDEAPGVWMIPTSDPAANLHPAKPKDFSAFINLVEFCREILPEKQAEFFEPWVYSFSYELILQSTRLPLISGFYKLLSITVRNAKKIKYFEGVSPKSLKHSPEDPEKYSCFALFVKFGKEVAVKMKQYKDELLASCLTFLLSLPHNIIELDVRAYVPALQMAFKLGLSYTPLAEVGLNALEEWSIYIDRHVMQPYYKDILPCLDGYLKTSALSDETKNNWEVSALSRAAQKGFNKVVLKHLKKTKNLSSNEAISLEEIRIRVVQMLGSLGGQINKNLLTVTSSDEMMKSYVAWDREKRLSFAVPFREMKPVIFLDVFLPRVTELALTASDRQTKVAACELLHSMVMFMLGKATQMPEGGQGAPPMYQLYKRTFPVLLRLACDVDQVTRQLYEPLVMQLIHWFTNNKKFESQDTVALLEAILDGIVDPVDSTLRDFCGRCIREFLKWSIKQITPQQQEKSPVNTKSLFKRLYSLALHPNAFKRLGASLAFNNIYREFREEESLVEQFVFEALVIYMESLALAHADEKSLGTIQQCCDAIDHLCRIIEKKHVSLNKAKKRRLPRGFPPSASLCLLDLVKWLLAHCGRPQTECRHKSIELFYKFVPLLPGNRSPNLWLKDVLKEEGVSFLINTFEGGGCGQPSGILAQPTLLYRGPFSLQATLCWLDLLLAALECYNTFIGERTVGALQVLGTEAQSSLLKAVAFFLESIAMHDIIAAEKCFGTGAAGNRTSPQEGERYNYSKCTVVVRIMEFTTTLLNTSPEGWKLLKKDLCNTHLMRVLVQTLCEPASIGFNIGDVQVMAHLPDVCVNLMKALKMSPYKDILETHLREKITAQSIEELCAVNLYGPDAQVDRSRLAAVVSACKQLHRAGLLHNILPSQSTDLHHSVGTELLSLVYKGIAPGDERQCLPSLDLSCKQLASGLLELAFAFGGLCERLVSLLLNPAVLSTASLGSSQGSVIHFSHGEYFYSLFSETINTELLKNLDLAVLELMQSSVDNTKMVSAVLNGMLDQSFRERANQKHQGLKLATTILQHWKKCDSWWAKDSPLETKMAVLALLAKILQIDSSVSFNTSHGSFPEVFTTYISLLADTKLDLHLKGQAVTLLPFFTSLTGGSLEELRRVLEQLIVAHFPMQSREFPPGTPRFNNYVDCMKKFLDALELSQSPMLLELMTEVLCREQQHVMEELFQSSFRRIARRGSCVTQVGLLESVYEMFRKDDPRLSFTRQSFVDRSLLTLLWHCSLDALREFFSTIVVDAIDVLKSRFTKLNESTFDTQITKKMGYYKILDVMYSRLPKDDVHAKESKINQVFHGSCITEGNELTKTLIKLCYDAFTENMAGENQLLERRRLYHCAAYNCAISVICCVFNELKFYQGFLFSEKPEKNLLIFENLIDLKRRYNFPVEVEVPMERKKKYIEIRKEAREAANGDSDGPSYMSSLSYLADSTLSEEMSQFDFSTGVQSYSYSSQDPRPATGRFRRREQRDPTVHDDVLELEMDELNRHECMAPLTALVKHMHRSLGPPQGEEDSVPRDLPSWMKFLHGKLGNPIVPLNIRLFLAKLVINTEEVFRPYAKHWLSPLLQLAASENNGGEGIHYMVVEIVATILSWTGLATPTGVPKDEVLANRLLNFLMKHVFHPKRAVFRHNLEIIKTLVECWKDCLSIPYRLIFEKFSGKDPNSKDNSVGIQLLGIVMANDLPPYDPQCGIQSSEYFQALVNNMSFVRYKEVYAAAAEVLGLILRYVMERKNILEESLCELVAKQLKQHQNTMEDKFIVCLNKVTKSFPPLADRFMNAVFFLLPKFHGVLKTLCLEVVLCRVEGMTELYFQLKSKDFVQVMRHRDDERQKVCLDIIYKMMPKLKPVELRELLNPVVEFVSHPSTTCREQMYNILMWIHDNYRDPESETDNDSQEIFKLAKDVLIQGLIDENPGLQLIIRNFWSHETRLPSNTLDRLLALNSLYSPKIEVHFLSLATNFLLEMTSMSPDYPNPMFEHPLSECEFQEYTIDSDWRFRSTVLTPMFVETQASQGTLQTRTQEGSLSARWPVAGQIRATQQQHDFTLTQTADGRSSFDWLTGSSTDPLVDHTSPSSDSLLFAHKRSERLQRAPLKSVGPDFGKKRLGLPGDEVDNKVKGAAGRTDLLRLRRRFMRDQEKLSLMYARKGVAEQKREKEIKSELKMKQDAQVVLYRSYRHGDLPDIQIKHSSLITPLQAVAQRDPIIAKQLFSSLFSGILKEMDKFKTLSEKNNITQKLLQDFNRFLNTTFSFFPPFVSCIQDISCQHAALLSLDPAAVSAGCLASLQQPVGIRLLEEALLRLLPAELPAKRVRGKARLPPDVLRWVELAKLYRSIGEYDVLRGIFTSEIGTKQITQSALLAEARSDYSEAAKQYDEALNKQDWVDGEPTEAEKDFWELASLDCYNHLAEWKSLEYCSTASIDSENPPDLNKIWSEPFYQETYLPYMIRSKLKLLLQGEADQSLLTFIDKAMHGELQKAILELHYSQELSLLYLLQDDVDRAKYYIQNGIQSFMQNYSSIDVLLHQSRLTKLQSVQALTEIQEFISFISKQGNLSSQVPLKRLLNTWTNRYPDAKMDPMNIWDDIITNRCFFLSKIEEKLTPLPEDNSMNVDQDGDPSDRMEVQEQEEDISSLIRSCKFSMKMKMIDSARKQNNFSLAMKLLKELHKESKTRDDWLVSWVQSYCRLSHCRSRSQGCSEQVLTVLKTVSLLDENNVSSYLSKNILAFRDQNILLGTTYRIIANALSSEPACLAEIEEDKARRILELSGSSSEDSEKVIAGLYQRAFQHLSEAVQAAEEEAQPPSWSCGPAAGVIDAYMTLADFCDQQLRKEEENASVIDSAELQAYPALVVEKMLKALKLNSNEARLKFPRLLQIIERYPEETLSLMTKEISSVPCWQFISWISHMVALLDKDQAVAVQHSVEEITDNYPQAIVYPFIISSESYSFKDTSTGHKNKEFVARIKSKLDQGGVIQDFINALDQLSNPELLFKDWSNDVRAELAKTPVNKKNIEKMYERMYAALGDPKAPGLGAFRRKFIQTFGKEFDKHFGKGGSKLLRMKLSDFNDITNMLLLKMNKDSKPPGNLKECSPWMSDFKVEFLRNELEIPGQYDGRGKPLPEYHVRIAGFDERVTVMASLRRPKRIIIRGHDEREHPFLVKGGEDLRQDQRVEQLFQVMNGILAQDSACSQRALQLRTYSVVPMTSSDPRAPPCEYKDWLTKMSGKHDVGAYMLMYKGANRTETVTSFRKRESKVPADLLKRAFVRMSTSPEAFLALRSHFASSHALICISHWILGIGDRHLNNFMVAMETGGVIGIDFGHAFGSATQFLPVPELMPFRLTRQFINLMLPMKETGLMYSIMVHALRAFRSDPGLLTNTMDVFVKEPSFDWKNFEQKMLKKGGSWIQEINVAEKNWYPRQKICYAKRKLAGANPAVITCDELLLGHEKAPAFRDYVAVARGSKDHNIRAQEPESGLSEETQVKCLMDQATDPNILGRTWEGWEPWM

SEQ ID NO: 37240 - DNA, 12291 bp, Artificial Sequence
  derived and/or modified sequence
atggccggcagcggcgccggcgtgagatgcagcctgctgagactgcaggagaccctgagcgccgccgacagatgcggcgccgccctggccggccaccagctgatcagaggcctgggccaggagtgcgtgctgagcagcagccccgccgtgctggccctgcagaccagcctggtgttcagcagagacttcggcctgctggtgttcgtgagaaagagcctgaacagcatcgagttcagagagtgcagagaggagatcctgaagttcctgtgcatcttcctggagaagatgggccagaagatcgccccctacagcgtggagatcaagaacacctgcaccagcgtgtacaccaaggacagagccgccaagtgcaagatccccgccctggacctgctgatcaagctgctgcagaccttcagaagcagcagactgatggacgagttcaagatcggcgagctgttcagcaagttctacggcgagctggccctgaagaagaagatccccgacaccgtgctggagaaggtgtacgagctgctgggcctgctgggcgaggtgcaccccagcgagatgatcaacaacgccgagaacctgttcagagccttcctgggcgagctgaagacccagatgaccagcgccgtgagagagcccaagctgcccgtgctggccggctgcctgaagggcctgagcagcctgctgtgcaacttcaccaagagcatggaggaggacccccagaccagcagagagatcttcaacttcgtgctgaaggccatcagaccccagatcgacctgaagagatacgccgtgcccagcgccggcctgagactgttcgccctgcacgccagccagttcagcacctgcctgctggacaactacgtgagcctgttcgaggtgctgctgaagtggtgcgcccacaccaacgtggagctgaagaaggccgccctgagcgccctggagagcttcctgaagcaggtgagcaacatggtggccaagaacgccgagatgcacaagaacaagctgcagtacttcatggagcagttctacggcatcatcagaaacgtggacagcaacaacaaggagctgagcatcgccatcagaggctacggcctgttcgccggcccctgcaaggtgatcaacgccaaggacgtggacttcatgtacgtggagctgatccagagatgcaagcagatgttcctgacccagaccgacaccggcgacgacagagtgtaccagatgcccagcttcctgcagagcgtggccagcgtgctgctgtacctggacaccgtgcccgaggtgtacacccccgtgctggagcacctggtggtgatgcagatcgacagcttcccccagtacagccccaagatgcagctggtgtgctgcagagccatcgtgaaggtgttcctggccctggccgccaagggccccgtgctgagaaactgcatcagcaccgtggtgcaccagggcctgatcagaatctgcagcaagcccgtggtgctgcccaagggccccgagagcgagagcgaggaccacagagccagcggcgaggtgagaaccggcaagtggaaggtgcccacctacaaggactacgtggacctgttcagacacctgctgagcagcgaccagatgatggacagcatcctggccgacgaggccttcttcagcgtgaacagcagcagcgagagcctgaaccacctgctgtacgacgagttcgtgaagagcgtgctgaagatcgtggagaagctggacctgaccctggagatccagaccgtgggcgagcaggagaacggcgacgaggcccccggcgtgtggatgatccccaccagcgaccccgccgccaacctgcaccccgccaagcccaaggacttcagcgccttcatcaacctggtggagttctgcagagagatcctgcccgagaagcaggccgagttcttcgagccctgggtgtacagcttcagctacgagctgatcctgcagagcaccagactgcccctgatcagcggcttctacaagctgctgagcatcaccgtgagaaacgccaagaagatcaagtacttcgagggcgtgagccccaagagcctgaagcacagccccgaggaccccgagaagtacagctgcttcgccctgttcgtgaagttcggcaaggaggtggccgtgaagatgaagcagtacaaggacgagctgctggccagctgcctgaccttcctgctgagcctgccccacaacatcatcgagctggacgtgagagcctacgtgcccgccctgcagatggccttcaagctgggcctgagctacacccccctggccgaggtgggcctgaacgccctggaggagtggagcatctacatcgacagacacgtgatgcagccctactacaaggacatcctgccctgcctggacggctacctgaagaccagcgccctgagcgacgagaccaagaacaactgggaggtgagcgccctgagcagagccgcccagaagggcttcaacaaggtggtgctgaagcacctgaagaagaccaagaacctgagcagcaacgaggccatcagcctggaggagatcagaatcagagtggtgcagatgctgggcagcctgggcggccagatcaacaagaacctgctgaccgtgaccagcagcgacgagatgatgaagagctacgtggcctgggacagagagaagagactgagcttcgccgtgcccttcagagagatgaagcccgtgatcttcctggacgtgttcctgcccagagtgaccgagctggccctgaccgccagcgacagacagaccaaggtggccgcctgcgagctgctgcacagcatggtgatgttcatgctgggcaaggccacccagatgcccgagggcggccagggcgccccccccatgtaccagctgtacaagagaaccttccccgtgctgctgagactggcctgcgacgtggaccaggtgaccagacagctgtacgagcccctggtgatgcagctgatccactggttcaccaacaacaagaagttcgagagccaggacaccgtggccctgctggaggccatcctggacggcatcgtggaccccgtggacagcaccctgagagacttctgcggcagatgcatcagagagttcctgaagtggagcatcaagcagatcaccccccagcagcaggagaagagccccgtgaacaccaagagcctgttcaagagactgtacagcctggccctgcaccccaacgccttcaagagactgggcgccagcctggccttcaacaacatctacagagagttcagagaggaggagagcctggtggagcagttcgtgttcgaggccctggtgatctacatggagagcctggccctggcccacgccgacgagaagagcctgggcaccatccagcagtgctgcgacgccatcgaccacctgtgcagaatcatcgagaagaagcacgtgagcctgaacaaggccaagaagagaagactgcccagaggcttcccccccagcgccagcctgtgcctgctggacctggtgaagtggctgctggcccactgcggcagaccccagaccgagtgcagacacaagagcatcgagctgttctacaagttcgtgcccctgctgcccggcaacagaagccccaacctgtggctgaaggacgtgctgaaggaggagggcgtgagcttcctgatcaacaccttcgagggcggcggctgcggccagcccagcggcatcctggcccagcccaccctgctgtacagaggccccttcagcctgcaggccaccctgtgctggctggacctgctgctggccgccctggagtgctacaacaccttcatcggcgagagaaccgtgggcgccctgcaggtgctgggcaccgaggcccagagcagcctgctgaaggccgtggccttcttcctggagagcatcgccatgcacgacatcatcgccgccgagaagtgcttcggcaccggcgccgccggcaacagaaccagcccccaggagggcgagagatacaactacagcaagtgcaccgtggtggtgagaatcatggagttcaccaccaccctgctgaacaccagccccgagggctggaagctgctgaagaaggacctgtgcaacacccacctgatgagagtgctggtgcagaccctgtgcgagcccgccagcatcggcttcaacatcggcgacgtgcaggtgatggcccacctgcccgacgtgtgcgtgaacctgatgaaggccctgaagatgagcccctacaaggacatcctggagacccacctgagagagaagatcaccgcccagagcatcgaggagctgtgcgccgtgaacctgtacggccccgacgcccaggtggacagaagcagactggccgccgtggtgagcgcctgcaagcagctgcacagagccggcctgctgcacaacatcctgcccagccagagcaccgacctgcaccacagcgtgggcaccgagctgctgagcctggtgtacaagggcatcgcccccggcgacgagagacagtgcctgcccagcctggacctgagctgcaagcagctggccagcggcctgctggagctggccttcgccttcggcggcctgtgcgagagactggtgagcctgctgctgaaccccgccgtgctgagcaccgccagcctgggcagcagccagggcagcgtgatccacttcagccacggcgagtacttctacagcctgttcagcgagaccatcaacaccgagctgctgaagaacctggacctggccgtgctggagctgatgcagagcagcgtggacaacaccaagatggtgagcgccgtgctgaacggcatgctggaccagagcttcagagagagagccaaccagaagcaccagggcctgaagctggccaccaccatcctgcagcactggaagaagtgcgacagctggtgggccaaggacagccccctggagaccaagatggccgtgctggccctgctggccaagatcctgcagatcgacagcagcgtgagcttcaacaccagccacggcagcttccccgaggtgttcaccacctacatcagcctgctggccgacaccaagctggacctgcacctgaagggccaggccgtgaccctgctgcccttcttcaccagcctgaccggcggcagcctggaggagctgagaagagtgctggagcagctgatcgtggcccacttccccatgcagagcagagagttcccccccggcacccccagattcaacaactacgtggactgcatgaagaagttcctggacgccctggagctgagccagagccccatgctgctggagctgatgaccgaggtgctgtgcagagagcagcagcacgtgatggaggagctgttccagagcagcttcagaagaatcgccagaagaggcagctgcgtgacccaggtgggcctgctggagagcgtgtacgagatgttcagaaaggacgaccccagactgagcttcaccagacagagcttcgtggacagaagcctgctgaccctgctgtggcactgcagcctggacgccctgagagagttcttcagcaccatcgtggtggacgccatcgacgtgctgaagagcagattcaccaagctgaacgagagcaccttcgacacccagatcaccaagaagatgggctactacaagatcctggacgtgatgtacagcagactgcccaaggacgacgtgcacgccaaggagagcaagatcaaccaggtgttccacggcagctgcatcaccgagggcaacgagctgaccaagaccctgatcaagctgtgctacgacgccttcaccgagaacatggccggcgagaaccagctgctggagagaagaagactgtaccactgcgccgcctacaactgcgccatcagcgtgatctgctgcgtgttcaacgagctgaagttctaccagggcttcctgttcagcgagaagcccgagaagaacctgctgatcttcgagaacctgatcgacctgaagagaagatacaacttccccgtggaggtggaggtgcccatggagagaaagaagaagtacatcgagatcagaaaggaggccagagaggccgccaacggcgacagcgacggccccagctacatgagcagcctgagctacctggccgacagcaccctgagcgaggagatgagccagttcgacttcagcaccggcgtgcagagctacagctacagcagccaggaccccagacccgccaccggcagattcagaagaagagagcagagagaccccaccgtgcacgacgacgtgctggagctggagatggacgagctgaacagacacgagtgcatggcccccctgaccgccctggtgaagcacatgcacagaagcctgggccccccccagggcgaggaggacagcgtgcccagagacctgcccagctggatgaagttcctgcacggcaagctgggcaaccccatcgtgcccctgaacatcagactgttcctggccaagctggtgatcaacaccgaggaggtgttcagaccctacgccaagcactggctgagccccctgctgcagctggccgccagcgagaacaacggcggcgagggcatccactacatggtggtggagatcgtggccaccatcctgagctggaccggcctggccacccccaccggcgtgcccaaggacgaggtgctggccaacagactgctgaacttcctgatgaagcacgtgttccaccccaagagagccgtgttcagacacaacctggagatcatcaagaccctggtggagtgctggaaggactgcctgagcatcccctacagactgatcttcgagaagttcagcggcaaggaccccaacagcaaggacaacagcgtgggcatccagctgctgggcatcgtgatggccaacgacctgcccccctacgacccccagtgcggcatccagagcagcgagtacttccaggccctggtgaacaacatgagcttcgtgagatacaaggaggtgtacgccgccgccgccgaggtgctgggcctgatcctgagatacgtgatggagagaaagaacatcctggaggagagcctgtgcgagctggtggccaagcagctgaagcagcaccagaacaccatggaggacaagttcatcgtgtgcctgaacaaggtgaccaagagcttcccccccctggccgacagattcatgaacgccgtgttcttcctgctgcccaagttccacggcgtgctgaagaccctgtgcctggaggtggtgctgtgcagagtggagggcatgaccgagctgtacttccagctgaagagcaaggacttcgtgcaggtgatgagacacagagacgacgagagacagaaggtgtgcctggacatcatctacaagatgatgcccaagctgaagcccgtggagctgagagagctgctgaaccccgtggtggagttcgtgagccaccccagcaccacctgcagagagcagatgtacaacatcctgatgtggatccacgacaactacagagaccccgagagcgagaccgacaacgacagccaggagatcttcaagctggccaaggacgtgctgatccagggcctgatcgacgagaaccccggcctgcagctgatcatcagaaacttctggagccacgagaccagactgcccagcaacaccctggacagactgctggccctgaacagcctgtacagccccaagatcgaggtgcacttcctgagcctggccaccaacttcctgctggagatgaccagcatgagccccgactaccccaaccccatgttcgagcaccccctgagcgagtgcgagttccaggagtacaccatcgacagcgactggagattcagaagcaccgtgctgacccccatgttcgtggagacccaggccagccagggcaccctgcagaccagaacccaggagggcagcctgagcgccagatggcccgtggccggccagatcagagccacccagcagcagcacgacttcaccctgacccagaccgccgacggcagaagcagcttcgactggctgaccggcagcagcaccgaccccctggtggaccacaccagccccagcagcgacagcctgctgttcgcccacaagagaagcgagagactgcagagagcccccctgaagagcgtgggccccgacttcggcaagaagagactgggcctgcccggcgacgaggtggacaacaaggtgaagggcgccgccggcagaaccgacctgctgagactgagaagaagattcatgagagaccaggagaagctgagcctgatgtacgccagaaagggcgtggccgagcagaagagagagaaggagatcaagagcgagctgaagatgaagcaggacgcccaggtggtgctgtacagaagctacagacacggcgacctgcccgacatccagatcaagcacagcagcctgatcacccccctgcaggccgtggcccagagagaccccatcatcgccaagcagctgttcagcagcctgttcagcggcatcctgaaggagatggacaagttcaagaccctgagcgagaagaacaacatcacccagaagctgctgcaggacttcaacagattcctgaacaccaccttcagcttcttcccccccttcgtgagctgcatccaggacatcagctgccagcacgccgccctgctgagcctggaccccgccgccgtgagcgccggctgcctggccagcctgcagcagcccgtgggcatcagactgctggaggaggccctgctgagactgctgcccgccgagctgcccgccaagagagtgagaggcaaggccagactgccccccgacgtgctgagatgggtggagctggccaagctgtacagaagcatcggcgagtacgacgtgctgagaggcatcttcaccagcgagatcggcaccaagcagatcacccagagcgccctgctggccgaggccagaagcgactacagcgaggccgccaagcagtacgacgaggccctgaacaagcaggactgggtggacggcgagcccaccgaggccgagaaggacttctgggagctggccagcctggactgctacaaccacctggccgagtggaagagcctggagtactgcagcaccgccagcatcgacagcgagaacccccccgacctgaacaagatctggagcgagcccttctaccaggagacctacctgccctacatgatcagaagcaagctgaagctgctgctgcagggcgaggccgaccagagcctgctgaccttcatcgacaaggccatgcacggcgagctgcagaaggccatcctggagctgcactacagccaggagctgagcctgctgtacctgctgcaggacgacgtggacagagccaagtactacatccagaacggcatccagagcttcatgcagaactacagcagcatcgacgtgctgctgcaccagagcagactgaccaagctgcagagcgtgcaggccctgaccgagatccaggagttcatcagcttcatcagcaagcagggcaacctgagcagccaggtgcccctgaagagactgctgaacacctggaccaacagataccccgacgccaagatggaccccatgaacatctgggacgacatcatcaccaacagatgcttcttcctgagcaagatcgaggagaagctgacccccctgcccgaggacaacagcatgaacgtggaccaggacggcgaccccagcgacagaatggaggtgcaggagcaggaggaggacatcagcagcctgatcagaagctgcaagttcagcatgaagatgaagatgatcgacagcgccagaaagcagaacaacttcagcctggccatgaagctgctgaaggagctgcacaaggagagcaagaccagagacgactggctggtgagctgggtgcagagctactgcagactgagccactgcagaagcagaagccagggctgcagcgagcaggtgctgaccgtgctgaagaccgtgagcctgctggacgagaacaacgtgagcagctacctgagcaagaacatcctggccttcagagaccagaacatcctgctgggcaccacctacagaatcatcgccaacgccctgagcagcgagcccgcctgcctggccgagatcgaggaggacaaggccagaagaatcctggagctgagcggcagcagcagcgaggacagcgagaaggtgatcgccggcctgtaccagagagccttccagcacctgagcgaggccgtgcaggccgccgaggaggaggcccagccccccagctggagctgcggccccgccgccggcgtgatcgacgcctacatgaccctggccgacttctgcgaccagcagctgagaaaggaggaggagaacgccagcgtgatcgacagcgccgagctgcaggcctaccccgccctggtggtggagaagatgctgaaggccctgaagctgaacagcaacgaggccagactgaagttccccagactgctgcagatcatcgagagataccccgaggagaccctgagcctgatgaccaaggagatcagcagcgtgccctgctggcagttcatcagctggatcagccacatggtggccctgctggacaaggaccaggccgtggccgtgcagcacagcgtggaggagatcaccgacaactacccccaggccatcgtgtaccccttcatcatcagcagcgagagctacagcttcaaggacaccagcaccggccacaagaacaaggagttcgtggccagaatcaagagcaagctggaccagggcggcgtgatccaggacttcatcaacgccctggaccagctgagcaaccccgagctgctgttcaaggactggagcaacgacgtgagagccgagctggccaagacccccgtgaacaagaagaacatcgagaagatgtacgagagaatgtacgccgccctgggcgaccccaaggcccccggcctgggcgccttcagaagaaagttcatccagaccttcggcaaggagttcgacaagcacttcggcaagggcggcagcaagctgctgagaatgaagctgagcgacttcaacgacatcaccaacatgctgctgctgaagatgaacaaggacagcaagccccccggcaacctgaaggagtgcagcccctggatgagcgacttcaaggtggagttcctgagaaacgagctggagatccccggccagtacgacggcagaggcaagcccctgcccgagtaccacgtgagaatcgccggcttcgacgagagagtgaccgtgatggccagcctgagaagacccaagagaatcatcatcagaggccacgacgagagagagcaccccttcctggtgaagggcggcgaggacctgagacaggaccagagagtggagcagctgttccaggtgatgaacggcatcctggcccaggacagcgcctgcagccagagagccctgcagctgagaacctacagcgtggtgcccatgaccagcagcgaccccagagcccccccctgcgagtacaaggactggctgaccaagatgagcggcaagcacgacgtgggcgcctacatgctgatgtacaagggcgccaacagaaccgagaccgtgaccagcttcagaaagagagagagcaaggtgcccgccgacctgctgaagagagccttcgtgagaatgagcaccagccccgaggccttcctggccctgagaagccacttcgccagcagccacgccctgatctgcatcagccactggatcctgggcatcggcgacagacacctgaacaacttcatggtggccatggagaccggcggcgtgatcggcatcgacttcggccacgccttcggcagcgccacccagttcctgcccgtgcccgagctgatgcccttcagactgaccagacagttcatcaacctgatgctgcccatgaaggagaccggcctgatgtacagcatcatggtgcacgccctgagagccttcagaagcgaccccggcctgctgaccaacaccatggacgtgttcgtgaaggagcccagcttcgactggaagaacttcgagcagaagatgctgaagaagggcggcagctggatccaggagatcaacgtggccgagaagaactggtaccccagacagaagatctgctacgccaagagaaagctggccggcgccaaccccgccgtgatcacctgcgacgagctgctgctgggccacgagaaggcccccgccttcagagactacgtggccgtggccagaggcagcaaggaccacaacatcagagcccaggagcccgagagcggcctgagcgaggagacccaggtgaagtgcctgatggaccaggccaccgaccccaacatcctgggcagaacctgggagggctgggagccctggatgtag

SEQ ID NO: 37241 - DNA, 12291 bp, Artificial Sequence
  derived and/or modified sequence
atggctggctcaggagctggagtgagatgcagtcttcttcgcttacaagaaacactctccgccgccgatcggtgcggtgccgcactagccggacatcagctcattcggggtctgggtcaggaatgcgtattatcgtcctcaccggccgtgcttgctctgcaaacctctctagtgttcagcagagactttggacttctggtcttcgttagaaagtcccttaatagcattgaattccgcgaatgccgggaagagattctgaagtttctctgtatatttctggaaaagatggggcagaagattgccccatattcggttgaaataaagaatacctgcacatccgtttatacaaaagacagagcagctaaatgcaaaattcccgctttagacctcctgattaaactcctacaaacatttaggtctagccgtctaatggacgagttcaagataggggaattgttcagcaaattctatggagagcttgcccttaaaaagaagattcccgatacagtgcttgagaaagtttatgaattacttgggctgcttggagaggtgcaccccagtgaaatgattaataacgctgaaaaccttttccgcgctttcctgggagaactgaaaacacagatgacgtccgccgtccgcgagcccaagctaccggtgcttgctggctgtctgaagggccttagcagcctgctgtgtaattttaccaagagtatggaggaagacccccagacctcccgggaaatctttaacttcgtgcttaaggccatcagacctcaaattgacctcaagagatatgcagtgccatcagccggtttgcggctgttcgccctccacgcttctcagtttagtacttgtcttctggacaattacgtcagcctcttcgaagtgctgctcaagtggtgcgcacatactaacgtggaattgaaaaaggccgcccttagtgcattagagtcgtttctcaaacaggtatcgaatatggtggcaaaaaacgctgagatgcacaagaacaaactgcaatactttatggaacagttttacggcataatcaggaacgtggattcaaataataaagaattgagcatcgccattcgcggctatggactattcgccggcccctgcaaagtcatcaacgcaaaagacgtggacttcatgtacgtggaattgattcaacggtgcaaacagatgtttttaacccaaacagatacaggcgacgatcgggtataccagatgccgtcatttctgcaatccgttgctagtgtgctgctgtacctggacaccgtccccgaggtatacacacccgtgctcgaacacctggtggttatgcagatcgactcattcccccaatatagtccaaagatgcagctggtgtgctgcagagccatcgttaaggtcttcctggctcttgctgctaagggcccagtgctacggaactgcatttcgactgtagtccaccaaggactgattcgcatttgtagcaaacccgtcgtcctccccaaagggccagaatctgaatcagaagaccatagagccagcggggaggttagaactggtaaatggaaggtcccaacatataaagactacgtagatctcttccggcacctcctgtcgagtgatcagatgatggactccattctggccgatgaagcctttttcagtgtgaacagctcttctgagagtctgaaccatctcctttacgacgagttcgtcaaatccgtgctgaagatcgtggagaagctggatcttactttagaaatccagactgttggtgagcaagagaatggggacgaagcgcccggcgtatggatgatccctacctcagatccagccgctaacctgcatcccgccaagcctaaagatttcagtgctttcattaatctggtcgagttttgccgagagattctgccagagaaacaagccgaattcttcgaaccttgggtgtattctttttcctatgaactgatcctccagtcaactaggttacctctgatttcaggattttacaaactgcttagcattactgttcggaacgctaagaagattaaatacttcgagggtgtgtcgcctaagtcccttaaacactcaccagaggacccagaaaagtatagttgcttcgctctcttcgtcaagttcggcaaggaagtggcagtgaagatgaagcagtacaaagatgaactgctggcatcttgccttacctttttgctctcacttccgcacaacatcatagagctggatgtacgcgcgtatgtgcctgcactacagatggctttcaaactcggactgtcctacacgccattggccgaggtcgggttgaacgcacttgaggagtggtcaatatatatcgaccgtcatgtaatgcagccctactataaagatattcttccatgcctggatggttatctcaaaacatccgcactcagcgatgagacaaagaacaactgggaggtgtcggccctgtctagagccgctcagaaggggttcaacaaggttgttcttaagcatctgaaaaaaactaaaaacctcagcagtaacgaagcaatctcactcgaagagataaggataagagtggtgcagatgctaggatccctgggcgggcagattaacaaaaatctgctgacagtcacatcaagcgacgagatgatgaagtcctacgttgcttgggatcgggagaaacggctgtctttcgcagttccctttcgcgagatgaaacccgtgattttcttagacgtttttctgccaagagtgaccgaactggctctcactgcttcagaccgccagactaaggttgccgcttgtgaactgctgcatagcatggtgatgttcatgctggggaaggccactcagatgcctgagggaggacaaggtgcgcctccaatgtatcagctgtacaaacgcaccttccctgtccttctcagactggcgtgcgacgtcgaccaagttaccagacaactgtacgagccactcgttatgcagctgatacactggttcaccaacaacaaaaagttcgagtcccaggacacagtggcgctcttggaagcaattctggacggtattgtggaccctgtagactctactctcagagatttctgtggtcgctgcattcgggaatttttgaaatggtcaatcaagcagattacgccccagcaacaagaaaagtctcccgtcaataccaagtccctctttaagcgcctttattctttggccctgcaccctaatgccttcaagcggctgggcgctagcctggccttcaataatatctatagggagttccgagaggaggaatctttggtcgaacagttcgtgttcgaagcactggtcatatatatggaatccctcgcccttgcccacgccgacgaaaagtctttaggaactattcagcaatgctgtgatgccatcgaccacctgtgtagaatcatcgagaaaaaacacgtcagtctcaacaaagccaaaaagcgacgtctgcctagaggttttcctcctagtgcttctttgtgcctactggacctggtgaagtggttgttagcacattgcggccgacctcagacagagtgtcgccacaaatctatcgagttattttacaagttcgtcccgctcctgccagggaatcgtagtcccaacctctggctcaaagatgtgttgaaggaggagggagtctcctttctgatcaacactttcgagggaggagggtgcgggcagccttcgggcatccttgcccagcccacacttctgtaccgtggtccattcagtctgcaggcaactctatgttggctggacctgttactcgcagccctggagtgctacaatacttttattggagaacgtacggtgggagccttgcaggtgctggggaccgaggcacagtcctctttgctcaaggctgtcgccttcttcctggaatctatcgctatgcacgatatcattgccgctgaaaaatgttttggtactggcgcggccggcaacagaaccagccctcaggagggcgagcgatacaactatagcaaatgcactgttgtcgtccggatcatggaattcacaaccacattgttaaacacaagtccagaaggatggaaactacttaagaaagacctctgcaacacccacctcatgcgggtgttagtgcaaacattatgtgaacctgcctcaataggcttcaatatcggggatgtgcaagttatggcacatctgcccgatgtgtgcgtcaatctgatgaaagctttgaagatgtccccttacaaagatattctggagacccatctcagggagaagataactgcccagtcaatcgaagaactgtgcgcggtgaacctttatgggcccgatgctcaggtcgatcgatcacgtctggccgccgtcgtgtccgcgtgtaaacagcttcacagagccgggctgctccacaacatcctgcctagccaatctacagacctgcaccatagcgttgggacggagctgctgtcactggtctataagggcatagctccgggagacgagaggcaatgtctgcccagcctggacctgagctgcaagcaattagcctcagggctgctcgaattggctttcgcctttggcggcctgtgtgaacggctagtcagcttgctactgaatcctgctgttttgtctacagcctctcttggctcctcccaaggttccgttattcacttctcacacggagagtatttttactcattattttctgaaacaataaatacggagctcctcaagaacctagaccttgctgtcctggaattaatgcagtctagcgttgacaataccaaaatggtttcagcagtccttaatggtatgctggatcagtcttttcgggagagggctaaccagaaacatcagggtctaaagctcgccactaccatactgcagcactggaagaagtgtgacagctggtgggctaaggacagccccctggaaacgaagatggccgtgctggcactgctcgctaaaatcctgcagatagattcctccgtgtccttcaacaccagccacggcagctttcctgaggtatttactacctacatctctctgctggctgacacaaaactggacctgcatctgaaagggcaggccgtcacgttgttacctttttttacatctctcacgggcggctccctggaggagctgcgcagagttctggaacaacttatcgtcgctcatttccccatgcaatccagagagtttcctcctggcacacctaggtttaataattacgtcgactgcatgaagaaattcctggacgccctggaattgagccagtcccctatgctgctggagttaatgaccgaggtcctttgccgggagcaacagcacgtcatggaggaacttttccagagcagtttccggagaatcgcaaggagagggtcctgtgtgacccaggttggactcttggagagcgtttacgagatgttcagaaaggacgatccaagattaagcttcacccggcagtcatttgtggatcgctccctgctgactctcctctggcactgctctctggacgcgctgcgcgaattcttctccaccattgttgtggatgctattgatgttcttaagagtcgatttaccaagctgaatgaatctacttttgacacccagattaccaaaaagatggggtattataagatactcgacgtaatgtacagtcgccttcctaaagatgacgtccatgcaaaagagtccaagataaatcaggtattccacggtagttgtataaccgaaggcaatgaattaaccaaaaccctgatcaaattgtgctatgacgcgtttaccgagaatatggctggggagaatcaactcttagagcggcgccggctataccactgtgcagcttacaattgcgccatctcagtgatttgctgtgtctttaacgaacttaagttctaccaggggtttctattcagcgaaaagccagagaagaacctgttaatcttcgagaatttaattgatctgaaacgccggtacaatttccctgtggaggtcgaagtcccaatggaacgaaagaaaaaatatatcgagattcgcaaggaagcacgagaggcagctaacggagactctgatggaccttcatacatgtcttcactctcctacctggcagatagcactctgtcagaggaaatgtcccagttcgatttttcgacgggcgtgcaatcatattcgtacagtagccaggatcctagacccgctactggcagattccgccgacgggagcaaagggatcctaccgttcacgacgacgtgctcgaactggaaatggacgagctgaaccggcacgaatgtatggccccactcacagcccttgtcaagcacatgcatcgttctttgggaccccctcagggtgaagaggactccgttcctcgtgatctgccctcctggatgaaattcctccatggaaagctggggaaccctatcgtgcctctcaacataagactttttctggcaaaactcgtaatcaatacagaggaggtcttccggccttacgctaagcattggctgagccccctgcttcaactggctgcaagtgagaacaatgggggagaaggcatccactatatggtcgttgagatcgtggcgacaattttgtcgtggacaggtcttgcaacgcctacaggagtgccaaaagacgaagtgctggctaacaggctgctgaacttcttgatgaagcatgtgtttcacccgaagagggccgtttttaggcataacttggagataatcaaaacattagtcgaatgctggaaagattgcctgagtataccatacaggctgatcttcgaaaaattttccgggaaggacccgaatagcaaagataatagcgtgggcatccaactgctgggaatcgtgatggccaacgatctccccccctatgatccgcagtgcggtattcagagctctgagtactttcaggccctggtgaacaatatgagttttgtgagatataaggaagtctatgctgcagcagcggaggtcctggggctcatcctgagatatgtgatggaacgaaagaatatcttagaagagagcctctgtgaacttgtcgcaaaacagctgaagcagcatcagaatacaatggaggacaaattcatcgtgtgtctgaataaggtaactaagtcctttccgcccctcgccgaccgttttatgaatgctgtttttttcttgctcccgaaatttcacggagttctcaagaccctttgcttggaggtggtgttgtgcagggtcgaaggtatgactgagctgtactttcagttgaaaagcaaggactttgtgcaggtcatgcgtcatagagacgacgagcgtcagaaagtctgtttagatattatttacaagatgatgcctaagctcaaaccggtggaactgcgtgaactgcttaatccggtggtcgagttcgttagccaccccagcactacttgccgcgaacaaatgtacaacatcctgatgtggatccacgataactaccgagaccccgagagtgagactgacaacgactctcaggaaatcttcaagctcgccaaggacgttctcatccagggcctgattgatgagaacccgggcctgcagctgattatccgaaacttctggtcacatgagacaagactaccctctaatacgctggaccgcttactcgcactcaattccctttattccccgaaaatagaggttcattttctgtccctcgcgaccaattttctacttgaaatgacctccatgtctcccgactatcccaatcccatgtttgaacacccactcagcgagtgcgagttccaggagtataccattgacagcgactggcggttcagatcaaccgtgctaacccctatgttcgtcgagacacaggcttctcagggtaccctacagactcgaacccaagaaggttctctttcagcccggtggccggtggctgggcagatacgtgccacccagcagcagcacgatttcactttaacacagacagccgatggtcggtcctccttcgattggctgactggcagttcgacggatcctcttgtggatcatacctcacctagttctgatagtctcctgttcgcacataaaagatctgaaaggctgcagcgcgccccattgaaaagcgtcgggcctgattttggcaaaaaacgactcggtctgcccggcgacgaagtagataataaggtgaagggagccgcggggcgcactgacctcctcagattaaggcgccgattcatgcgggaccaggagaagttgtctcttatgtatgcaagaaagggggtggctgagcagaagcgggaaaaggagattaagtcggaactcaagatgaaacaagacgcacaggtggtgttatatcgcagctacagacacggagatctgcctgatatccaaataaaacactcaagtttaattactcctcttcaggcagttgcgcagagggaccctatcatcgccaagcagcttttcagctcactcttcagcggtatccttaaggaaatggacaaattcaagaccctgagtgagaaaaataacattacccagaaactgctacaggattttaaccgttttctgaacacaactttctctttttttccacccttcgtcagctgtatccaggacatttcctgtcagcacgccgctctcctgagcctcgaccctgctgcggtgagcgcaggctgtttagcttcacttcagcagcccgttggcatcagactgctggaggaggctttactgaggctgctcccggcagagctgccagcaaagagagtgaggggtaaggctcggctgcctcctgatgtgctgaggtgggtagaacttgcaaagctttatcggtctataggcgagtatgacgtgctacgcggaatctttacgagtgaaataggcacgaagcagataacccagtctgctctgctggctgaggctagaagtgactattctgaggcagccaaacagtatgatgaggctctgaataagcaggattgggtagatggagaaccaacagaagctgagaaagacttttgggagctggcgagcctggactgctacaatcacttagcggagtggaaaagtttggaatactgctccaccgcttccatcgatagcgaaaacccccccgatctgaacaagatatggagcgaaccattttatcaggaaacgtacctcccctatatgattagatctaagttaaagctccttcttcagggggaagccgatcagtctctgctgactttcatcgacaaggccatgcacggagaactgcagaaggcaatactggagctgcattatagtcaggaactttcactgctttacctgctgcaggacgacgttgaccgggcaaagtattacatccagaacggtatccagtccttcatgcagaactatagcagtattgacgtcctgctgcatcagtctcgcctgacaaagctccagtctgtccaggcgctgactgagatccaggaattcataagttttataagcaaacagggaaacctgagctctcaggtcccgttgaagcgtctactgaacacatggacgaacaggtatccagacgcaaagatggatccaatgaatatttgggatgatataataaccaatcgatgcttcttcctctctaagatcgaggagaaattgacaccacttccagaagataacagcatgaacgtcgaccaggatggcgacccaagtgaccggatggaagtgcaggaacaggaagaggatatcagtagtttaataaggtcctgtaagttttcaatgaaaatgaaaatgatagactctgcgagaaaacaaaacaattttagcctagctatgaagctgctgaaggaattgcacaaggagtcaaaaacaagggacgactggcttgtcagttgggtgcagagctactgccgcctcagccattgccgatcccggtctcagggctgttctgagcaggtcttaactgtcctcaagactgtgtctttattggacgagaataacgtgagctcatacctatcaaaaaatatactagctttcagagaccagaatatcctgctaggcaccacctaccgaatcatcgctaatgcactgtcatcggaacctgcttgcctggctgaaatcgaagaagacaaagccagaaggatccttgagttatctggctcgagttcagaagatagtgaaaaggtgatagccggtctgtaccagcgagcttttcagcatctgtccgaggccgttcaggctgcagaggaggaggcccagcctccctcctggagctgcggcccggccgcaggggtgatcgacgcctacatgacgctggctgacttttgcgaccagcaactgcgcaaggaggaagagaacgcgagcgtcatcgatagcgctgagttacaggcttatcccgctttggtggtggaaaaaatgctgaaggcactgaaattaaatagtaacgaagcccgtctgaagttcccacgacttctgcaaattattgagagatatccagaagaaacactcagtcttatgacaaaggagattagttctgttccatgttggcagtttatctcctggattagtcatatggttgccctgctggataaggatcaagcggtggccgttcaacattcagtggaggaaataacagataattacccccaggccatcgtatacccatttataatcagcagcgagagttatagctttaaagacacatccactggccacaagaataaagagttcgtggccagaatcaagagcaagctggaccaaggcggggttatccaggatttcatcaatgctcttgaccagttgtctaatcctgagctccttttcaaagactggagtaacgacgtccgggcagagctggctaaaacaccagtgaataagaaaaacatcgagaagatgtacgaacgaatgtatgccgccctgggggacccaaaagctcccgggctgggagccttccggcgaaaatttatccagaccttcgggaaagagtttgacaagcactttggtaaggggggctcaaaattgttgcgaatgaagctgagcgatttcaacgacattactaatatgctcctgctcaagatgaataaggacagcaagccacccggcaatttgaaggaatgctccccatggatgtctgatttcaaagtggagtttctgcggaacgagttagaaatacctggccagtacgacggtcggggcaagcccttgccagaatatcacgttaggattgctggcttcgatgaacgagtcaccgtgatggcctcactgcgccgccccaagaggattattatccggggacatgacgaacgggagcatccgttcctggtgaaaggcggagaggacttgcgacaggatcagagagtagaacagttgttccaggttatgaacggcattttggcccaggactctgcttgcagccaaagagcactgcagctccggacatactcagtggttcctatgacgtctagtgatccccgcgctcccccctgcgaatataaagattggcttactaaaatgtctggaaagcacgacgtgggagcctatatgcttatgtataagggtgccaacaggacagagacagtgaccagctttagaaaaagggagtcaaaggtgccggctgatctgctgaagcgcgccttcgtgcgaatgagtacctccccggaggcctttctggcactacgcagccatttcgcatcaagtcacgcgttaatttgtatttcccactggatcctcggcattggtgatcgccacctgaataatttcatggtcgcaatggaaaccgggggcgtgatcggaatcgatttcggacacgctttcggttctgctacccagtttctcccagtgcccgagctgatgccctttcgcttaacccgccaatttattaacctgatgttgccgatgaaggaaactggtctgatgtattcaatcatggtgcacgccctgagagccttcaggtcggaccctggcctgttgacaaataccatggatgtcttcgtgaaggaacccagcttcgattggaagaattttgagcagaagatgctgaaaaagggggggtcctggatacaggagatcaacgtggccgaaaagaattggtatcctcggcagaaaatttgctacgctaagagaaaattggccggcgcaaatcccgctgtgatcacgtgcgacgaactgctgcttggacacgaaaaagcacccgctttcagagactacgtcgccgtcgcacgaggctccaaggaccacaacatacgagcccaagagcccgaatctggattgtcagaagagacgcaggtgaaatgtctgatggaccaggccacagatcccaatatcttgggacggacttgggagggctgggaaccatggatgtag

SEQ ID NO: 37242 - DNA, 12291 bp, Artificial Sequence
  derived and/or modified sequence
atggccggcagcggggccggcgtgcgctgcagcctgctgcggctgcaggagaccctgtctgctgctgacagatgtggggccgccctggccggccaccagctgatccggggcctgggccaggagtgtgtgctgagcagcagccctgctgtgctggccctgcagaccagcctggtgttcagccgggactttggcctgctggtgtttgtgaggaagagcctgaacagcattgagttccgggagtgccgggaggagatcctgaagttcctgtgcatcttcctggagaagatgggccagaagatcgccccctacagcgtggagatcaagaacacctgcacctctgtgtacaccaaggaccgggccgccaagtgcaagatcccagccctggacctgctgatcaagctgctgcagaccttccgcagcagccggctgatggatgagttcaagattggagagctgttcagcaagttctatggagagctggccctgaagaagaagatcccagacacagtgctggagaaggtgtatgagctgctgggcctgctgggggaggtgcaccccagcgagatgatcaacaatgctgagaacctcttccgggccttcctgggggagctgaagacccagatgaccagcgctgtgcgggagcccaagctgcctgtgctggccggctgcctgaagggcctgagcagcctgctgtgcaacttcaccaagtccatggaggaggacccccagaccagccgggagatcttcaactttgtgctgaaggccatccggccccagattgacctgaagagatatgctgtgcccagcgctggcctgcggctgtttgccctgcacgccagccagttcagcacctgcctgctggacaactacgtgtccctgtttgaggtgctgctgaagtggtgtgcccacaccaacgtggagctgaagaaggccgccctgagcgccctggagagcttcctgaagcaggtgagcaacatggtggccaagaatgctgagatgcacaagaacaagctgcagtacttcatggagcagttctacggcatcatcagaaatgtggacagcaacaacaaggagctgagcatcgccatccggggctacggcctgtttgctggcccctgcaaggtgatcaatgccaaggatgtggacttcatgtatgtggagctgatccagcgctgcaagcagatgttcctgacccagacagacacaggagatgacagagtgtaccagatgcccagcttcctgcagagcgtggcctctgtgctgctgtacctggacacagtgcctgaggtgtacacccctgtgctggagcacctggtggtgatgcagattgacagcttcccccagtacagccccaagatgcagctggtgtgctgccgggccatcgtgaaggtgttcctggccctggccgccaagggccctgtgctgaggaactgcatcagcacagtggtgcaccagggcctcatccgcatctgcagcaagcctgtggtgctgcccaagggccctgagagcgagagcgaggaccaccgggccagcggggaggtgaggacaggcaagtggaaggtgcccacctacaaggactatgtggacctcttccgccacctgctgagcagtgaccagatgatggacagcatcctggctgatgaggccttcttctctgtgaacagcagcagcgagagcctgaaccacctgctgtatgatgaatttgtgaagtctgtgctgaagatcgtggagaagctggacctgaccctggagatccagacagtgggggagcaggagaatggagatgaggcccctggggtgtggatgatccccaccagtgaccctgctgccaacctgcacccagccaagcccaaggacttcagcgccttcatcaacctggtggagttctgccgggagatcctgcctgagaagcaggccgagttctttgagccctgggtgtacagcttctcctatgagctgatcctgcagagcacccggctgcccctcatcagcggcttctacaagctgctgagcatcaccgtgagaaatgccaagaagatcaagtactttgaaggagtgagccccaagagcctgaagcacagccctgaggaccctgagaagtacagctgctttgccctgtttgtgaagtttgggaaggaggtggccgtgaagatgaagcagtacaaggatgagctgctggccagctgcctgaccttcctgctgagcctgccccacaacatcatcgagctggatgtgcgggcctacgtgcctgccctgcagatggccttcaagctgggcctgagctacacccccctggccgaggtgggcctgaatgccctggaggagtggagcatctacatcgacagacatgtgatgcagccctactacaaggacatcctgccctgcctggatggctacctgaagaccagcgccctgagtgatgagaccaagaacaactgggaggtgtctgccctgagcagagctgcccagaagggcttcaacaaggtggtgctgaagcacctgaagaagaccaagaacctgagcagcaatgaggccatcagcctggaggagatccgcatccgggtggtgcagatgctgggcagcctgggcggccagatcaacaagaacctgctgactgtgaccagcagtgatgagatgatgaagagctatgtggcctgggaccgggagaagaggctgagctttgctgtgcccttccgggagatgaagcctgtgatcttcctggatgtgttcctgccccgggtgacagagctggccctgacagccagtgaccggcagaccaaggtggccgcctgtgagctgctgcacagcatggtgatgttcatgctgggcaaggccacccagatgcctgagggcggccagggcgccccacccatgtaccagctgtacaagaggaccttccctgtgctgctgcggctggcctgtgatgtggaccaggtgacccggcagctgtatgagcccctggtgatgcagctgatccactggttcaccaacaacaagaagtttgagagccaggacacagtggccctgctggaggccatcctggatggcatcgtggaccctgtggacagcaccctgcgggacttctgtggccgctgcatccgggagttcctgaagtggagcatcaagcagatcaccccccagcagcaggagaagagccctgtgaacaccaagagcctcttcaagaggctgtacagcctggccctgcaccccaatgccttcaagaggctgggcgccagcctggccttcaacaacatctaccgggagttccgggaggaggagagcctggtggagcagtttgtgtttgaggccctggtgatctacatggagagcctggccctggcccacgcagatgagaagagcctgggcaccatccagcagtgctgtgatgccatcgaccacctgtgccgcatcatcgagaagaagcacgtgtccctgaacaaggccaagaagaggcggctgccccggggcttcccccccagcgccagcctgtgcctgctggacctggtgaagtggctgctggcccactgcggccggccccagacagagtgccgccacaagagcattgagctgttctacaagtttgtgcccctgctgcccggcaacagaagccccaacctgtggctgaaggatgtgctgaaggaggagggcgtgtccttcctgatcaacacctttgagggcggcggctgcggccagcccagcggcatcctggcccagcccaccctgctgtaccggggccccttcagcctgcaggccaccctgtgctggctggacctgctgctggccgccctggagtgctacaacaccttcatcggggagaggacagtgggcgccctgcaggtgctgggcacagaggcccagagcagcctgctgaaggctgtggccttcttcctggagagcatcgccatgcatgacatcatcgctgctgagaagtgcttcggcaccggggctgctggcaacagaaccagcccccaggagggggagcgctacaactacagcaaatgtactgtggtggtgcgcatcatggagttcaccaccaccctgctgaacaccagccctgagggctggaagctgctgaagaaggacctgtgcaacacccacctgatgagggtgctggtgcagaccctgtgtgagcccgccagcatcggcttcaacattggagatgtgcaggtgatggcccacctgcctgatgtgtgtgtgaacctgatgaaggccctgaagatgagcccctacaaggacatcctggagacccacctgcgggagaagatcacagcccagagcattgaggagctgtgtgctgtgaacctgtatggcccagatgcccaggtggacaggagccggctggccgctgtggtgtctgcctgcaagcagctgcaccgggccggcctgctgcacaacatcctgcccagccagagcacagacctgcaccacagcgtgggcacagagctgctgagcctggtgtacaagggcatcgcccctggagatgagcggcagtgcctgcccagcctggacctgagctgcaagcagctggccagcggcctgctggagctggcctttgccttcggcggcctgtgtgagcggctggtgtccctgctgctgaacccagctgtgctgagcacagccagcctgggcagcagccagggcagcgtcatccacttcagccacggggagtacttctacagcctcttcagcgagaccatcaacacagagctgctgaagaacctggacctggccgtgctggagctgatgcagagctctgtggacaacaccaagatggtgtctgctgtgctgaatggcatgctggaccagagcttccgggagcgggccaaccagaagcaccagggcctgaagctggccaccaccatcctgcagcactggaagaagtgtgacagctggtgggccaaggacagccccctggagaccaagatggctgtgctggccctgctggccaagatcctgcagattgacagctctgtgtccttcaacaccagccacggcagcttccctgaggtgttcaccacctacatcagcctgctggccgacaccaagctggacctgcacctgaagggccaggccgtgaccctgctgcccttcttcaccagcctgaccggcggcagcctggaggagctgcggcgggtgctggagcagctgattgtggcccacttccccatgcagagccgggagttccccccaggcaccccccgcttcaacaactacgtggactgcatgaagaagttcctggatgccctggagctgagccagagccccatgctgctggagctgatgacagaggtgctgtgccgggagcagcagcacgtgatggaggagctgttccagagcagcttccgccgcatcgcccggcggggcagctgtgtgacccaggtgggcctgctggagagcgtgtatgagatgttcaggaaggatgacccccggctgtccttcacccggcagagctttgtggacaggagcctgctgaccctgctgtggcactgcagcctggatgccctgcgggagttcttcagcaccatcgtggtggatgccattgatgtgctgaagagccgcttcaccaagctgaatgaaagcacctttgacacccagatcaccaagaagatgggctactacaagatcctggatgtgatgtacagccggctgcccaaggatgatgtgcacgccaaggagagcaagatcaaccaggtgttccacggcagctgcatcacagagggcaatgagctgaccaagaccctcatcaagctgtgctatgatgccttcacagagaacatggccggggagaaccagctgctggagcggcggcggctgtaccactgtgccgcctacaactgtgccatcagcgtcatctgctgcgtgttcaatgagctgaagttctaccagggcttcctgttcagcgagaagccagagaagaacctgctgatctttgagaacctgattgacctgaagaggcgctacaacttccctgtggaggtggaggtgcccatggagaggaagaagaagtacatcgagatcaggaaggaggcccgggaggccgccaatggagacagtgatggccccagctacatgagcagcctgagctacctggccgacagcaccctgtctgaggagatgagccagtttgacttcagcactggagtgcagagctacagctacagcagccaggaccccaggcctgccaccggccgcttcagaagaagagagcagagggaccccaccgtgcatgatgatgtgctggagctggagatggatgagctgaacagacatgagtgcatggcccccctgacagccctggtgaagcacatgcacaggagcctgggccccccccagggcgaggaggacagcgtgccccgggacctgcccagctggatgaagttcctgcacggcaagctgggcaaccccatcgtgcccctgaacatccgcctcttcctggccaagctggtgatcaacacagaggaggtgttccggccctatgccaagcactggctgagccccctgctgcagctggccgccagcgagaacaacggcggggagggcatccactacatggtggtggagatcgtggccaccatcctgtcctggacaggcctggccacccccaccggggtgcccaaggatgaggtgctggccaaccggctgctgaacttcctgatgaagcacgtgttccaccccaagagagctgtgttccgccacaacctggagatcatcaagaccctggtggagtgctggaaggactgcctgagcatcccctaccgcctcatctttgagaagttcagcggcaaggaccccaacagcaaggacaacagcgtgggcatccagctgctgggcatcgtgatggccaatgacctgcccccctatgacccccagtgtggcatccagagcagcgagtacttccaggccctggtgaacaacatgagctttgtgcgctacaaggaggtgtatgctgctgctgctgaggtgctgggcctcatcctgcgctacgtgatggagaggaagaacatcctggaggagagcctgtgtgagctggtggccaagcagctgaagcagcaccagaacaccatggaggacaagttcatcgtgtgcctgaacaaggtgaccaagagcttcccccccctggccgaccgcttcatgaatgctgtgttcttcctgctgcccaagttccatggagtgctgaagaccctgtgcctggaggtggtgctgtgccgggtggagggcatgacagagctgtacttccagctgaagagcaaggactttgtgcaggtgatgaggcacagagatgatgagcggcagaaggtgtgcctggacatcatctacaagatgatgcccaagctgaagcctgtggagctgcgggagctgctgaaccctgtggtggagtttgtgagccaccccagcaccacctgccgggagcagatgtacaacatcctgatgtggattcatgacaactacagagatcctgagagcgagacagacaatgacagccaggagatcttcaagctggccaaggatgtgctgatccagggcctgattgatgagaaccctggcctgcagctgatcatccggaacttctggagccatgagacccggctgcccagcaacaccctggaccggctgctggccctgaacagcctgtacagccccaagattgaggtgcacttcctgagcctggccaccaacttcctgctggagatgacctccatgagcccagactaccccaaccccatgtttgagcaccccctgtctgaatgtgagttccaggagtacaccatcgacagcgactggaggttccgcagcacagtgctgacccccatgtttgtggagacccaggccagccagggcaccctgcagaccaggacccaggagggcagcctgagcgcccgctggcctgtggccggccagatccgggccacccagcagcagcacgacttcaccctgacccagacagcagatggccgcagcagctttgactggctgaccggcagcagcacagaccccctggtggaccacaccagccccagcagtgacagcctgctgtttgcccacaagaggtctgagcggctgcagagggcccccctgaagtctgtgggccctgactttgggaagaagaggctgggcctgcctggagatgaggtggacaacaaggtgaagggagctgctggccgcacagacctgctgcggctgcggcggcgcttcatgagggaccaggagaagctgagcctgatgtatgccaggaaaggagtggccgagcagaagcgggagaaggagatcaagtctgagctgaagatgaagcaggatgcccaggtggtgctgtaccgcagctaccgccacggggacctgcctgacatccagatcaagcacagcagcctcatcacccccctgcaggccgtggcccagagggaccccatcatcgccaagcagctgttcagcagcctcttcagcggcatcctgaaggagatggacaagttcaagaccctgtctgagaagaacaacatcacccagaagctgctgcaggacttcaaccgcttcctgaacaccaccttctccttcttccccccatttgtgtcctgcatccaggacatcagctgccagcacgccgccctgctgagcctggaccctgctgctgtgtctgctggctgcctggccagcctgcagcagcctgtgggcatccggctgctggaggaggccctgctgcggctgctgcctgctgagctgcctgccaagagggtgcggggcaaggcccggctgcccccagatgtgctgcgctgggtggagctggccaagctgtaccgcagcatcggggagtatgatgtgctgcggggcatcttcaccagcgagatcggcaccaagcagatcacccagagcgccctgctggccgaggcccggagtgactacagcgaggccgccaagcagtatgatgaggccctgaacaagcaggactgggtggatggagagcccacagaggccgagaaggacttctgggagctggccagcctggactgctacaaccacctggccgagtggaagagcctggagtactgcagcacagccagcattgacagtgaaaatcctccagacctgaacaagatctggagcgagcccttctaccaggagacctacctgccctacatgatccgcagcaagctgaagctgctgctgcagggcgaggccgaccagagcctgctgaccttcatcgacaaggccatgcatggagagctgcagaaggccatcctggagctgcactacagccaggagctgagcctgctgtacctgctgcaggatgatgtggaccgggccaagtactacatccagaatggcatccagagcttcatgcagaactacagcagcattgatgtgctgctgcaccagagccggctgaccaagctgcagagcgtgcaggccctgacagagatccaggagttcatctccttcatcagcaagcagggcaacctgagcagccaggtgcccctgaagaggctgctgaacacctggaccaaccgctacccagatgccaagatggaccccatgaacatctgggatgacatcatcaccaaccgctgcttcttcctgagcaagattgaggagaagctgacccccctgcctgaggacaacagcatgaatgtggaccaggatggagaccccagcgacaggatggaggtgcaggagcaggaggaggacatcagcagcctcatccgcagctgcaagttctccatgaagatgaagatgattgacagcgccaggaagcagaacaacttcagcctggccatgaagctgctgaaggagctgcacaaggagagcaagaccagagatgactggctggtgtcctgggtgcagagctactgccgcctgagccactgccgcagccgcagccagggctgcagcgagcaggtgctgactgtgctgaagacagtgtccctgctggatgagaacaacgtgtcctcctacctgagcaagaacatcctggccttccgggaccagaacatcctgctgggcaccacctaccgcatcatcgccaatgccctgagcagcgagcccgcctgcctggccgagattgaggaggacaaggcccggcgcatcctggagctgagcggcagcagcagtgaagattctgagaaggtgattgctggcctgtaccagagggccttccagcacctgtctgaggccgtgcaggccgctgaggaggaggcccagcccccatcctggagctgtggccctgctgctggggtgattgatgcctacatgaccctggccgacttctgtgaccagcagctgaggaaggaggaggagaatgcctctgtgattgattctgctgagctgcaggcctacccagccctggtggtggagaagatgctgaaggccctgaagctgaacagcaatgaggcccggctgaagttcccccggctgctgcagatcatcgagcgctacccagaggagaccctgagcctgatgaccaaggagatcagctctgtgccctgctggcagttcatctcctggatcagccacatggtggccctgctggacaaggaccaggccgtggccgtgcagcacagcgtggaggagatcacagacaactacccccaggccatcgtgtaccccttcatcatcagcagcgagagctacagcttcaaggacaccagcacaggccacaagaacaaggagtttgtggcccgcatcaagagcaagctggaccagggcggcgtcatccaggacttcatcaatgccctggaccagctgagcaaccctgagctgctcttcaaggactggagcaatgatgtgcgggcagagctggccaagacccctgtgaacaagaagaacatcgagaagatgtatgaaagaatgtatgctgccctgggggaccccaaggcccctggcctgggcgccttccggaggaagttcatccagaccttcggcaaggagtttgacaagcactttggaaaaggaggcagcaagctgctgaggatgaagctgagtgacttcaatgacatcaccaacatgctgctgctgaagatgaacaaggacagcaagcccccaggcaacctgaaggaatgtagcccctggatgtctgacttcaaggtggagttcctgagaaatgagctggagatccctggccagtatgatggccggggcaagcccctgcctgagtaccacgtgagaattgctggctttgatgagcgggtgacagtgatggccagcctgcggcggcccaagaggatcatcatccggggccatgatgagcgggagcaccccttcctggtgaagggaggagaggacctgcggcaggaccagagggtggagcagctgttccaggtgatgaatggcatcctggcccaggacagcgcctgcagccagagggccctgcagctgcggacctacagcgtggtgcccatgaccagcagtgacccccgggccccaccctgtgagtacaaggactggctgaccaagatgtctgggaagcatgatgtgggcgcctacatgctgatgtacaagggggccaacagaacagaaacagtgaccagcttcaggaagcgggagagcaaggtgcctgctgacctgctgaagagggcctttgtgaggatgagcaccagccctgaggccttcctggccctgcggagccactttgccagcagccacgccctgatctgcatcagccactggatcctgggcatcggggacagacacctgaacaacttcatggtggccatggagaccggcggcgtcatcggcatcgactttggccacgccttcggcagcgccacccagttcctgcctgtgcctgagctgatgcccttccggctgacccggcagttcatcaacctgatgctgcccatgaaggagaccggcctgatgtacagcatcatggtgcacgccctgcgggccttcagaagtgaccccggcctgctgaccaacaccatggatgtgtttgtgaaggagcccagctttgactggaagaactttgagcagaagatgctgaagaagggcggctcctggatccaggagatcaacgtggccgagaagaactggtacccccggcagaagatctgctacgccaagaggaagctggccggggccaacccagctgtgatcacctgtgatgagctgctgctgggccacgagaaggccccagccttccgggactatgtggccgtggcccggggcagcaaggaccacaacatccgggcccaggagcctgagagcggcctgtctgaggagacccaggtgaagtgcctgatggaccaggccacagaccccaacatcctgggccgcacctgggagggctgggagccctggatgtag

SEQ ID NO: 37243 - DNA, 12291 bp, Artificial Sequence
  derived and/or modified sequence
atggccggcagcggcgccggcgtgcggtgcagcctgctgcggctgcaagagaccttgagtgccgctgatcggtgtggcgctgcccttgcgggacaccaattgattcggggtttgggccaggaatgtgtgttgagctccagtccagcggtactagccctgcagacctcccttgtcttttcacgtgacttcgggctgctggtctttgtgcgtaaaagcttgaattcaatagagttccgggagtgtcgggaggaaatcttaaagttcttatgtatctttctggagaagatgggccagaaaatcgccccttattccgtggagattaagaacacttgcacttcggtttataccaaggaccgggcggcgaagtgcaaaattcctgccctggatttgctgattaagctgctgcagacttttaggagttcacgccttatggacgaatttaaaataggggagctattcagcaagttttacggtgagctggcactgaagaagaaaatcccagacactgtactggaaaaagtgtacgaactccttggactgctgggcgaggtccatcccagcgagatgatcaacaatgccgaaaacctcttcagggccttcctgggggaacttaaaacccagatgactagcgccgtgagggagccgaaactgcccgttctggcgggttgccttaaaggtttgtcaagcctgttatgcaattttacaaagagtatggaagaggatccccagactagccgcgagattttcaatttcgtgctcaaggccatacggccccaaattgacttgaagcgctatgcggttccttccgctgggctgcggctgttcgcactgcatgctagtcagtttagtacctgtctgctagacaactacgtttcactgtttgaggtcctgcttaagtggtgtgcgcatactaatgtcgagctgaagaaggccgcactatccgcgttggaaagtttcctcaagcaagtgtctaatatggtggccaagaacgccgagatgcataaaaataagctgcagtactttatggagcagttttatgggataattagaaatgttgatagtaacaacaaggagcttagcatagcgataagggggtatgggcttttcgcaggaccctgtaaggtcatcaacgccaaagatgtcgactttatgtatgtcgaactgattcaacgatgcaaacagatgtttttgacacagacggatacaggcgacgaccgagtttaccagatgccaagttttctgcagtccgttgcaagtgtgctgctttacctggatacggtgcccgaggtgtataccccagtactcgagcatctggtcgtcatgcagattgattcattccctcagtattcaccaaagatgcagctcgtgtgctgtcgcgctattgtgaaagtcttcctggctttagccgctaaagggcccgtgctccgcaattgcatttccactgtcgttcatcagggattaatccggatttgttccaaacctgtggtccttccgaaaggccctgagtccgaaagcgaagaccacagagcttccggcgaagtgcgtactgggaagtggaaagtccccacttataaagactacgtcgatctctttaggcatctgcttagttcagaccaaatgatggatagtatactggcggacgaggccttctttagcgtgaattccagtagtgaatccctgaaccatctcctgtacgatgaattcgttaagtcggttttgaaaattgtcgaaaaactagacctcaccctggagattcaaacagtgggcgaacaagagaatggcgacgaggctccaggagtttggatgattccgacctcagaccctgctgcaaacctgcacccagcaaagcccaaagacttctcggcctttatcaacttggtggagttctgtcgggagatcttgccagagaagcaggcagagttcttcgagccctgggtatactccttcagctatgagttaatcttgcaatctactagactccctctaatatccgggttctacaaactcctgtccattactgtcagaaacgcaaagaagatcaagtactttgaaggggtaagcccaaaatccctcaagcactcacctgaggacccagagaagtactcttgtttcgccctcttcgtcaaatttggcaaggaggttgcagtgaagatgaagcagtataaggatgagcttctggcctcctgcctcacttttctgctaagcctaccccacaatataatcgaacttgacgtgcgggcatatgtgcccgccttgcaaatggcgtttaagctgggtttatcatatacacccctggccgaagtggggctcaacgctctggaagagtggtcgatatacatagaccgccatgtgatgcagccctattataaggatattctaccatgcctggacggctatctgaaaacatcagctctgagtgatgaaacaaagaataactgggaagtgtctgccctgagcagggctgctcagaagggttttaataaggtggtgttaaaacacttgaagaagacgaagaatctgagctctaatgaagcaatatctctggaggaaattcggatccgtgtggttcagatgctgggaagcctggggggccagattaacaagaatctgctgaccgtgacctcgagcgatgaaatgatgaagtcttatgtagcttgggatcgggagaaaagactgtctttcgctgttcctttccgtgagatgaaaccagttatcttccttgacgtgttcctgcctcgtgttaccgaactggcgctgacagcctcagatcgacagaccaaggtcgctgcgtgtgagctgctccactccatggttatgtttatgttgggcaaagctacacaaatgccggagggcgggcagggagccccccctatgtatcagctctataagagaacctttccagtgcttttacggctggcttgcgacgtagatcaggtgactcgccagctctacgagcctcttgtcatgcaacttatccactggttcaccaacaacaaaaaattcgaatcccaggacaccgtcgccctcctggaggcaattctggatggcattgtagatccagtagattcaaccctgagggacttctgcggcaggtgtatccgcgagttcttgaaatggtccattaagcagatcacgccgcagcagcaggagaaaagtcctgtgaacacaaagtctctattcaaacggctgtactctcttgcccttcacccaaacgcctttaaacgactgggcgcctctcttgcattcaacaatatatacagagagtttagagaggaggagtccctcgtggagcagtttgtgttcgaggcattggtaatatacatggagtcacttgctttggctcatgccgacgagaaatcacttggaactatccagcagtgttgtgatgctatagatcacttatgtcgaattattgaaaaaaagcacgtcagtctgaacaaggccaagaagcgcaggctgccccgcggatttcctccatctgcgagcctttgcctgctggatttggtgaaatggctgctggcacactgcgggcggccacagaccgagtgtcgacataaatctatagaactcttttataaattcgttcctctgctgcctggaaacagatccccaaatctgtggctgaaagacgttctgaaagaggaaggagtgtcctttctcattaacactttcgagggaggcgggtgcggacagcccagtgggattctggcccagcccaccctgctgtatagaggaccgttctccctgcaggccaccctgtgctggctggatcttctcttggctgccctggagtgttataacacattcattggtgagcgcacagtaggggcacttcaagtgttggggacagaggctcaatctagcctgcttaaggccgtcgccttctttctagaaagtattgctatgcatgatatcattgctgcagaaaagtgctttggaacaggtgcagcaggtaaccgaactagtccccaagaaggagagcgctacaactactcaaaatgtaccgtagtcgttcgcatcatggaattcaccactactctcttgaacaccagcccagaaggctggaagctccttaaaaaggacctgtgcaacactcatttaatgcgtgtgttggtccagacactatgcgagcccgcatcgataggcttcaacataggcgatgtgcaagttatggcccacctacctgacgtgtgtgtgaacctaatgaaagctttgaaaatgtccccatacaaggatatccttgagactcacttacgcgaaaaaatcactgcccagtccatcgaagagctttgtgcggtcaacctctatggccctgacgcgcaggtcgatagaagcagactggccgccgttgtttccgcatgcaagcagttgcaccgtgccggcctgcttcacaacattttgccgtcccagagcacagacctgcatcattcagtagggaccgagctcctgagtctcgtctataagggcatcgctcccggggacgagcgccagtgcctgccatctctcgatctgagctgcaaacagctggcctcgggcctgttggaattggcattcgcctttgggggattgtgtgaaaggcttgtcagcctattactcaatcccgccgttctttcaaccgcctcccttggttccagccaaggcagcgttattcactttagccacggggagtatttttactccctgtttagcgagacgattaacaccgagctcttgaaaaacctggatcttgcagtgttagaactgatgcagagtagtgtggataacacaaagatggtgtctgcagtcttgaacggcatgctcgaccaatcttttcgagaaagggctaatcagaaacaccagggtctcaagctagcgaccacaatattacagcattggaagaagtgtgacagttggtgggcaaaggactctccccttgaaacaaagatggctgtcttagccctgttagctaaaatactacagatcgattcatccgtgtcattcaatacctctcacggctcattccctgaggttttcactacctacattagtctattggctgacacaaagctagacttgcacctcaaaggccaggcagtgacacttctgccattcttcacctccttaacgggagggagtctagaagaactgcgccgggtgctcgagcagctgattgttgcacatttccccatgcagtctagagagttcccgcccggtaccccaaggtttaataactacgtcgactgcatgaagaaatttttggacgccctggaactgagccagagtccaatgctgttggaattgatgaccgaggtgctctgtcgggagcagcagcatgttatggaggagctcttccagtctagcttcaggcgcattgctaggagagggagctgcgtgacgcaagtgggactgctggagtccgtctacgaaatgttccggaaagacgacccgaggcttagcttcacccggcagagctttgttgatcggtctctcctgaccctgctttggcactgctctctcgatgcactacgcgaattcttttcaacgatagtagtagacgccatagatgtgttaaaaagtaggtttacaaagctcaatgagtccaccttcgatactcaaatcacgaaaaagatgggctattataagattctggacgtaatgtactcgagattgccaaaggacgatgttcacgccaaggaatctaagattaaccaggtgttccatggttcatgcataacggaagggaatgagctgacgaaaactctcatcaaattgtgctatgatgctttcacagagaatatggcaggagagaatcaactcctggagcggaggcggctgtatcactgcgccgcatacaactgcgcgatctctgtgatctgctgcgtatttaatgagttaaaattctaccagggatttttgttctccgagaaacccgagaaaaacctcctcattttcgaaaatctgatcgatctgaagaggcgatacaatttccctgttgaagtcgaggttcccatggagagaaagaagaaatatattgaaatcaggaaggaggctcgcgaggctgctaatggcgatagtgatgggccaagctacatgtccagcctgtcatacctggcagactctacgctgtccgaagagatgtcccagttcgacttttctactggcgtgcaaagctatagttactcatctcaggatccgaggccagctaccggccgcttccgacggcgggagcagcgcgatcctacagttcatgatgatgtacttgaactggagatggacgagcttaacaggcacgaatgtatggcccccctgaccgccctggttaagcacatgcatagatcactggggccaccccaaggggaagaggactcagtgccccgtgatctaccctcctggatgaaatttctgcacggaaagctcggtaatcctatcgttccacttaacattagactcttcctcgccaaacttgtgatcaacacggaggaggtgtttcggccctatgcaaagcattggctgagccctctgctgcagctggcagccagcgagaacaatggcggcgagggcattcactatatggtggtggaaatcgtggccaccattctgagctggacggggctggccaccccgaccggcgtgcctaaagacgaagtgctggccaaccggctgctcaattttcttatgaaacacgtgttccatccgaaacgggcagtgtttcgtcacaacctcgagattatcaaaacacttgtggaatgctggaaagactgcttgtctatcccctatcggctgatttttgagaaattttccggcaaggatccaaactccaaagataatagcgtcgggatccagctgttgggcattgttatggccaacgacctcccaccctatgatccacagtgcgggatccaaagctctgagtactttcaggcattggtgaacaatatgagctttgtcagatacaaagaagtatacgccgccgccgccgaagtgctaggactcattctgaggtacgtgatggaacgcaagaacatccttgaagagtccctatgcgagctggtggccaagcagctgaagcagcatcagaatactatggaggacaaatttatcgtctgtcttaataaagtaacaaagtccttcccaccccttgccgatagatttatgaatgccgtgttctttctgctcccaaagttccacggcgtactgaagacactgtgcttagaagtcgtgctgtgcagagtggagggcatgacggagctgtacttccaactgaaatctaaggactttgtgcaggttatgcgacaccgcgatgacgaaagacagaaggtgtgcctggacataatctataagatgatgcctaaactgaaaccggttgaactccgggaactgctgaaccctgtggtggagttcgtgtcccacccctcaactacctgtagagagcagatgtacaatattttgatgtggatacatgacaattaccgggaccctgagtccgagaccgacaatgatagtcaggaaatcttcaagttggccaaggacgtgctcattcaaggccttatcgacgagaatccaggtctgcagttaatcatccgaaacttctggagtcacgagacccgtctgccctccaatactctcgatagactcctggctctaaattctctctattcacctaaaattgaagtgcacttcttgtccctcgctacaaatttcctcctcgaaatgacttccatgtcccctgattaccccaaccccatgtttgaacaccccctgagcgaatgcgaatttcaggagtacactatcgactcggactggaggttccggtccaccgtgctaactccgatgtttgtagagacccaagcctcgcagggcaccctgcaaaccaggacgcaggaaggcagcctctccgctcgctggcccgttgctggccagattcgagccacccaacagcagcacgacttcacgttgacccagaccgccgacggccggtctagtttcgactggttaactggctctagtactgatcccctggtcgaccacacaagtccatcttccgatagcctgttgttcgcccataagagatcggagcggctgcagcgcgccccgctgaagtccgtcggacctgatttcggcaagaaacggctggggttgccgggagatgaagttgataacaaggtcaaaggcgccgcgggccgaactgacctgttgagactccgacggcggttcatgcgagaccaggaaaaattgagtctgatgtacgccagaaagggagtggcagagcagaagcgcgaaaaggagatcaagtctgaattgaagatgaaacaggacgcccaggtcgtgctttaccgctcataccgtcatggagatctgcctgacatccagattaaacactctagtctcatcacccctttgcaagcagttgcacagcgtgaccctatcatcgcgaaacagttattttcctctctgttctcaggaatcttgaaagagatggataagtttaaaaccctgagtgaaaaaaacaatatcacccagaagttgctgcaggattttaaccgttttttgaatacgactttttcatttttcccacccttcgtttcgtgcatccaagatatctcctgccagcacgctgccttgctgagcctggaccccgctgctgtcagtgccgggtgtctagcaagcctgcagcagcccgtagggatcagactgctggaggaagctctactaaggctcctacccgccgagctccccgctaaacgagtgagagggaaggcccgactccccccggacgtacttcggtgggttgaacttgcaaagctctataggtccattggtgagtacgatgtcctccgtggcattttcacgtccgagatcggtaccaagcagattacacaatctgctctgctggcagaagcccggtctgactactccgaagctgccaaacagtatgatgaggccttgaataaacaagactgggtggatggagaacctacggaggctgaaaaggacttttgggagctggctagcctcgattgctataaccacttagccgaatggaagtccttggaatattgcagcactgcatcaatcgacagcgagaacccccccgacctaaataagatatggagtgagccattctaccaggaaacctatctaccatacatgattcggagcaagttgaaactgctcctccagggggaagctgaccagtctctgctcacctttatcgataaggccatgcatggggagttacaaaaggccatcttggagcttcactacagccaggaattgtctctgctgtacctcctgcaggatgacgtcgatcgcgccaagtattacattcagaacggtatccagagcttcatgcagaattactcctcgattgacgtcctccttcatcagagtcggctgaccaaattgcagtctgttcaagccctgacggaaatccaagaattcatatcattcataagtaagcaggggaacttgtcatcgcaagttcctttaaagcgattacttaatacctggaccaaccgatacccagacgcgaaaatggacccaatgaacatatgggacgacatcataacaaatcgttgtttcttcctaagcaagatcgaagagaaactgacccctctgcccgaagacaattcgatgaacgtggaccaggacggcgaccccagtgatcggatggaggtgcaggagcaggaagaggatattagttccctgatccgatcttgtaaatttagtatgaagatgaagatgattgatagcgcaagaaaacaaaacaacttttccctggccatgaaactattgaaggaactgcataaggagtctaagacgcgggacgattggttggtttcttgggtacagtcatactgcaggctctcccattgtcgaagcagaagtcaagggtgctccgaacaggtgttgacagtacttaagaccgtctcattgctcgacgagaataacgtcagttcctacctcagcaaaaacatcttagcatttagagatcagaacatcttgctgggtaccacctataggatcatcgcgaacgccctgagcagtgagccggcatgccttgccgaaattgaagaggacaaggcccgtcggatcctcgaactgtccgggagctcatcagaggatagcgaaaaagtgatcgccggcctttaccagcgtgctttccaacatctctcagaagctgttcaagccgcggaggaggaggcccagccaccgtcttggtcttgtggacctgctgccggtgttatcgacgcgtacatgacactggccgacttttgcgaccagcagctccgcaaggaagaggagaatgcgtctgtaattgactcagccgaactccaggcatatcccgcgctggtcgtagaaaagatgttgaaagccctgaaacttaacagcaacgaggccaggcttaagttcccccgcctgctgcaaataattgagagatatccagaagagacattgtcattgatgacgaaagaaatatcctccgttccgtgttggcaattcattagctggattagtcacatggttgccctcctcgacaaagatcaggccgttgctgttcagcacagcgtggaagagattaccgataactacccacaggccatcgtatatccgttcatcattagttcagagtcatatagctttaaagacacctcgacgggccacaaaaacaaggagtttgtggccaggatcaagagcaaactagaccagggaggggtgatccaggactttatcaatgcacttgatcagctgagtaatcctgagctcctttttaaggactggagcaatgatgtcagggctgagctggccaaaacccccgtaaacaagaaaaatatagagaagatgtacgagcgcatgtacgccgctcttggcgaccctaaagcgcccggacttggcgccttcaggcggaagttcattcagaccttcggaaaggagttcgacaagcacttcggaaagggcggatcgaaactcctgcggatgaagcttagcgatttcaacgacattacaaatatgttgctcctgaagatgaacaaggatagtaagcctcccgggaacctcaaggaatgtagcccctggatgtcggatttcaaagtcgaattccttaggaatgaactcgaaatccctgggcagtacgatggccggggcaaacccctgcctgagtaccacgtgaggattgccgggttcgatgagcgggtcacagtgatggctagcctccggaggccaaaacgtataataatccgaggtcacgatgaacgtgaacatccattcctcgtcaagggcggcgaggatctcagacaagatcagcgagtggaacaattgtttcaggtgatgaatggcattttggcccaggacagcgcctgtagccagcgtgccctgcagctacggacatacagcgtcgttcctatgacctcttccgaccctcgcgccccaccctgtgaatataaggattggctcactaaaatgtctgggaaacatgatgtgggcgcatacatgctgatgtacaagggagcaaatcgaacagaaacagtgacctcattccggaaacgagaatcaaaggttccagcggacttactcaagagggcctttgttcggatgtcaacctctccagaggcctttctcgccttacggagccattttgccagcagccacgcccttatttgcatctcccactggatcctgggcattggagaccgacacctaaacaatttcatggtcgcaatggagaccggcggcgtgatagggattgacttcgggcatgcatttggaagcgcaacccaatttctccctgtccctgaattgatgcctttccggcttacccggcagttcatcaacttaatgctcccaatgaaagagaccgggttaatgtactcaatcatggtccatgcgctgcgagcattcaggtccgatccaggcctgttaacgaacaccatggacgtgtttgttaaagagccttccttcgactggaaaaactttgaacagaaaatgctgaagaaaggaggcagttggattcaagaaataaacgtggccgagaagaactggtacccacgccagaaaatttgttacgcgaaacgtaagctggcaggagctaacccagctgtgatcacttgcgatgaactgctacttggacatgagaaagccccagccttccgtgactatgtggcagttgcgcggggctcaaaagatcacaacatccgcgcacaagagcctgaatccgggcttagtgaggagactcaggtgaagtgtctgatggaccaggcaaccgatccaaatatcctcgggaggacatgggagggctgggagccctggatgtag

SEQ ID NO: 37244 - DNA, 12291 bp, Artificial Sequence
  derived and/or modified sequence
atggctgggagcggcgcaggcgttcggtgttcgcttcttcggctacaggagactttaagcgcagcagataggtgcggcgcagctttggctggccatcaactcattcggggactgggccaagaatgtgttctgtcttcttccccagcggtgctagccctgcagacatccctagtgttcagccgagactttggcctgcttgttttcgttaggaagtctctgaacagcatcgagttcagggagtgtcgagaagagatcctgaagtttctctgcatctttttggaaaaaatgggacagaagatcgcaccttattcggtagagatcaaaaacacctgcacctctgtgtataccaaggaccgtgcagccaagtgtaagatacccgctctggatctgctcatcaagcttctccagacatttagatcgtctcgacttatggacgagttcaaaattggcgagcttttcagtaaattctacggagagttggccttaaaaaaaaaaatccccgataccgtgctggaaaaggtgtatgagttgctgggattgctgggggaggtgcacccgagcgagatgataaacaatgccgaaaatctattcagagcgtttctgggagaactcaaaacacaaatgactagcgcagtgagggaaccgaagctgcctgtgctggcgggatgtctgaagggtctgtcctccttgctctgcaacttcacaaagtctatggaagaggatccacagacttcacgagagatcttcaacttcgttctgaaagctatccgaccgcaaatagatctgaaaagatacgcggtaccctccgctggactccgccttttcgcactccacgcttcacagttctccacatgtctgctggataattacgtgagtctttttgaggtgcttctcaaatggtgtgcccacacgaatgtggagctgaagaaagctgcgctctccgccttagaaagcttcctaaagcaagtgtccaatatggtagctaagaacgcggagatgcacaagaataagctgcagtattttatggagcagttctatgggataatccgtaatgtcgacagcaataacaaagaactctcaatagcgatccgcggatatggacttttcgcaggtccctgcaaggtcatcaatgccaaagatgtggacttcatgtacgtcgaactgattcagcgttgtaaacagatgtttctgacacagacagataccggcgatgacagagtgtaccaaatgccaagttttctgcagagcgtggcgtccgtgctcttatacctcgacacagtgccagaggtttatacccccgttctggaacacctggtggtgatgcagattgatagtttccctcagtactcgcctaaaatgcaactcgtctgctgtagagccattgtgaaggtgttcctggccctggccgctaaagggccagtgctgcggaattgcatttccactgtggtgcaccaaggcctgatccggatttgctctaagcccgtggtgctccctaaaggcccagaatccgaatcagaggaccaccgcgcatccggggaggtccgcacaggcaagtggaaggttccgacatacaaagactacgtggatttgttccgacatctcttaagctccgaccaaatgatggattctatcctggcggacgaggcttttttcagcgtaaacagctctagcgagagtctgaatcacttattgtacgatgagttcgtaaaaagcgtactgaaaattgtcgaaaagctggatctgacgcttgaaatccagaccgtcggcgagcaggagaatggcgacgaagcaccaggcgtttggatgattcccacatctgaccctgctgcaaatttgcacccggcaaagccaaaagacttttctgcctttataaacctcgtggagttctgtcgggagatcctccctgagaagcaagccgagttcttcgaaccgtgggtttactcatttagctacgagctcatcctccagtcaactcggctgccactgatctcagggttctataaacttctgtcaatcacggtgcgaaacgcaaagaaaataaaatacttcgagggagtaagtccgaaaagcttaaagcactctcctgaggaccctgaaaaatactcttgtttcgccctgtttgtgaagtttgggaaggaggtagctgtcaagatgaagcagtataaggacgagctcttggcgtcctgtttgacgttcctcctgtcactacctcacaacattatcgaacttgatgtgcgggcttatgtgccggcactgcaaatggcctttaagttggggctgagctacacacctcttgccgaggtcggtctcaacgccctggaagagtggtccatatacattgatcgccatgtcatgcaaccatattacaaagacatcctcccctgcctggacggttacttaaagacctctgcactcagtgacgaaactaaaaacaactgggaagtgagcgcactgtcgagagccgctcagaaaggattcaacaaggttgtgttgaaacatttgaaaaaaacaaagaatctgagcagtaatgaggctatttccctggaggagatacgaatcagggttgtccaaatgctcggttctctaggtggccagatcaataagaacctcctaacggtgaccagttcagatgaaatgatgaagagttacgtggcttgggacagagagaaaaggcttagctttgccgtgccgtttcgagagatgaagcccgttatcttcctcgacgtgttcctgccccgtgtcacagaactggccctgacagctagtgatcgccaaacaaaggtggcggcttgcgaacttctgcacagcatggtgatgttcatgctgggcaaagcaactcagatgcctgaggggggtcagggggctccccctatgtatcagctgtacaaacgtactttcccggtcctcctgaggctggcctgcgatgttgaccaggttactagacagctctacgaaccgttggtgatgcaactgattcattggtttactaacaataaaaaattcgagagccaggataccgtcgccttgcttgaggccatacttgacgggatcgtcgacccagttgatagcaccctgcgggacttctgtggcaggtgtattagagaatttctgaagtggagcattaaacagatcacaccacagcagcaagagaagagccctgtgaacacgaaatcactctttaaacggttatactccctggctttgcacccaaacgcctttaaacgcttgggcgcttctttggcattcaacaacatttatagagaattcagggaagaggagagtttagttgaacaattcgtattcgaagctctcgtcatatacatggagagcttagctctggcacatgccgatgagaagtctctgggaacaattcaacaatgttgtgacgctatagaccatctttgtaggattattgaaaaaaaacacgtgtctttgaataaggcaaagaaaagacggctgccaagaggctttccaccctcagcatctttgtgtctcctcgacctggtgaagtggcttctggcacactgtggacgtccacagactgagtgcaggcacaaaagtatagagctgttctataaatttgtccccctattacctgggaaccgcagccctaacctgtggctgaaggacgtcttaaaggaggaaggagtcagctttctgattaacacatttgaaggaggcggttgcggtcaaccatccggcatcctagcccagccaaccctgctgtatcggggacccttctccctgcaggccacgttgtgctggttggacctactgctggctgccctggaatgttacaatacattcattggggagcgaacggtgggcgctctccaggtgttgggcaccgaagcccagtcgtccttgctcaaggccgtggcttttttcttggaatccatcgctatgcatgacatcatcgctgccgagaaatgctttggcacgggcgcagctggcaaccgcaccagcccccaggagggagaacggtataactactcgaaatgcaccgtcgtcgtccgcatcatggaatttaccacaacacttctcaatactagcccggaggggtggaagttgctaaagaaggacctctgtaacacccaccttatgagagtgttggttcagactctgtgtgagcctgcttcaatcgggtttaacataggcgacgttcaagtcatggcccacttgccagacgtgtgtgtcaaccttatgaaagctctgaagatgagcccatacaaggatatcctggagacccacttgcgcgaaaaaattaccgcccagtctattgaggagctgtgcgccgttaatctctacggccctgacgcccaggtcgaccgcagtcgtttagccgctgtggtgtcagcttgcaagcagctgcaccgcgctggcttgctgcacaacatcctgccatcccaatccaccgatctccaccattccgttggtactgagctcctatccctggtgtacaaagggatagcgccaggagatgagcgccagtgcttgccctcgctagatctctcctgtaagcaactggcaagcggcctgttagagcttgcctttgcctttggcggtttatgcgagagactggtctccctcttacttaaccccgcagtcctgtccaccgcaagcctgggtagctcccagggttcagtgatccactttagccatggcgaatatttttactccctgtttagtgagaccattaacacggaactgcttaagaatctggatctggcggtgctagagctgatgcagagctcggttgacaatacaaaaatggtgtcagccgttctgaacggaatgctcgaccagagctttagggaacgcgcaaatcagaagcatcaaggcctgaaactcgccactacaatattgcaacactggaaaaaatgtgattcgtggtgggccaaagacagccctctggagactaagatggctgtcctggccctgctcgccaagattctgcagattgattccagtgtttcgttcaacacctctcacgggagctttcctgaagtgttcaccacttacatcagtctgcttgccgacaccaaactcgacctgcacctgaaaggtcaggcagtgaccctgcttccattcttcacatctctgaccggcggtagtttggaggaactaaggagagtgctggaacagctgattgtggcccactttcctatgcagtctagggagtttcctccaggcacccctaggtttaacaactacgtagattgtatgaagaagtttttagatgcactggaactcagtcagagtccaatgctgttggagctgatgacagaggtgctatgtcgggagcagcagcatgtcatggaggagctgtttcagagctcgtttcgaaggatcgcaaggagaggctcctgcgtgacccaggtgggtctcttggagagcgtgtacgagatgtttcgaaaagacgatcccagactgtcctttacccgacagtcattcgtagaccgctccctgctaacgcttttatggcattgtagcctggatgctttgcgcgagttcttttcaacaatagtggttgacgctatcgacgtcttgaagtctagattcacaaagttgaacgagtctacgttcgacacgcaaatcaccaagaagatggggtactataaaatacttgacgtcatgtactcgcgccttccaaaggacgatgtgcatgctaaggaatctaaaataaaccaggtgttccatgggtcttgcattacagagggaaatgaattgaccaagaccctaatcaaactgtgttacgatgcatttaccgaaaacatggctggggagaatcagctactggagcgccgacgcctataccactgtgctgcttacaactgcgccatttccgtgatttgttgcgtttttaacgagttgaaattctaccaagggtttctcttctcagaaaaacctgagaaaaatctgctgatatttgagaatctcatcgatttaaagcgtcgctataacttcccggtggaggtcgaggtgcccatggagcgcaaaaagaaatatatcgaaataaggaaggaagccagggaagccgctaacggggactcagacggtccaagttatatgagcagcctgtcttacctggcagacagcacactatctgaggaaatgtctcaattcgacttctctactggggtccagtcttattcatactctagccaggatcccaggccagccaccggaagattccgccgacgcgagcagcgggacccaacagtgcatgatgatgtgctcgaattggaaatggatgagctgaatcggcacgaatgtatggctcccctgacagcactggtaaaacatatgcacagaagcctgggcccaccacagggagaggaagactcggttcccagagacctaccttcatggatgaaatttctgcatggaaaactggggaaccccatcgttcccttgaatatcagactcttcctcgccaagctcgtcataaacacagaagaagttttccgcccttacgccaaacattggttgtcgccactcttacagctcgccgcatccgagaataacggcggtgagggaattcactatatggtagttgaaatagtggctactatcctcagctggacgggcttagccacacccacaggtgtccccaaggatgaagtgttggcgaatcgcctcctaaattttctgatgaagcatgtattccatcccaagagggccgtgtttcggcataacctcgaaatcatcaagaccctggtcgaatgctggaaggactgcctgagcataccttacagactgattttcgagaaatttagcggaaaggacccaaactccaaggataattccgtaggcatccagctcctaggcattgtaatggccaacgacctacccccatatgacccgcagtgtggtatccagtccagcgaatattttcaagcactagttaataatatgtcatttgttagatataaggaagtgtacgccgctgccgcagaggtgctaggccttatcctcaggtacgtgatggagcgcaaaaatattttagaggagagcctctgcgaacttgtggccaaacagttgaaacagcaccagaatacaatggaagataaattcattgtatgcctgaataaggtgacaaagtctttcccacccttggctgatcgatttatgaacgctgtgtttttcttgctgcccaagtttcacggcgtgctgaaaactctctgcttagaagtagtcctgtgccgtgtggagggaatgaccgagctctactttcaactgaaatccaaggacttcgtccaggtgatgaggcatagggatgatgaacggcagaaggtgtgtttagatatcatctataagatgatgcccaaacttaagcctgtcgagctgagagagctgctcaaccccgtcgtcgaattcgtcagccacccgagtacaacttgcagagagcagatgtacaatatcttgatgtggatccacgataattatagggatcctgagagtgaaacggacaatgactcccaggaaatatttaaactggcaaaggatgtacttattcagggcctgattgacgagaaccccggattgcagctcatcataaggaacttttggtcccatgagacgcgtctccctagcaacaccctggataggttacttgcactgaatagcctttacagcccaaaaatcgaggtgcactttttgtctctagccaccaacttcctgttagaaatgacctccatgtctccagattatcccaaccccatgttcgagcaccccctgtcagaatgtgagttccaggagtacactatcgatagcgattggcgattcaggtcgacagttctaacacctatgttcgtcgagacccaggcctcacagggaactctccaaaccaggacacaagaaggatccctgagtgctcggtggcccgtggccggtcagattcgggcaacacagcagcaacatgatttcacactaacacagacggccgatggcagatcttcctttgattggttaacggggtcatcgacggatcctctggtggaccacacgagcccaagttcggactcacttctgttcgctcacaagcgtagcgaaaggctgcagagagccccactgaaatccgtggggccagacttcggcaagaagagactgggtctgcccggtgatgaggtggataacaaagtgaagggagcagctgggagaactgacctgctgagacttcgtaggagatttatgcgcgatcaagagaaactatctcttatgtatgcccgtaaaggtgtggctgaacagaaacgggagaaggaaattaagtctgaattaaagatgaagcaagacgcccaggtggtactgtatagatcttatcgccacggtgacctccctgacatccaaataaaacattcttcccttattactccactgcaggccgtggcacagcgcgaccccattattgccaagcagttgttctcatctctcttttcaggaatcttgaaagagatggacaagtttaagacactgtcagagaagaataacattactcagaagttgctccaggatttcaatcgtttcctcaacaccaccttttccttcttccctccctttgtatcatgcatccaagacatctcttgtcaacatgctgccctccttagtctggaccccgcagcagtgagtgcaggatgcttagctagcctgcagcagcccgtcggaatacgcttgttggaggaggccctgctccggctcttgcccgctgagctaccagccaaaagagtgagaggcaaagctcgcctgcccccagatgtactgcgctgggtagaactcgccaaactgtacaggtctattggggaatacgatgtgctgagaggcatttttaccagcgaaattggcaccaagcagatcacccaaagcgctttgttggccgaggccagatctgattatagtgaggcagcaaaacaatacgacgaggctctgaacaagcaggattgggttgacggggaacccaccgaggccgagaaggacttctgggagctcgctagtttggactgctacaaccatttggcagaatggaagtccctcgagtattgcagcacggctagcatcgactctgagaaccccccagacctcaataaaatctggtccgagcctttctaccaggaaacttacctgccgtacatgatcaggagcaaactcaagctcttactccagggtgaagctgatcagtccctgctaaccttcattgacaaagcaatgcacggagagttacaaaaagctatcctggaactccactactctcaggaactcagcctgctctacctgttacaggatgacgttgatcgggcaaaatactacatccagaatggaatccagtcatttatgcagaactatagctctattgacgtgctgttgcatcagagtagactgaccaaactgcagtccgtgcaggcgctgacggagattcaggaattcatatcatttattagcaaacaggggaacctctctagtcaagtgccactcaaacgtttgctgaatacatggactaaccggtatcctgacgcaaagatggatccaatgaatatctgggacgacatcatcacgaatagatgtttcttcctctctaaaatagaggagaagctcacccctctcccagaggacaattcaatgaacgtggaccaagatggtgacccgtctgaccgcatggaagtgcaagaacaggaagaagatataagttctttaatccgcagttgcaaattttcaatgaaaatgaagatgatagactcggcgcgaaagcaaaataacttctctctggccatgaaattactcaaagaactgcacaaagagtcgaagacacgcgacgactggcttgtcagctgggtccagtcctactgccggctttcacactgtcgatcacgctcgcagggttgttctgaacaggtcctgaccgtgctaaaaactgtgagcttgctggacgagaacaacgtgtcttcctatctgtcaaagaacatattagcattccgcgatcaaaacatactgcttggtaccacataccggatcatcgcgaatgcattgtcaagcgaaccggcatgcctagccgaaatcgaggaggacaaagcgcgaagaatcttggagctctccgggtctagctccgaggactccgagaaagtgatagcagggctgtatcaacgggcatttcagcatctttcagaggcggtgcaagcagcggaggaggaggctcagcctccatcctggagctgcgggccagccgctggggtgattgatgcgtacatgacattagccgatttctgcgaccagcaactccgcaaggaagaggaaaacgcttcagtcattgattcagccgagctacaggcataccccgcactggttgtggagaaaatgctcaaagctctcaaactcaatagcaacgaggccaggctcaaattcccacggttactgcagatcattgaacggtaccccgaggagacactgtctctaatgacaaaggaaatctcaagcgttccctgctggcaattcatttcttggataagtcatatggtggccctactcgacaaggatcaggctgtagcagtgcagcattcagtggaagagatcactgacaactatccccaagctatagtgtacccctttattatatcttctgaatcttatagctttaaagacacaagcacagggcataagaacaaggaatttgtcgctcggattaagtctaagttggatcaggggggtgtgatacaggatttcatcaacgcccttgaccagcttagcaacccggaactgctcttcaaagactggagtaacgacgtgcgagccgagctagcgaagactcctgtcaataaaaaaaacattgagaaaatgtatgagcgcatgtacgccgctctgggcgaccccaaggcgccaggcctgggcgcattccgccgtaagtttatccaaacatttgggaaagagtttgacaagcacttcggaaaaggcggttccaagctactgcggatgaagttaagcgattttaacgatatcaccaacatgctgttgctcaaaatgaataaggacagtaagccaccgggaaatctgaaagaatgctctccatggatgtcagattttaaagttgagttcctgcggaatgaactggagatcccgggacagtacgatggtcggggaaaaccacttcctgagtaccatgttcgcattgccggattcgatgaaagggtgactgttatggcatctctgcggcgacccaaacgcattatcattcggggtcacgacgagagagaacaccccttcctggtgaaggggggagaggatctgaggcaagaccagcgggtggaacagctgttccaggtaatgaacggaatcctagcccaagacagtgcatgctctcaacgtgcactgcaactgaggacctacagcgttgttccaatgacaagcagcgatcccagagcgccaccatgcgagtacaaggattggctgaccaagatgtccggtaagcatgacgtgggagcctacatgctgatgtataagggggctaataggactgaaacggtgacatcattccggaagagagagagtaaggtaccagccgacttgcttaagagagccttcgttaggatgagcacatctcccgaggcattcttggccctgcgttcccactttgcaagctcccacgccttaatctgtatttctcattggattcttggcattggcgaccggcacctgaataattttatggtggctatggagactgggggtgtgatcggcatagactttggccacgccttcggcagcgcaacacagtttctgcccgtgcctgagctgatgccctttcgtttaaccagacagttcattaatctcatgttacctatgaaagaaaccgggttgatgtacagcattatggtacatgcactccgggcattccgatcagatccgggtctgttaacaaacactatggacgtgttcgtcaaagaaccctcttttgactggaagaattttgaacagaagatgctgaagaaggggggatcttggatccaagagattaatgtggccgaaaaaaattggtacccacgccagaagatttgctatgctaaaagaaagctggccggtgccaacccagccgtgatcacctgcgatgagttattgctcgggcacgaaaaggccccagcttttagagactacgtggccgtggccagggggtctaaagatcataacattagggcacaggagcccgagagcggcctgtccgaagaaacgcaggtcaagtgccttatggaccaggccactgaccccaatatactgggcagaacgtgggagggttgggaaccttggatgtac

SEQ ID NO: 37245 - DNA, 13413 bp, Artificial Sequence
  derived and/or modified sequence
ggggcatttccgggtccgggccgagcgggcgcacgcgcgggagcgggactcggcggcatggcgggctccggagccggtgtgcgttgctccctgctgcggctgcaggagaccttgtccgctgcggaccgctgcggtgctgccctggccggtcatcaactgatccgcggcctggggcaggaatgcgtcctgagcagcagccccgcggtgctggcattacagacatctttagttttttccagagatttcggtttgcttgtatttgtccggaagtcactcaacagtattgaatttcgtgaatgtagagaagaaatcctaaagtttttatgtattttcttagaaaaaatgggccagaagatcgcaccttactctgttgaaattaagaacacttgtaccagtgtttatacaaaagatagagctgctaaatgtaaaattccagccctggaccttcttattaagttacttcagacttttagaagttctagactcatggatgaatttaaaattggagaattatttagtaaattctatggagaacttgcattgaaaaaaaaaataccagatacagttttagaaaaagtatatgagctcctaggattattgggtgaagttcatcctagtgagatgataaataatgcagaaaacctgttccgcgcttttctgggtgaacttaagacccagatgacatcagcagtaagagagcccaaactacctgttctggcaggatgtctgaaggggttgtcctcacttctgtgcaacttcactaagtccatggaagaagatccccagacttcaagggagatttttaattttgtactaaaggcaattcgtcctcagattgatctgaagagatatgctgtgccctcagctggcttgcgcctatttgccctgcatgcatctcagtttagcacctgccttctggacaactacgtgtctctatttgaagtcttgttaaagtggtgtgcccacacaaatgtagaattgaaaaaagctgcactttcagccctggaatcctttctgaaacaggtttctaatatggtggcgaaaaatgcagaaatgcataaaaataaactgcagtactttatggagcagttttatggaatcatcagaaatgtggattcgaacaacaaggagttatctattgctatccgtggatatggactttttgcaggaccgtgcaaggttataaacgcaaaagatgttgacttcatgtacgttgagctcattcagcgctgcaagcagatgttcctcacccagacagacactggtgacgaccgtgtttatcagatgccaagcttcctccagtctgttgcaagcgtcttgctgtaccttgacacagttcctgaggtgtatactccagttctggagcacctcgtggtgatgcagatagacagtttcccacagtacagtccaaaaatgcagctggtgtgttgcagagccatagtgaaggtgttcctagctttggcagcaaaagggccagttctcaggaattgcattagtactgtggtgcatcagggtttaatcagaatatgttctaaaccagtggtccttccaaagggccctgagtctgaatctgaagaccaccgtgcttcaggggaagtcagaactggcaaatggaaggtgcccacatacaaagactacgtggatctcttcagacatctcctgagctctgaccagatgatggattctattttagcagatgaagcatttttctctgtgaattcctccagtgaaagtctgaatcatttactttatgatgaatttgtaaaatccgttttgaagattgttgagaaattggatcttacacttgaaatacagactgttggggaacaagagaatggagatgaggcgcctggtgtttggatgatcccaacttcagatccagcggctaacttgcatccagctaaacctaaagatttttcggctttcattaacctggtggaattttgcagagagattctccctgagaaacaagcagaattttttgaaccatgggtgtactcattttcatatgaattaattttgcaatctacaaggttgcccctcatcagtggtttctacaaattgctttctattacagtaagaaatgccaagaaaataaaatatttcgagggagttagtccaaagagtctgaaacactctcctgaagacccagaaaagtattcttgctttgctttatttgtgaaatttggcaaagaggtggcagttaaaatgaagcagtacaaagatgaacttttggcctcttgtttgacctttcttctgtccttgccacacaacatcattgaactcgatgttagagcctacgttcctgcactgcagatggctttcaaactgggcctgagctatacccccttggcagaagtaggcctgaatgctctagaagaatggtcaatttatattgacagacatgtaatgcagccttattacaaagacattctcccctgcctggatggatacctgaagacttcagccttgtcagatgagaccaagaataactgggaagtgtcagctctttctcgggctgcccagaaaggatttaataaagtggtgttaaagcatctgaagaagacaaagaacctttcatcaaacgaagcaatatccttagaagaaataagaattagagtagtacaaatgcttggatctctaggaggacaaataaacaaaaatcttctgacagtcacgtcctcagatgagatgatgaagagctatgtggcctgggacagagagaagcggctgagctttgcagtgccctttagagagatgaaacctgtcattttcctggatgtgttcctgcctcgagtcacagaattagcgctcacagccagtgacagacaaactaaagttgcagcctgtgaacttttacatagcatggttatgtttatgttgggcaaagccacgcagatgccagaagggggacagggagccccacccatgtaccagctctataagcggacgtttcctgtgctgcttcgacttgcgtgtgatgttgatcaggtgacaaggcaactgtatgagccactagttatgcagctgattcactggttcactaacaacaagaaatttgaaagtcaggatactgttgccttactagaagctatattggatggaattgtggaccctgttgacagtactttaagagatttttgtggtcggtgtattcgagaattccttaaatggtccattaagcaaataacaccacagcagcaggagaagagtccagtaaacaccaaatcgcttttcaagcgactttatagccttgcgcttcaccccaatgctttcaagaggctgggagcatcacttgcctttaataatatctacagggaattcagggaagaagagtctctggtggaacagtttgtgtttgaagccttggtgatatacatggagagtctggccttagcacatgcagatgagaagtccttaggtacaattcaacagtgttgtgatgccattgatcacctatgccgcatcattgaaaagaagcatgtttctttaaataaagcaaagaaacgacgtttgccgcgaggatttccaccttccgcatcattgtgtttattggatctggtcaagtggcttttagctcattgtgggaggccccagacagaatgtcgacacaaatccattgaactcttttataaattcgttcctttattgccaggcaacagatcccctaatttgtggctgaaagatgttctcaaggaagaaggtgtctcttttctcatcaacacctttgaggggggtggctgtggccagccctcgggcatcctggcccagcccaccctcttgtaccgggggccattcagcctgcaggccacgctatgctggctggacctgctcctggccgcgttggagtgctacaacacgttcattggcgagagaactgtaggagcgctccaggtcctaggtactgaagcccagtcttcacttttgaaagcagtggctttcttcttagaaagcattgccatgcatgacattatagcagcagaaaagtgctttggcactggggcagcaggtaacagaacaagcccacaagagggagaaaggtacaactacagcaaatgcaccgttgtggtccggattatggagtttaccacgactctgctaaacacctccccggaaggatggaagctcctgaagaaggacttgtgtaatacacacctgatgagagtcctggtgcagacgctgtgtgagcccgcaagcataggtttcaacatcggagacgtccaggttatggctcatcttcctgatgtttgtgtgaatctgatgaaagctctaaagatgtccccatacaaagatatcctagagacccatctgagagagaaaataacagcacagagcattgaggagctttgtgccgtcaacttgtatggccctgacgcgcaagtggacaggagcaggctggctgctgttgtgtctgcctgtaaacagcttcacagagctgggcttctgcataatatattaccgtctcagtccacagatttgcatcattctgttggcacagaacttctttccctggtttataaaggcattgcccctggagatgagagacagtgtctgccttctctagacctcagttgtaagcagctggccagcggacttctggagttagcctttgcttttggaggactgtgtgagcgccttgtgagtcttctcctgaacccagcggtgctgtccacggcgtccttgggcagctcacagggcagcgtcatccacttctcccatggggagtatttctatagcttgttctcagaaacgatcaacacggaattattgaaaaatctggatcttgctgtattggagctcatgcagtcttcagtggataataccaaaatggtgagtgccgttttgaacggcatgttagaccagagcttcagggagcgagcaaaccagaaacaccaaggactgaaacttgcgactacaattctgcaacactggaagaagtgtgattcatggtgggccaaagattcccctctcgaaactaaaatggcagtgctggccttactggcaaaaattttacagattgattcatctgtatcttttaatacaagtcatggttcattccctgaagtctttacaacatatattagtctacttgctgacacaaagctggatctacatttaaagggccaagctgtcactcttcttccattcttcaccagcctcactggaggcagtctggaggaacttagacgtgttctggagcagctcatcgttgctcacttccccatgcagtccagggaatttcctccaggaactccgcggttcaataattatgtggactgcatgaaaaagtttctagatgcattggaattatctcaaagccctatgttgttggaattgatgacagaagttctttgtcgggaacagcagcatgtcatggaagaattatttcaatccagtttcaggaggattgccagaaggggttcatgtgtcacacaagtaggccttctggaaagcgtgtatgaaatgttcaggaaggatgacccccgcctaagtttcacacgccagtcctttgtggaccgctccctcctcactctgctgtggcactgtagcctggatgctttgagagaattcttcagcacaattgtggtggatgccattgatgtgttgaagtccaggtttacaaagctaaatgaatctacctttgatactcaaatcaccaagaagatgggctactataagattctagacgtgatgtattctcgccttcccaaagatgatgttcatgctaaggaatcaaaaattaatcaagttttccatggctcgtgtattacagaaggaaatgaacttacaaagacattgattaaattgtgctacgatgcatttacagagaacatggcaggagagaatcagctgctggagaggagaagactttaccattgtgcagcatacaactgcgccatatctgtcatctgctgtgtcttcaatgagttaaaattttaccaaggttttctgtttagtgaaaaaccagaaaagaacttgcttatttttgaaaatctgatcgacctgaagcgccgctataattttcctgtagaagttgaggttcctatggaaagaaagaaaaagtacattgaaattaggaaagaagccagagaagcagcaaatggggattcagatggtccttcctatatgtcttccctgtcatatttggcagacagtaccctgagtgaggaaatgagtcaatttgatttctcaaccggagttcagagctattcatacagctcccaagaccctagacctgccactggtcgttttcggagacgggagcagcgggaccccacggtgcatgatgatgtgctggagctggagatggacgagctcaatcggcatgagtgcatggcgcccctgacggccctggtcaagcacatgcacagaagcctgggcccgcctcaaggagaagaggattcagtgccaagagatcttccttcttggatgaaattcctccatggcaaactgggaaatccaatagtaccattaaatatccgtctcttcttagccaagcttgttattaatacagaagaggtctttcgcccttacgcgaagcactggcttagccccttgctgcagctggctgcttctgaaaacaatggaggagaaggaattcactacatggtggttgagatagtggccactattctttcatggacaggcttggccactccaacaggggtccctaaagatgaagtgttagcaaatcgattgcttaatttcctaatgaaacatgtctttcatccaaaaagagctgtgtttagacacaaccttgaaattataaagacccttgtcgagtgctggaaggattgtttatccatcccttataggttaatatttgaaaagttttccggtaaagatcctaattctaaagacaactcagtagggattcaattgctaggcatcgtgatggccaatgacctgcctccctatgacccacagtgtggcatccagagtagcgaatacttccaggctttggtgaataatatgtcctttgtaagatataaagaagtgtatgccgctgcagcagaagttctaggacttatacttcgatatgttatggagagaaaaaacatactggaggagtctctgtgtgaactggttgcgaaacaattgaagcaacatcagaatactatggaggacaagtttattgtgtgcttgaacaaagtgaccaagagcttccctcctcttgcagacaggttcatgaatgctgtgttctttctgctgccaaaatttcatggagtgttgaaaacactctgtctggaggtggtactttgtcgtgtggagggaatgacagagctgtacttccagttaaagagcaaggacttcgttcaagtcatgagacatagagatgatgaaagacaaaaagtatgtttggacataatttataagatgatgccaaagttaaaaccagtagaactccgagaacttctgaaccccgttgtggaattcgtttcccatccttctacaacatgtagggaacaaatgtataatattctcatgtggattcatgataattacagagatccagaaagtgagacagataatgactcccaggaaatatttaagttggcaaaagatgtgctgattcaaggattgatcgatgagaaccctggacttcaattaattattcgaaatttctggagccatgaaactaggttaccttcaaataccttggaccggttgctggcactaaattccttatattctcctaagatagaagtgcactttttaagtttagcaacaaattttctgctcgaaatgaccagcatgagcccagattatccaaaccccatgttcgagcatcctctgtcagaatgcgaatttcaggaatataccattgattctgattggcgtttccgaagtactgttctcactccgatgtttgtggagacccaggcctcccagggcactctccagacccgtacccaggaagggtccctctcagctcgctggccagtggcagggcagataagggccacccagcagcagcatgacttcacactgacacagactgcagatggaagaagctcatttgattggctgaccgggagcagcactgacccgctggtcgaccacaccagtccctcatctgactccttgctgtttgcccacaagaggagtgaaaggttacagagagcacccttgaagtcagtggggcctgattttgggaaaaaaaggctgggccttccaggggacgaggtggataacaaagtgaaaggtgcggccggccggacggacctactacgactgcgcagacggtttatgagggaccaggagaagctcagtttgatgtatgccagaaaaggcgttgctgagcaaaaacgagagaaggaaatcaagagtgagttaaaaatgaagcaggatgcccaggtcgttctgtacagaagctaccggcacggagaccttcctgacattcagatcaagcacagcagcctcatcaccccgttacaggccgtggcccagagggacccaataattgcaaaacagctctttagcagcttgttttctggaattttgaaagagatggataaatttaagacactgtctgaaaaaaacaacatcactcaaaagttgcttcaagacttcaatcgttttcttaataccaccttctctttctttccaccctttgtctcttgtattcaggacattagctgtcagcacgcagccctgctgagcctcgacccagcggctgttagcgctggttgcctggccagcctacagcagcccgtgggcatccgcctgctagaggaggctctgctccgcctgctgcctgctgagctgcctgccaagcgagtccgtgggaaggcccgcctccctcctgatgtcctcagatgggtggagcttgctaagctgtatagatcaattggagaatacgacgtcctccgtgggatttttaccagtgagataggaacaaagcaaatcactcagagtgcattattagcagaagccagaagtgattattctgaagctgctaagcagtatgatgaggctctcaataaacaagactgggtagatggtgagcccacagaagccgagaaggatttttgggaacttgcatcccttgactgttacaaccaccttgctgagtggaaatcacttgaatactgttctacagccagtatagacagtgagaaccccccagacctaaataaaatctggagtgaaccattttatcaggaaacatatctaccttacatgatccgcagcaagctgaagctgctgctccagggagaggctgaccagtccctgctgacatttattgacaaagctatgcacggggagctccagaaggcgattctagagcttcattacagtcaagagctgagtctgctttacctcctgcaagatgatgttgacagagccaaatattacattcaaaatggcattcagagttttatgcagaattattctagtattgatgtcctcttacaccaaagtagactcaccaaattgcagtctgtacaggctttaacagaaattcaggagttcatcagctttataagcaaacaaggcaatttatcatctcaagttccccttaagagacttctgaacacctggacaaacagatatccagatgctaaaatggacccaatgaacatctgggatgacatcatcacaaatcgatgtttctttctcagcaaaatagaggagaagcttacccctcttccagaagataatagtatgaatgtggatcaagatggagaccccagtgacaggatggaagtgcaagagcaggaagaagatatcagctccctgatcaggagttgcaagttttccatgaaaatgaagatgatagacagtgcccggaagcagaacaatttctcacttgctatgaaactactgaaggagctgcataaagagtcaaaaaccagagacgattggctggtgagctgggtgcagagctactgccgcctgagccactgccggagccggtcccagggctgctctgagcaggtgctcactgtgctgaaaacagtctctttgttggatgagaacaacgtgtcaagctacttaagcaaaaatattctggctttccgtgaccagaacattctcttgggtacaacttacaggatcatagcgaatgctctcagcagtgagccagcctgccttgctgaaatcgaggaggacaaggctagaagaatcttagagctttctggatccagttcagaggattcagagaaggtgatcgcgggtctgtaccagagagcattccagcacctctctgaggctgtgcaggcggctgaggaggaggcccagcctccctcctggagctgtgggcctgcagctggggtgattgatgcttacatgacgctggcagatttctgtgaccaacagctgcgcaaggaggaagagaatgcatcagttattgattctgcagaactgcaggcgtatccagcacttgtggtggagaaaatgttgaaagctttaaaattaaattccaatgaagccagattgaagtttcctagattacttcagattatagaacggtatccagaggagactttgagcctcatgacaaaagagatctcttccgttccctgctggcagttcatcagctggatcagccacatggtggccttactggacaaagaccaagccgttgctgttcagcactctgtggaagaaatcactgataactacccgcaggctattgtttatcccttcatcataagcagcgaaagctattccttcaaggatacttctactggtcataagaataaggagtttgtggcaaggattaaaagtaagttggatcaaggaggagtgattcaagattttattaatgccttagatcagctctctaatcctgaactgctctttaaggattggagcaatgatgtaagagctgaactagcaaaaacccctgtaaataaaaaaaacattgaaaaaatgtatgaaagaatgtatgcagccttgggtgacccaaaggctccaggcctgggggcctttagaaggaagtttattcagacttttggaaaagaatttgataaacattttgggaaaggaggttctaaactactgagaatgaagctcagtgacttcaacgacattaccaacatgctacttttaaaaatgaacaaagactcaaagccccctgggaatctgaaagaatgttcaccctggatgagcgacttcaaagtggagttcctgagaaatgagctggagattcccggtcagtatgacggtaggggaaagccattgccagagtaccacgtgcgaatcgccgggtttgatgagcgggtgacagtcatggcgtctctgcgaaggcccaagcgcatcatcatccgtggccatgacgagagggaacaccctttcctggtgaagggtggcgaggacctgcggcaggaccagcgcgtggagcagctcttccaggtcatgaatgggatcctggcccaagactccgcctgcagccagagggccctgcagctgaggacctatagcgttgtgcccatgacctccagtgatcccagggcaccgccgtgtgaatataaagattggctgacaaaaatgtcaggaaaacatgatgttggagcttacatgctaatgtataagggcgctaatcgtactgaaacagtcacgtcttttagaaaacgagaaagtaaagtgcctgctgatctcttaaagcgggccttcgtgaggatgagtacaagccctgaggctttcctggcgctccgctcccacttcgccagctctcacgctctgatatgcatcagccactggatcctcgggattggagacagacatctgaacaactttatggtggccatggagactggcggcgtgatcgggatcgactttgggcatgcgtttggatccgctacacagtttctgccagtccctgagttgatgccttttcggctaactcgccagtttatcaatctgatgttaccaatgaaagaaacgggccttatgtacagcatcatggtacacgcactccgggccttccgctcagaccctggcctgctcaccaacaccatggatgtgtttgtcaaggagccctcctttgattggaaaaattttgaacagaaaatgctgaaaaaaggagggtcatggattcaagaaataaatgttgctgaaaaaaattggtacccccgacagaaaatatgttacgctaagagaaagttagcaggtgccaatccagcagtcattacttgtgatgagctactcctgggtcatgagaaggcccctgccttcagagactatgtggctgtggcacgaggaagcaaagatcacaacattcgtgcccaagaaccagagagtgggctttcagaagagactcaagtgaagtgcctgatggaccaggcaacagaccccaacatccttggcagaacctgggaaggatgggagccctggatgtgaggtctgtgggagtctgcagatagaaagcattacattgtttaaagaatctactatactttggttggcagcattccatgagctgattttcctgaaacactaaagagaaatgtcttttgtgctacagtttcgtagcatgagtttaaatcaagattatgatgagtaaatgtgtatgggttaaatcaaagataaggttatagtaacatcaaagattaggtgaggtttatagaaagatagatatccaggcttaccaaagtattaagtcaagaatataatatgtgatcagctttcaaagcatttacaagtgctgcaagttagtgaaacagctgtctccgtaaatggaggaaatgtggggaagccttggaatgcccttctggttctggcacattggaaagcacactcagaaggcttcatcaccaagattttgggagagtaaagctaagtatagttgatgtaacattgtagaagcagcataggaacaataagaacaataggtaaagctataattatggcttatatttagaaatgactgcatttgatattttaggatatttttctaggttttttcctttcattttattctcttctagttttgacattttatgatagatttgctctctagaaggaaacgtctttatttaggagggcaaaaattttggtcatagcattcacttttgctattccaatctacaactggaagatacataaaagtgctttgcattgaatttgggataacttcaaaaatcccatggttgttgttagggatagtactaagcatttcagttccaggagaataaaagaaattcctatttgaaatgaattcctcatttggaggaaaaaaagcatgcattctagcacaacaagatgaaattatggaatacaaaagtggctccttcccatgtgcagtccctgtccccccccgccagtcctccacacccaaactgtttctgattggcttttagctttttgttgtttttttttttccttctaacacttgtatttggaggctcttctgtgattttgagaagtatactcttgagtgtttaataaagtttttttccaaaagta

SEQ ID NO: 37246 - protein, 1364 aa, Artificial Sequence
  derived and/or modified sequence
MAQALLVPPGPESFRLFTRESLAAIEKRAAEEKAKKPKKEQDNDDENKPKPNSDLEAGKNLPFIYGDIPPEMVSEPLEDLDPYYINKKTFIVMNKGKAIFRFSATSALYILTPLNPVRKIAIKILVHSLFSMLIMCTILTNCVFMTLSNPPDWTKNVEYTFTGIYTFESLIKILARGFCLEDFTFLRDPWNWLDFSVIVMAYVTEFVDLGNVSALRTFRVLRALKTISVIPGLKTIVGALIQSVKKLSDVMILTVFCLSVFALIGLQLFMGNLRNKCLQWPPSDSAFETNTTSYFNGTMDSNGTFVNVTMSTFNWKDYIGDDSHFYVLDGQKDPLLCGNGSDAGQCPEGYICVKAGRNPNYGYTSFDTFSWAFLSLFRLMTQDYWENLYQLTLRAAGKTYMIFFVLVIFLGSFYLVNLILAVVAMAYEEQNQATLEEAEQKEAEFQQMLEQLKKQQEEAQAVAAASAASRDFSGIGGLGELLESSSEASKLSSKSAKEWRNRRKKRRQREHLEGNNKGERDSFPKSESEDSVKRSSFLFSMDGNRLTSDKKFCSPHQSLLSIRGSLFSPRRNSKTSIFSFRGRAKDVGSENDFADDEHSTFEDSESRRDSLFVPHRHGERRNSNGTTTETEVRKRRLSSYQISMEMLEDSSGRQRAVSIASILTNTMEELEESRQKCPPCWYRFANVFLIWDCCDAWLKVKHLVNLIVMDPFVDLAITICIVLNTLFMAMEHYPMTEQFSSVLTVGNLVFTGIFTAEMVLKIIAMDPYYYFQEGWNIFDGIIVSLSLMELGLSNVEGLSVLRSFRLLRVFKLAKSWPTLNMLIKIIGNSVGALGNLTLVLAIIVFIFAVVGMQLFGKSYKECVCKINDDCTLPRWHMNDFFHSFLIVFRVLCGEWIETMWDCMEVAGQTMCLIVFMLVMVIGNLVVLNLFLALLLSSFSSDNLAATDDDNEMNNLQIAVGRMQKGIDYVKNKMRECFQKAFFRKPKVIEIHEGNKIDSCMSNNTGIEISKELNYLRDGNGTTSGVGTGSSVEKYVIDENDYMSFINNPSLTVTVPIAVGESDFENLNTEEFSSESELEESKEKLNATSSSEGSTVDVVLPREGEQAETEPEEDLKPEACFTEGCIKKFPFCQVSTEEGKGKIWWNLRKTCYSIVEHNWFETFIVFMILLSSGALAFEDIYIEQRKTIKTMLEYADKVFTYIFILEMLLKWVAYGFQTYFTNAWCWLDFLIVDVSLVSLVANALGYSELGAIKSLRTLRALRPLRALSRFEGMRVVVNALVGAIPSIMNVLLVCLIFWLIFSIMGVNLFAGKFYHCVNMTTGNMFDISDVNNLSDCQALGKQARWKNVKVNFDNVGAGYLALLQV

SEQ ID NO: 37247 - DNA, 4095 bp, Artificial Sequence
  derived and/or modified sequence
atggcccaagccctcctggtgccaccagggccggagtcattcaggcttttcacgcgagagtctctcgccgccatagaaaagcgggccgccgaggagaaggccaaaaaaccaaagaaggagcaggacaacgacgacgaaaataagcccaagcctaactctgacctcgaagctgggaaaaatcttccatttatatacggagatatcccccccgaaatggttagcgagccactggaagacctcgatccctactatattaataagaagacattcatcgtgatgaataaggggaaagctatctttcgattttcagcgacatcagccctctatatcctgacgcccctgaatcctgtgagaaagatcgccataaagattctggtgcacagcttatttagcatgttgatcatgtgcacaatcctcaccaactgtgtcttcatgactctttcaaaccccccggactggacaaagaacgtcgagtacaccttcactggaatctacactttcgaatctctcatcaaaatactggcacgaggcttttgccttgaagactttacttttctgcgtgacccatggaactggctggacttttctgtcatagtgatggcctacgtaacagagttcgtagatttgggtaacgtgtccgcactcagaacattcagggtcctgagagctctgaagactatcagtgtgattcctgggttaaagacgatcgtaggagccctcatccagtcagtgaagaaattgagcgacgtgatgatccttacagtcttttgcctgtcagtctttgccctaatcggcttgcaactcttcatgggcaacctgaggaataagtgcctccagtggccacctagcgatagtgcctttgaaactaatacaacaagttacttcaacgggacgatggactcgaacggcacatttgtgaatgttacaatgtcgacgttcaactggaaggactatatcggagacgactctcatttctacgtgctcgacggtcagaaggaccccctcctttgtggcaatggatcagacgctggccagtgtcctgagggctacatctgtgtgaaagctgggaggaaccccaattatgggtataccagtttcgatacattctcctgggcgttcctgagcctctttaggcttatgactcaggactactgggaaaacctgtatcaactgaccttgcgggcagccggaaagacatacatgattttttttgtacttgtgatattcctgggatccttttatttagtgaacctcatcctggccgtggtggctatggcttacgaagaacagaaccaagccaccctggaggaagctgaacagaaggaggctgagttccagcagatgctcgaacaactgaaaaagcagcaagaggaggcccaggccgtagctgccgcttccgctgcttctcgggacttttctggcataggggggctgggcgaactcctggagagctcaagtgaggcctccaagctatcatccaaaagcgcaaaggaatggcgtaatagacgcaaaaagcgcaggcaacgggaacatctggagggtaataacaaaggtgagcgcgactcctttccaaagtcagaatcagaagattcagttaagcgatctagtttcctatttagcatggatggaaatcgccttacatccgacaagaaattctgtagcccacatcagtctttgctgagcattagaggctccctgttctcccctagacggaatagcaaaacatccatcttttcctttaggggtagagcgaaggacgtcgggtctgagaatgatttcgccgacgacgaacatagcacctttgaagattcggagtctcgcagggacagtctttttgtgcctcatcgacacggtgaaagaagaaattctaatgggaccacaacggaaaccgaggtgcggaaacgacggctgagtagctaccagataagcatggagatgttagaagacagttctggccgccagagagcagtgtccatcgccagcattctgacaaacacgatggaagagctggaggagagcaggcaaaaatgcccgccatgctggtaccgattcgccaatgtgttcctgatctgggactgctgcgacgcctggttgaaggtcaaacatctcgttaaccttatcgtgatggacccgttcgtggacctggccataaccatttgtatcgtgctgaacaccctgttcatggccatggaacactatccaatgaccgagcagttctcctcagtgcttacagtaggcaatctggtgttcactggcattttcacagccgagatggtcttaaagattattgcaatggacccctactattatttccaggaaggatggaacattttcgatggaattatagtttcgctgtctctgatggagctcgggctcagcaatgtagaagggttgtctgtgttaaggagttttcggctgcttcgcgtttttaagctcgcaaaatcatggccgaccctgaacatgcttattaaaattattggcaactccgtgggggcgcttggcaatctcacacttgtactagcgataattgtgtttatcttcgccgtggttggtatgcagttgtttggcaaatcttacaaagaatgcgtttgcaagattaacgacgattgtaccctccccaggtggcacatgaatgatttcttccactccttcttaatagtttttagagtgttgtgtggggaatggatcgagacaatgtgggattgtatggaggtggctggccaaaccatgtgcttgatcgtgtttatgctggtgatggtgatcgggaacctggtcgtgttgaacctgttcctggcgttgttactatcttccttttccagcgataatctcgcggctactgacgacgacaacgagatgaacaatttacagatcgccgtcggccggatgcagaaaggcatagattacgtgaagaacaaaatgcgggaatgctttcagaaagctttttttaggaagccaaaggttatagagattcacgagggcaacaaaattgacagctgcatgagcaacaacactggtatagaaatatcaaaagaactgaattaccttagagacggaaatggcactacaagtggtgtgggtaccggatcctctgttgaaaaatatgtgatcgacgaaaacgattacatgagtttcattaacaatccctcccttaccgtgaccgttcccattgctgttggggagagcgacttcgaaaacttaaataccgaagaattcagctcagagtctgagctggaggagagtaaggaaaagcttaacgccacgtcatcctctgagggctcaacagtggatgtggtgctgcccagggagggagaacaggccgaaacggagcctgaggaagacctgaagccagaagcttgcttcacagagggctgcattaagaaattccctttttgccaggtgagcactgaggaaggtaaaggcaagatatggtggaacctccgtaaaacttgctacagcatagttgagcacaactggttcgagacctttatcgtgttcatgattctgctctccagcggagcactcgcattcgaagatatttacattgaacagaggaaaactatcaaaacaatgctcgaatatgcagacaaggtgtttacctatatatttatactggagatgctgcttaaatgggtcgcttatgggtttcagacttatttcaccaacgcctggtgttggctggacttcctaatcgtggacgttagcctagtctcattagtggccaacgcgcttggatactctgagctaggagccatcaagtctcttcgcacgctgagggcgttgcggccactacgagccctctccagattcgagggcatgagagttgttgtgaacgcactcgtgggcgcgattccctctattatgaacgttcttctagtgtgtctgatcttctggctgatctttagcataatgggagtcaatctgtttgctggtaagttctaccactgcgtaaatatgaccactggcaatatgtttgacatctccgatgtgaataacctgtcagactgtcaggccctcggtaagcaggctcgttggaaaaacgtcaaagtaaattttgataacgtcggagcaggttatctcgctttactccaggtgtag

SEQ ID NO: 37248 - DNA, 4095 bp, Artificial Sequence
  derived and/or modified sequence
atggcccaggccctgctggtgcccccaggccctgagagcttccgcctcttcacccgggagagcctggccgccatcgagaagagagctgctgaggagaaggccaagaagcccaagaaggagcaggacaatgatgatgagaacaagcccaagcccaacagcgacctggaggccggcaagaacctgcccttcatctatggagacatccccccagagatggtgtctgagcccctggaggacctggacccctactacatcaacaagaagaccttcatcgtgatgaacaagggcaaggccatcttccgcttcagcgccaccagcgccctgtacatcctgacccccctgaaccctgtgaggaagatcgccatcaagatcctggtgcacagcctcttctccatgctgatcatgtgcaccatcctgaccaactgtgtgttcatgaccctgagcaaccccccagactggaccaagaatgtggagtacaccttcaccggcatctacacctttgagagcctcatcaagatcctggcccggggcttctgcctggaggacttcaccttcctgcgggacccctggaactggctggacttcagcgtcatcgtgatggcctacgtgacagaatttgtggacctgggcaatgtgtctgccctgcggaccttccgggtgctgcgggccctgaagaccatcagcgtcatccctggcctgaagaccatcgtgggcgccctgatccagagcgtgaagaagctgagtgatgtgatgatcctgaccgtcttctgcctgtctgtgtttgccctgattggcctgcagctgttcatgggcaacctgaggaacaagtgcctgcagtggcccccaagtgacagcgcctttgagaccaacaccaccagctacttcaacggcaccatggacagcaatggcacctttgtgaatgtgaccatgagcaccttcaactggaaggactacatcggagatgacagccacttctacgtgctggatggccagaaggaccccctgctgtgtggaaatggaagtgatgctggccagtgcccagagggctacatctgtgtgaaggccggcaggaaccccaactacggctacaccagctttgacaccttctcctgggccttcctgagcctcttccggctgatgacccaggactactgggagaacctgtaccagctgaccctgcgggccgccggcaagacctacatgatcttctttgtgctggtgatcttcctgggcagcttctacctggtgaacctgatcctggccgtggtggccatggcctatgaggagcagaaccaggccaccctggaggaggccgagcagaaggaggccgagttccagcagatgctggagcagctgaagaagcagcaggaggaggcccaggccgtggccgccgccagcgctgccagccgggacttctctggaattggaggcctgggggagctgctggagagcagcagcgaggccagcaagctgagcagcaagagcgccaaggagtggaggaacagaaggaagaagaggcggcagcgggagcacctggagggcaacaacaagggggagcgggacagcttccccaagtctgagagtgaagattctgtgaagaggagcagcttcctgttctccatggatggcaaccggctgaccagtgacaagaagttctgcagcccccaccagagcctgctgagcatccggggcagcctcttcagccccaggaggaacagcaagaccagcatcttctccttccggggccgggccaaggatgtgggctctgaaaatgactttgctgatgatgagcacagcacctttgaggacagcgagagcagaagagacagcctgtttgtgccccacagacatggagagaggaggaacagcaatggcaccaccacagaaacagaggtgaggaagaggcggctgagcagctaccagatctccatggagatgctggaggacagcagcggccggcagagagctgtgtccatcgccagcatcctgaccaacaccatggaggagctggaggagagccggcagaagtgccccccctgctggtacagatttgccaacgtgttcctgatctgggactgctgtgatgcctggctgaaggtgaagcacctggtgaacctgattgtgatggacccctttgtggacctggccatcaccatctgcatcgtgctgaacaccctcttcatggccatggagcactaccccatgacagagcagttcagctctgtgctgactgtgggcaacctggtgttcaccggcatcttcaccgctgagatggtgctgaagatcatcgccatggacccctactactacttccaggagggctggaacatctttgatggcatcatcgtgtccctgagcctgatggagctgggcctgagcaatgtggagggcctgtctgtgctgcgctccttccggctgctgcgggtcttcaagctggccaagtcctggcccaccctgaacatgctgatcaagatcatcggcaacagcgtgggcgccctgggcaacctgaccctggtgctggccatcatcgtgttcatctttgctgtggtgggcatgcagctgtttgggaagagctacaaggaatgtgtgtgcaagatcaatgatgactgcaccctgccccgctggcacatgaatgacttcttccacagcttcctgattgtgttccgggtgctgtgtggggagtggattgagaccatgtgggactgcatggaggtggccggccagaccatgtgcctgattgtgttcatgctggtgatggtgattggcaacctggtggtgctgaacctcttcctggccctgctgctgagcagcttcagcagtgacaacctggccgccacagatgatgacaatgagatgaacaacctgcagattgctgtgggccgcatgcagaagggcatcgactatgtgaagaacaagatgagggagtgcttccagaaggccttcttcaggaagcccaaggtgattgagatccacgagggcaacaagattgacagctgcatgagcaacaacacaggcatcgagatcagcaaggagctgaactacctgagagatggaaatggcaccaccagcggcgtgggcaccggcagctctgtggagaagtatgtgattgatgaaaatgactacatgtccttcatcaacaaccccagcctgactgtgacagtgcccatcgctgtgggggagagtgactttgagaacctgaacacagaggagttcagcagcgagagcgagctggaggagagcaaggagaagctgaatgccaccagcagcagcgagggcagcacagtggatgtggtgctgccccgggagggggagcaggccgagacagagcctgaggaggacctgaagccagaggcctgcttcacagagggctgcatcaagaagttccccttctgccaggtgtccacagaggagggcaagggcaagatctggtggaacctgaggaagacctgctacagcatcgtggagcacaactggtttgagaccttcatcgtgttcatgatcctgctgagcagcggggccctggcctttgaggacatctacatcgagcagaggaagaccatcaagaccatgctggagtatgctgacaaggtgttcacctacatcttcatcctggagatgctgctgaagtgggtggcctacggcttccagacctacttcaccaatgcctggtgctggctggacttcctgattgtggatgtgtccctggtgtccctggtggccaatgccctgggctacagcgagctgggcgccatcaagagcctgcggaccctgcgggccctgcggcccctgcgggccctgagcagatttgagggcatgagggtggtggtgaatgccctggtgggcgccatccccagcatcatgaatgtgctgctggtgtgcctgatcttctggctgatcttcagcatcatgggcgtgaacctgtttgctgggaagttctaccactgtgtgaacatgaccaccggcaacatgtttgacatcagtgatgtgaacaacctgagtgactgccaggccctgggcaagcaggcccgctggaagaatgtgaaggtgaactttgacaacgtgggcgccggctacctggccctgctgcaggtgtag

SEQ ID NO: 37249 - DNA, 4095 bp, Artificial Sequence
  derived and/or modified sequence
atggcccaggccctgctggtgccccccggccccgagagcttccggctcttcactcgcgaatcactagcagccattgagaaacgcgccgcggaagagaaagccaaaaaacctaagaaggagcaagacaatgacgatgagaataaaccaaagccgaattctgatcttgaagccggcaagaatctgccattcatttatggagacatcccaccggaaatggtttccgaacccctcgaagatttggacccatactacatcaacaagaagaccttcattgtgatgaataaaggcaaggcaattttccggttctccgccaccagcgcactgtacattctcactccactgaatcctgtcagaaaaatcgcaatcaagattttggtccactcactcttttccatgttaatcatgtgtaccatccttaccaactgtgtctttatgacactgtcaaacccccctgactggactaaaaatgtggaatacaccttcaccggtatctacaccttcgaatccttgattaaaatactggctcgcgggttctgcctggaggactttaccttcctgcgggacccatggaactggctggacttcagcgtaatcgttatggcttatgtcaccgaatttgtggacctgggaaacgtcagtgccttgagaacgttccgggttctgagggccttgaaaacgatttccgtgattccaggtctaaagactatagtgggtgctctcattcagtctgtgaagaagctgtccgacgtgatgatcctgacagtgttttgcctgagtgtgttcgctctgatcggcctgcagctctttatgggcaacctgcgtaataaatgccttcagtggccaccatccgatagtgcattcgagacgaacacgacgagttatttcaacggtactatggatagtaacggtacatttgtcaacgtcacaatgtcaacattcaactggaaggactacataggcgacgacagtcacttttatgtgctggacgggcagaaggacccactactttgcggaaatggctcagatgccgggcagtgcccggagggatacatatgtgtgaaagccggaaggaaccccaattatggttatacgtcattcgatactttctcatgggcttttctgagcctgttccggctcatgacacaggattattgggagaacctatatcagcttaccctccgggccgccggtaagacatatatgatcttttttgtactagtgattttcctcggctccttctatttagtgaatctgattctcgctgtagtcgccatggcctatgaagaacagaaccaagcgactctggaggaggccgaacagaaagaagctgagttccagcagatgctagaacaattgaagaaacaacaagaggaagcccaagccgtagcagccgctagcgcagcttctagggatttctctggaattggaggattgggcgagctcctggaatcctcaagcgaggcttcaaaacttagctcaaagagcgccaaagagtggcggaaccgcaggaaaaagcggcggcaaagagagcacctggaggggaacaataagggggagagggacagctttcctaagtcagaaagcgaggattctgtgaagcggtctagtttcctgttctccatggatggcaaccgcctcacgagtgataaaaaattttgctctcctcatcagtcattactaagcattagggggagcctgttttctccacgacgtaatagcaagaccagtattttctcctttagaggacgagccaaagacgtgggaagcgaaaacgacttcgccgacgacgaacactccacttttgaggacagcgaaagccggagggattcattgttcgtgccccaccgacatggtgagcgacgaaattcaaatggaaccaccactgaaacggaggtgagaaagagaaggctgtctagctaccagatttcaatggaaatgctggaggatagctcagggcggcaacgggcggtgtccatagcatccattcttacaaatactatggaagagctggaagagagcagacagaaatgccctccctgctggtaccgctttgcaaatgtgttcttgatctgggattgctgtgacgcctggttgaaggtaaaacacttggtcaatctgatcgtgatggatccgttcgttgacttagcaatcacaatctgcatcgtgctgaacacactgtttatggccatggagcactaccccatgactgagcagttcagctccgtcctcactgtcggaaatttggtctttacagggatcttcaccgcagagatggtgttaaagattatagcgatggacccgtactactattttcaggaggggtggaatatttttgatggtataatagtctcgctgtccttgatggagttgggcctctctaatgtggaggggcttagcgtgttgagatccttccgcctgttacgggtcttcaaactggccaaatcttggccgacactcaacatgctgatcaaaataattggaaattccgtgggtgccctcggaaatttgacgctcgtcctcgcaataattgtttttatcttcgccgtggttggaatgcagttattcggaaaatcgtataaggagtgcgtgtgcaagatcaacgatgattgtactctcccacgctggcatatgaacgattttttccactcttttctgatcgtctttcgcgtgctatgcggggagtggatagaaactatgtgggattgtatggaggtggccggccagaccatgtgcttgatagtgttcatgctcgtgatggtaattggaaacctggtagtgcttaatctatttctggctttgctgctgtcttctttcagtagtgacaacctggccgcaacggacgacgacaacgaaatgaacaacctgcagatcgcagttggacggatgcagaaaggcattgactatgtaaagaataaaatgcgcgagtgctttcagaaggccttttttaggaaacccaaagtcatcgagattcacgaggggaacaagattgactcttgtatgtcaaacaacacaggcatcgagatctcaaaagaattgaactacctccgggacgggaatggcacgacctccggcgtgggtacagggagctcagtggagaagtatgtcattgatgagaatgactatatgtcgttcataaacaacccgtcactgactgtgacagttccgatcgcagtcggcgagagcgatttcgagaacctcaatactgaagagttcagtagtgagtcagagctggaagagtctaaagaaaagcttaacgcaacatctagtagtgaaggatcaacggtggacgtggtcctgcctagagagggggagcaggccgagacagagccagaggaggatctgaaaccagaggcctgcttcacagaaggatgtatcaagaaatttccgttttgccaggtgtcaaccgaagaaggaaaaggcaagatttggtggaatctcagaaagacgtgttactctatagttgaacacaactggttcgaaacattcatcgtcttcatgatccttctgtcaagcggagcgctggcgttcgaggacatttacatagaacagagaaaaaccatcaaaactatgctggaatatgcagataaagtgtttacatacatattcatcctggaaatgctcctgaaatgggtggcatacggcttccagacatattttactaacgcctggtgttggcttgatttcctaatcgtcgatgtgtcgcttgtgagcctggtcgccaatgccctgggttattctgagcttggcgccatcaaatctctccgtacccttcgggccttgagacctctgagagcactgagtcggttcgaaggtatgcgtgtggtcgtgaatgcactcgtcggcgccatccccagcataatgaatgttcttctcgtatgtcttatattttggctgattttttctataatgggagtgaatctcttcgctggtaaattctaccactgcgtgaacatgaccacgggcaacatgtttgacatctctgatgtcaataacctatccgactgccaggccctcggaaagcaggcccggtggaaaaatgtcaaagttaatttcgacaatgtcggtgccggttacttagcactactgcaggtctag

SEQ ID NO: 37250 - DNA, 4095 bp, Artificial Sequence
  derived and/or modified sequence
atggcccaggccctgctcgtgccacccggtcccgaaagctttcgactgttcacccgcgagtcgctggcggcaattgagaagagagctgcggaagagaaggcgaagaaacccaagaaggagcaagacaacgatgatgagaataaacctaagccgaattctgatcttgaagctggaaaaaatctgccattcatatatggcgacattccaccggagatggtctcagaacccctggaggacctcgacccttactatattaataagaagacgtttattgtgatgaacaaaggaaaagccatcttccggttttcggcaactagtgccctgtacatcttgacccctttaaacccagtgagaaagattgcaattaagatcctcgtgcattccttgttcagcatgctcattatgtgtacaatcctaaccaattgcgtcttcatgaccctttctaatcccccagactggacgaaaaacgtcgagtacacttttactggcatctatacctttgagtcattaattaagattctggcccgaggcttctgtctggaggatttcactttcttgcgagacccctggaattggttagatttctccgtgatcgtgatggcttatgtcaccgagttcgtcgatttggggaatgtttcagctctgaggacattccgcgtactgagagcccttaagacaatctcagtcatccccggtctgaaaactatcgtgggagctttaattcagtctgttaagaaactgagcgacgtgatgatactcactgtcttctgcctgagcgtatttgcccttatcggattacaattgttcatgggcaacctgagaaacaagtgtctccagtggccgcctagcgattcagcgtttgaaaccaatacaacctcctatttcaacggaaccatggacagtaacggcacttttgttaatgtgacaatgtctacttttaattggaaagactatatcggcgatgacagtcacttctatgtgcttgatggccagaaggaccccttactgtgcggaaatggctctgacgccggtcagtgtccagaaggctacatttgtgtgaaggccggtcgaaatcccaactatggatacacaagcttcgacactttctcctgggccttcttgtctttattccgacttatgacccaggattactgggaaaatctgtaccagcttactctcagagctgctggtaagacttacatgatattctttgttttggtcatatttctgggctcattttacttggtcaacttgattctagcagtcgtcgcgatggcttacgaggaacagaatcaggccaccctggaggaggctgaacaaaaagaggctgagttccagcaaatgttggagcagttaaagaagcagcaggaagaggcccaagcagtcgctgcggctagcgccgcaagcagggatttctcgggcatcgggggattgggcgaactgctggagagcagctccgaggcctccaagctgtcatctaagagcgcgaaagagtggcgcaatcggaggaagaaacggagacagagagagcaccttgagggtaacaacaagggggaacgcgactcatttcccaagtctgagagtgaggactcagtgaagcggagctcctttctcttctcaatggacgggaaccgcttgacctcagataaaaaattttgttctccacaccaatcacttcttagcatccgaggttcattgttcagcccaagacggaacagtaaaacaagtatctttagctttcgaggacgggcaaaagacgtggggagcgaaaacgactttgctgacgatgagcactccacgttcgaggactcagagagcagaagggattccctattcgtcccccaccgccacggcgagaggcgtaacagtaacggcacaactactgagactgaggttcgcaagcgccgattgtcttcctaccagatctctatggagatgctcgaagatagctcggggcgtcaaagagccgtttcaattgcctccatcctgaccaacaccatggaagagttggaggagagtcgccagaaatgccctccgtgttggtacagatttgccaatgtgttccttatctgggactgctgtgatgcttggctgaaggtgaaacatttagtcaatctcatagtgatggacccattcgtcgatctcgctatcaccatctgcattgtgctgaacacactcttcatggccatggaacattaccctatgacagaacagttcagtagcgtgctcacagtcggcaacctggttttcactggaatctttactgctgagatggtgcttaagataatagccatggacccctactactactttcaagagggatggaatatctttgacggtataattgtctccctttcactcatggagctgggactcagcaacgtggaagggctaagcgtgttgcggagctttcgtctgttacgcgtcttcaaattggctaagagctggcccaccttgaatatgttgattaaaattatcggtaactccgtcggggcactcgggaacctcacattggtgttggccattattgtctttatattcgcagtcgtggggatgcagctgttcgggaaaagctataaggaatgtgtttgtaagatcaacgatgattgcaccctgccccgttggcatatgaatgacttttttcactcgtttctgatcgtatttcgcgtgctgtgcggggaatggattgaaacaatgtgggactgcatggaggtggctggccagaccatgtgcctcatagtatttatgttggtgatggttattgggaacctggtagtattaaacctgttcctggcccttctgctgtcatcctttagctccgacaatctcgccgcaacagatgacgacaatgagatgaacaacctacagatcgccgtggggcgtatgcaaaaagggatcgattatgtaaaaaataagatgcgggaatgtttccagaaggcgtttttcaggaaacccaaagtgatcgagattcacgaagggaataagatagattcttgtatgtccaacaacacaggcatcgaaatttctaaggagctgaattatctaagggatgggaacgggacgacgagcggtgtagggactggaagtagtgtcgaaaaatatgtgattgatgagaatgactacatgagctttatcaacaatcctagcctaaccgtaacagtcccaattgccgtgggagagagcgattttgagaatctgaataccgaagagttttcaagcgagagcgagctggaggagtctaaagaaaagctgaacgctacatcctcttccgagggcagtacggtggatgtagtgctgccgcgtgagggcgaacaggcagagactgaacctgaagaagaccttaaacccgaggcgtgcttcaccgagggttgtataaaaaagttcccattttgtcaggtgtctactgaggaaggcaaagggaagatttggtggaacctcaggaaaacctgctactctatagtggagcataactggtttgagacgtttatagtctttatgattctgctgagttctggggctctggcttttgaagacatctatatcgaacagaggaaaactatcaagactatgctggaatacgctgataaggtttttacttatatattcatactggagatgctgcttaaatgggtggcatacggcttccagacctatttcaccaatgcgtggtgctggctggacttcctgatcgtggacgtgtcattggtgtcattggtggccaatgccctcggttactctgaattgggtgctatcaaaagtctccgaacactcagggctttaaggccactgcgtgcactctctaggtttgaggggatgagggtagttgtgaatgccctggtgggagcgatcccctcaatcatgaatgtgttgttggtgtgcctgatcttttggctgattttctccattatgggcgtgaacctgttcgcgggaaaattctaccactgtgtgaatatgacgacaggcaacatgtttgacatctcggacgtcaacaatctgtccgattgccaagccctcggcaagcaggcaagatggaaaaatgtaaaggttaatttcgacaatgtgggtgctggttatcttgcacttctgcaggtctag

SEQ ID NO: 37251 - DNA, 4144 bp, Artificial Sequence
  derived and/or modified sequence
aggtaattcgtatgcaagaagctacacgtaattaaatgtgcaggatgaaaagatggcacaggcactgttggtacccccaggacctgaaagcttccgcctttttactagagaatctcttgctgctatcgaaaaacgtgctgcagaagagaaagccaagaagcccaaaaaggaacaagataatgatgatgagaacaaaccaaagccaaatagtgacttggaagctggaaagaaccttccatttatttatggagacattcctccagagatggtgtcagagcccctggaggacctggatccctactatatcaataagaaaacttttatagtaatgaataaaggaaaggcaattttccgattcagtgccacctctgccttgtatattttaactccactaaaccctgttaggaaaattgctatcaagattttggtacattctttattcagcatgcttatcatgtgcactattttgaccaactgtgtatttatgaccttgagcaaccctcctgactggacaaagaatgtagagtacacattcactggaatctatacctttgagtcacttataaaaatcttggcaagagggttttgcttagaagattttacgtttcttcgtgatccatggaactggctggatttcagtgtcattgtgatggcatatgtgacagagtttgtggacctgggcaatgtctcagcgttgagaacattcagagttctccgagcactgaaaacaatttcagtcattccaggtttaaagaccattgtgggggccctgatccagtcggtaaagaagctttctgatgtgatgatcctgactgtgttctgtctgagcgtgtttgctctcattgggctgcagctgttcatgggcaatctgaggaataaatgtttgcagtggcccccaagcgattctgcttttgaaaccaacaccacttcctactttaatggcacaatggattcaaatgggacatttgttaatgtaacaatgagcacatttaactggaaggattacattggagatgacagtcacttttatgttttggatgggcaaaaagaccctttactctgtggaaatggctcagatgcaggccagtgtccagaaggatacatctgtgtgaaggctggtcgaaaccccaactatggctacacaagctttgacacctttagctgggctttcctgtctctatttcgactcatgactcaagactactgggaaaatctttaccagttgacattacgtgctgctgggaaaacatacatgatattttttgtcctggtcattttcttgggctcattttatttggtgaatttgatcctggctgtggtggccatggcctatgaggagcagaatcaggccaccttggaagaagcagaacaaaaagaggccgaatttcagcagatgctcgaacagcttaaaaagcaacaggaagaagctcaggcagttgcggcagcatcagctgcttcaagagatttcagtggaataggtgggttaggagagctgttggaaagttcttcagaagcatcaaagttgagttccaaaagtgctaaagaatggaggaaccgaaggaagaaaagaagacagagagagcaccttgaaggaaacaacaaaggagagagagacagctttcccaaatccgaatctgaagacagcgtcaaaagaagcagcttccttttctccatggatggaaacagactgaccagtgacaaaaaattctgctcccctcatcagtctctcttgagtatccgtggctccctgttttccccaagacgcaatagcaaaacaagcattttcagtttcagaggtcgggcaaaggatgttggatctgaaaatgactttgctgatgatgaacacagcacatttgaagacagcgaaagcaggagagactcactgtttgtgccgcacagacatggagagcgacgcaacagtaacggcaccaccacagaaacggaagtcagaaagagaaggttaagctcttaccagatttcaatggagatgctggaggattcctctggaaggcaaagagccgtgagcatagccagcattctgaccaacacaatggaagaacttgaagaatctagacagaaatgtccgccatgctggtatagatttgccaatgtgttcttgatctgggactgctgtgatgcatggttaaaagtaaaacatcttgtgaatttaattgttatggatccatttgttgatcttgccatcactatttgcattgtcttaaataccctctttatggccatggagcactaccccatgactgagcaattcagtagtgtgttgactgtaggaaacctggtctttactgggattttcacagcagaaatggttctcaagatcattgccatggatccttattactatttccaagaaggctggaatatctttgatggaattattgtcagcctcagtttaatggagcttggtctgtcaaatgtggagggattgtctgtactgcgatcattcagactgcttagagttttcaagttggcaaaatcctggcccacactaaatatgctaattaagatcattggcaattctgtgggggctctaggaaacctcaccttggtgttggccatcatcgtcttcatttttgctgtggtcggcatgcagctctttggtaagagctacaaagaatgtgtctgcaagatcaatgatgactgtacgctcccacggtggcacatgaacgacttcttccactccttcctgattgtgttccgcgtgctgtgtggagagtggatagagaccatgtgggactgtatggaggtcgctggccaaaccatgtgccttattgttttcatgttggtcatggtcattggaaaccttgtggttctgaacctctttctggccttattgttgagttcatttagctcagacaaccttgctgctactgatgatgacaatgaaatgaataatctgcagattgcagtaggaagaatgcaaaagggaattgattatgtgaaaaataagatgcgggagtgtttccaaaaagccttttttagaaagccaaaagttatagaaatccatgaaggcaataagatagacagctgcatgtccaataatactggaattgaaataagcaaagagcttaattatcttagagatgggaatggaaccaccagtggtgtaggtactggaagcagtgttgaaaaatacgtaatcgatgaaaatgattatatgtcattcataaacaaccccagcctcaccgtcacagtgccaattgctgttggagagtctgactttgaaaacttaaatactgaagagttcagcagtgagtcagaactagaagaaagcaaagagaaattaaatgcaaccagctcatctgaaggaagcacagttgatgttgttctaccccgagaaggtgaacaagctgaaactgaacccgaagaagaccttaaaccggaagcttgttttactgaaggatgtattaaaaagtttccattctgtcaagtaagtacagaagaaggcaaagggaagatctggtggaatcttcgaaaaacctgctacagtattgttgagcacaactggtttgagactttcattgtgttcatgatccttctcagtagtggtgcattggcctttgaagatatatacattgaacagcgaaagactatcaaaaccatgctagaatatgctgacaaagtctttacctatatattcattctggaaatgcttctcaaatgggttgcttatggatttcaaacatatttcactaatgcctggtgctggctagatttcttgatcgttgatgtttctttggttagcctggtagccaatgctcttggctactcagaactcggtgccatcaaatcattacggacattaagagctttaagacctctaagagccttatcccggtttgaaggcatgagggtggttgtgaatgctcttgttggagcaattccctctatcatgaatgtgctgttggtctgtctcatcttctggttgatctttagcatcatgggtgtgaatttgtttgctggcaagttctaccactgtgttaacatgacaacgggtaacatgtttgacattagtgatgttaacaatttgagtgactgtcaggctcttggcaagcaagctcggtggaaaaacgtgaaagtaaactttgataatgttggcgctggctatcttgcactgcttcaagtg

SEQ ID NO: 37252 - DNA, 4095 bp, Artificial Sequence
  derived and/or modified sequence
atggcccaggccctgctggtgccccccggccccgagagcttcagactgttcaccagagagagcctggccgccatcgagaagagagccgccgaggagaaggccaagaagcccaagaaggagcaggacaacgacgacgagaacaagcccaagcccaacagcgacctggaggccggcaagaacctgcccttcatctacggcgacatcccccccgagatggtgagcgagcccctggaggacctggacccctactacatcaacaagaagaccttcatcgtgatgaacaagggcaaggccatcttcagattcagcgccaccagcgccctgtacatcctgacccccctgaaccccgtgagaaagatcgccatcaagatcctggtgcacagcctgttcagcatgctgatcatgtgcaccatcctgaccaactgcgtgttcatgaccctgagcaacccccccgactggaccaagaacgtggagtacaccttcaccggcatctacaccttcgagagcctgatcaagatcctggccagaggcttctgcctggaggacttcaccttcctgagagacccctggaactggctggacttcagcgtgatcgtgatggcctacgtgaccgagttcgtggacctgggcaacgtgagcgccctgagaaccttcagagtgctgagagccctgaagaccatcagcgtgatccccggcctgaagaccatcgtgggcgccctgatccagagcgtgaagaagctgagcgacgtgatgatcctgaccgtgttctgcctgagcgtgttcgccctgatcggcctgcagctgttcatgggcaacctgagaaacaagtgcctgcagtggccccccagcgacagcgccttcgagaccaacaccaccagctacttcaacggcaccatggacagcaacggcaccttcgtgaacgtgaccatgagcaccttcaactggaaggactacatcggcgacgacagccacttctacgtgctggacggccagaaggaccccctgctgtgcggcaacggcagcgacgccggccagtgccccgagggctacatctgcgtgaaggccggcagaaaccccaactacggctacaccagcttcgacaccttcagctgggccttcctgagcctgttcagactgatgacccaggactactgggagaacctgtaccagctgaccctgagagccgccggcaagacctacatgatcttcttcgtgctggtgatcttcctgggcagcttctacctggtgaacctgatcctggccgtggtggccatggcctacgaggagcagaaccaggccaccctggaggaggccgagcagaaggaggccgagttccagcagatgctggagcagctgaagaagcagcaggaggaggcccaggccgtggccgccgccagcgccgccagcagagacttcagcggcatcggcggcctgggcgagctgctggagagcagcagcgaggccagcaagctgagcagcaagagcgccaaggagtggagaaacagaagaaagaagagaagacagagagagcacctggagggcaacaacaagggcgagagagacagcttccccaagagcgagagcgaggacagcgtgaagagaagcagcttcctgttcagcatggacggcaacagactgaccagcgacaagaagttctgcagcccccaccagagcctgctgagcatcagaggcagcctgttcagccccagaagaaacagcaagaccagcatcttcagcttcagaggcagagccaaggacgtgggcagcgagaacgacttcgccgacgacgagcacagcaccttcgaggacagcgagagcagaagagacagcctgttcgtgccccacagacacggcgagagaagaaacagcaacggcaccaccaccgagaccgaggtgagaaagagaagactgagcagctaccagatcagcatggagatgctggaggacagcagcggcagacagagagccgtgagcatcgccagcatcctgaccaacaccatggaggagctggaggagagcagacagaagtgccccccctgctggtacagattcgccaacgtgttcctgatctgggactgctgcgacgcctggctgaaggtgaagcacctggtgaacctgatcgtgatggaccccttcgtggacctggccatcaccatctgcatcgtgctgaacaccctgttcatggccatggagcactaccccatgaccgagcagttcagcagcgtgctgaccgtgggcaacctggtgttcaccggcatcttcaccgccgagatggtgctgaagatcatcgccatggacccctactactacttccaggagggctggaacatcttcgacggcatcatcgtgagcctgagcctgatggagctgggcctgagcaacgtggagggcctgagcgtgctgagaagcttcagactgctgagagtgttcaagctggccaagagctggcccaccctgaacatgctgatcaagatcatcggcaacagcgtgggcgccctgggcaacctgaccctggtgctggccatcatcgtgttcatcttcgccgtggtgggcatgcagctgttcggcaagagctacaaggagtgcgtgtgcaagatcaacgacgactgcaccctgcccagatggcacatgaacgacttcttccacagcttcctgatcgtgttcagagtgctgtgcggcgagtggatcgagaccatgtgggactgcatggaggtggccggccagaccatgtgcctgatcgtgttcatgctggtgatggtgatcggcaacctggtggtgctgaacctgttcctggccctgctgctgagcagcttcagcagcgacaacctggccgccaccgacgacgacaacgagatgaacaacctgcagatcgccgtgggcagaatgcagaagggcatcgactacgtgaagaacaagatgagagagtgcttccagaaggccttcttcagaaagcccaaggtgatcgagatccacgagggcaacaagatcgacagctgcatgagcaacaacaccggcatcgagatcagcaaggagctgaactacctgagagacggcaacggcaccaccagcggcgtgggcaccggcagcagcgtggagaagtacgtgatcgacgagaacgactacatgagcttcatcaacaaccccagcctgaccgtgaccgtgcccatcgccgtgggcgagagcgacttcgagaacctgaacaccgaggagttcagcagcgagagcgagctggaggagagcaaggagaagctgaacgccaccagcagcagcgagggcagcaccgtggacgtggtgctgcccagagagggcgagcaggccgagaccgagcccgaggaggacctgaagcccgaggcctgcttcaccgagggctgcatcaagaagttccccttctgccaggtgagcaccgaggagggcaagggcaagatctggtggaacctgagaaagacctgctacagcatcgtggagcacaactggttcgagaccttcatcgtgttcatgatcctgctgagcagcggcgccctggccttcgaggacatctacatcgagcagagaaagaccatcaagaccatgctggagtacgccgacaaggtgttcacctacatcttcatcctggagatgctgctgaagtgggtggcctacggcttccagacctacttcaccaacgcctggtgctggctggacttcctgatcgtggacgtgagcctggtgagcctggtggccaacgccctgggctacagcgagctgggcgccatcaagagcctgagaaccctgagagccctgagacccctgagagccctgagcagattcgagggcatgagagtggtggtgaacgccctggtgggcgccatccccagcatcatgaacgtgctgctggtgtgcctgatcttctggctgatcttcagcatcatgggcgtgaacctgttcgccggcaagttctaccactgcgtgaacatgaccaccggcaacatgttcgacatcagcgacgtgaacaacctgagcgactgccaggccctgggcaagcaggccagatggaagaacgtgaaggtgaacttcgacaacgtgggcgccggctacctggccctgctgcaggtgtag

SEQ ID NO: 37253 - protein, 1951 aa, Artificial Sequence
  derived and/or modified sequence
MAQALLVPPGPESFRLFTRESLAAIEKRAAEEKAKKPKKEQDNDDENKPKPNSDLEAGKNLPFIYGDIPPEMVSEPLEDLDPYYINKKTFIVMNKGKAIFRFSATSALYILTPLNPVRKIAIKILVHSLFSMLIMCTILTNCVFMTLSNPPDWTKNVEYTFTGIYTFESLIKILARGFCLEDFTFLRDPWNWLDFSVIVMAYVTEFVSLGNVSALRTFRVLRALKTISVIPGLKTIVGALIQSVKKLSDVMILTVFCLSVFALIGLQLFMGNLRNKCLQWPPSDSAFETNTTSYFNGTMDSNGTFVNVTMSTFNWKDYIGDDSHFYVLDGQKDPLLCGNGSDAGQCPEGYICVKAGRNPNYGYTSFDTFSWAFLSLFRLMTQDYWENLYQLTLRAAGKTYMIFFVLVIFLGSFYLVNLILAVVAMAYEEQNQATLEEAEQKEAEFQQMLEQLKKQQEEAQAVAAASAASRDFSGIGGLGELLESSSEASKLSSKSAKEWRNRRKKRRQREHLEGNNKGERDSFPKSESEDSVKRSSFLFSMDGNRLTSDKKFCSPHQSLLSIRGSLFSPRRNSKTSIFSFRGRAKDVGSENDFADDEHSTFEDSESRRDSLFVPHRHGERRNSNGTTTETEVRKRRLSSYQISMEMLEDSSGRQRAVSIASILTNTMEELEESRQKCPPCWYRFANVFLIWDCCDAWLKVKHLVNLIVMDPFVDLAITICIVLNTLFMAMEHYPMTEQFSSVLTVGNLVFTGIFTAEMVLKIIAMDPYYYFQEGWNIFDGIIVSLSLMELGLSNVEGLSVLRSFRLLRVFKLAKSWPTLNMLIKIIGNSVGALGNLTLVLAIIVFIFAVVGMQLFGKSYKECVCKINDDCTLPRWHMNDFFHSFLIVFRVLCGEWIETMWDCMEVAGQTMCLIVFMLVMVIGNLVVLNLFLALLLSSFSSDNLAATDDDNEMNNLQIAVGRMQKGIDYVKNKMRECFQKAFFRKPKVIEIHEGNKIDSCMSNNTGIEISKELNYLRDGNGTTSGVGTGSSVEKYVIDENDYMSFINNPSLTVTVPIAVGESDFENLNTEEFSSESELEESKEKLNATSSSEGSTVDVVLPREGEQAETEPEEDLKPEACFTEGCIKKFPFCQVSTEEGKGKIWWNLRKTCYSIVEHNWFETFIVFMILLSSGALAFEDIYIEQRKTIKTMLEYADKVFTYIFILEMLLKWVAYGFQTYFTNAWCWLDFLIVDVSLVSLVANALGYSELGAIKSLRTLRALRPLRALSRFEGMRVVVNALVGAIPSIMNVLLVCLIFWLIFSIMGVNLFAGKFYHCVNMTTGNMFDISDVNNLSDCQALGKQARWKNVKVNFDNVGAGYLALLQVATFKGWMDIMYAAVDSRDVKLQPVYEENLYMYLYFVIFIIFGSFFTLNLFIGVIIDNFNQQKKKFGGQDIFMTEEQKKYYNAMKKLGSKKPQKPIPRPANKFQGMVFDFVTRQVFDISIMILICLNMVTMMVETDDQGKYMTLVLSRINLVFIVLFTGEFVLKLVSLRHYYFTIGWNIFDFVVVILSIVGMFLAEMIEKYFVSPTLFRVIRLARIGRILRLIKGAKGIRTLLFALMMSLPALFNIGLLLFLVMFIYAIFGMSNFAYVKKEAGIDDMFNFETFGNSMICLFQITTSAGWDGLLAPILNSAPPDCDPDTIHPGSSVKGDCGNPSVGIFFFVSYIIISFLVVVNMYIAVILENFSVATEESAEPLSEDDFEMFYEVWEKFDPDATQFIEFSKLSDFAAALDPPLLIAKPNKVQLIAMDLPMVSGDRIHCLDILFAFTKRVLGESGEMDALRIQMEDRFMASNPSKVSYEPITTTLKRKQEEVSAAIIQRNFRCYLLKQRLKNISSNYNKEAIKGRIDLPIKQDMIIDKLNGNSTPEKTDGSSSTTSPPSYDSVTKPDKEKFEKDKPEKESKGKEVRENQK

SEQ ID NO: 37254 - DNA, 5856 bp, Artificial Sequence
  derived and/or modified sequence
atggcacaagccctcctggttcctcccggacccgagtccttcaggctgtttaccagagaatctctggccgctattgaaaagcgcgcggccgaagagaaagcgaaaaagcctaagaaggagcaagataacgatgacgagaacaagccgaaacctaactccgacttggaagctgggaaaaatctgcccttcatttacggagatatccctccagagatggttagtgagcctctcgaagacttagacccttattatatcaacaagaaaaccttcatagtgatgaacaaaggaaaagccatttttcgctttagtgccacctccgctttatatatactgacccctcttaatcccgtcagaaagattgcaatcaaaatcctggtacatagtctgttttcaatgttgataatgtgtactattttaaccaactgcgttttcatgaccctgagtaatccacctgactggactaaaaacgtagagtacacgttcactggcatttatacattcgaaagcctcattaagattttggccagggggttttgcctggaggatttcacctttttaagggacccatggaattggttagacttctcagttatcgtgatggcttacgtgacggaatttgtatctcttggcaatgttagtgcactcaggacattccgagtgctgcgggccttgaagaccatcagtgtgatccccggcttgaagactatcgtgggcgccctaatacagtccgtgaagaaactctcagacgtcatgattctgactgtcttctgcctcagtgtatttgcgctgatcgggttgcagctcttcatgggtaacctgcgcaacaagtgcctacagtggcccccgagcgatagtgcttttgaaacaaacaccacttcatactttaacggaactatggactcaaatgggacattcgtgaatgtaaccatgagtacctttaactggaaggattatattggagatgattcccacttctatgtgctggacgggcagaaggatccgttactgtgcggcaatgggagtgatgcagggcagtgcccagaagggtacatttgcgtgaaagctggacgcaaccctaattatggatatacttcgtttgacactttctcatgggctttcttgtctttatttaggctcatgactcaagactactgggagaacctgtatcagctgacattgagagccgccggcaagacttacatgatttttttcgtgctggtcatctttcttggatctttctatctcgtcaatttgatcctggcagtcgtcgccatggcctacgaggagcagaatcaggctactttagaggaagcagagcagaaagaggcagaattccagcagatgctggagcagctcaaaaaacagcaggaggaagctcaggctgttgcagctgccagcgcagcttctagagatttttccggcattgggggcctgggcgagctgctcgagtctagctcagaggctagcaagctgagttcaaaaagcgccaaagagtggagaaaccgaagaaagaagcgcaggcagagggagcatctggagggcaacaacaaaggtgaacgggacagtttccctaagagtgaatcagaggactcagtaaagcggagtagctttctgttcagtatggatggcaacaggttgactagcgataaaaaattctgtagtccccatcagagtctgctatccattagaggatctctgttctccccccggcgcaatagcaaaacaagtatcttcagctttaggggacgggccaaagacgtcgggagcgaaaatgatttcgcggacgatgagcacagcacatttgaggattctgagtcccgccgtgattcactttttgtgccacaccgacacggagaaagacgaaactctaacgggacgactaccgaaacggaggttagaaagcgcaggctgagctcctaccagatttctatggagatgctcgaggacagttccggtcgccagcgggcagtctcaatagccagcattctgactaacaccatggaggagctggaagagtctcggcagaagtgccccccttgctggtatagatttgcgaatgtgtttcttatctgggactgttgcgacgcctggctgaaagtaaaacatcttgtcaatttgatagttatggatccattcgtggacctcgctattactatctgtatcgtactgaatacgctgtttatggccatggagcactaccctatgaccgagcagttttcgtcagtattgacagttggcaacttggtgtttactgggatatttacggcagagatggtgttgaaaattatcgccatggacccttactactacttccaggagggctggaacatttttgacggcatcattgttagtttgagtctaatggagttaggtcttagtaacgtggagggtcttagcgtgctgaggagcttccgcttgttgagagtcttcaagctcgcaaagagctggccgacccttaacatgttgatcaagatcattgggaattcagtgggggccctgggaaatctcaccttggtgctcgccataatcgtcttcatttttgccgtcgttggcatgcagctgttcggtaaatcatacaaagagtgcgtgtgtaagatcaacgacgactgcaccctgcctcggtggcatatgaacgatttctttcactcattcttgattgtcttcagagttctctgtggggagtggattgaaactatgtgggattgcatggaggtcgcaggacagaccatgtgcttgattgtgtttatgctcgtgatggttataggcaatctggtggtcctcaatctctttctggcactgctcctgtcttcattctcaagtgataacttagcagctaccgatgacgacaacgagatgaacaacctgcagattgcagtgggacgaatgcaaaagggaatcgattatgttaaaaataagatgagagaatgttttcagaaggctttcttccgaaaaccaaaggtgatagaaatccacgagggaaataaaatcgactcttgcatgagcaataacaccggcatcgagatctccaaggaactaaactatctgagagacggcaatgggactacgagcggcgtggggacgggatcttccgtggaaaaatatgtaatagacgaaaatgactacatgtcatttatcaataacccgagccttaccgtgactgtgcctattgctgtcggggagtcagattttgagaatctgaatacggaggagttctcttcagagagtgaattagaagaatcaaaagaaaagttgaacgccacctccagctctgaaggtagcaccgtcgatgtagtactacctcgcgagggggagcaggccgaaactgagcccgaggaggatcttaagccagaggcctgtttcactgaaggatgcatcaagaagtttcccttctgccaagtatccacagaggagggcaaaggcaagatttggtggaacctgagaaagacctgctatagcatagtagaacacaactggttcgagacctttattgtttttatgattctcctgtcatctggggccctggcctttgaggatatctacattgaacagcgcaagaccattaaaacaatgctagagtacgctgacaaggtgttcacatacatttttattctggaaatgctgttgaagtgggtggcttatgggttccagacttacttcacaaatgcctggtgctggctagacttcctaatcgtggacgtgagtctggtgagcctcgttgcaaacgccctgggttattccgagctcggcgcaattaaatcgctgaggacactgcgtgctctgagacccttgcgcgctctttcaagattcgaggggatgagagtcgtagtgaatgcgctggtcggtgccataccctccataatgaacgtgctcctggtatgcctcatcttttggttaatcttctccatcatgggggtaaacttgttcgctggaaagttttaccattgcgtgaacatgacaaccggcaacatgttcgatatttccgacgtaaacaatctgtcagactgccaggctctcgggaaacaggcacgatggaagaatgtcaaggtcaactttgataacgtgggtgccggatatctggctcttctgcaggtggcaacatttaaaggttggatggacattatgtacgccgcagtggactcccgggacgtaaaattgcagcccgtgtatgaggaaaatttatacatgtatttgtacttcgtgatatttataatctttggatcattctttactcttaatctctttataggggtgatcattgataacttcaatcagcagaagaagaagtttggcgggcaggacatctttatgacggaggagcagaaaaagtattacaatgcaatgaagaaactgggttccaagaagcctcagaagcctatccctcgtcccgccaataagttccagggaatggtgttcgactttgttaccagacaggtgttcgatattagtatcatgatcctcatctgcttgaacatggtcaccatgatggtagaaacagacgatcaaggaaagtacatgactctagtgctgagccgaatcaacctggtttttattgtactcttcaccggggaatttgttctgaagctagtctcactaaggcactattactttacaatcggctggaatatctttgattttgttgttgtaattttgagtatcgttggcatgttcctggcggagatgatagagaaatactttgtgagcccgaccctctttcgcgttattcggctcgcccggatcggaaggatcctccgcctgatcaagggcgctaagggcattcgcaccctgctctttgccctgatgatgagcctccccgccctctttaacatcggcttgcttctctttcttgtcatgtttatttacgctatattcggaatgtcaaacttcgcgtacgtgaaaaaggaagctggaattgacgacatgttcaattttgagacttttggcaattcgatgatctgtctgtttcaaattacaacatctgccggctgggatggattacttgcacctatactgaattcagcccctcctgactgcgatccagacactatacatcccgggtcatcagtgaagggagattgtggtaacccatcagtaggcatctttttctttgtatcgtatatcattatctcattcctggtggtggtgaatatgtatattgccgtgattctggagaatttcagtgtcgccacggaggagtctgccgagccgctcagtgaagacgattttgagatgttctacgaagtgtgggagaaatttgacccagacgctacccaatttatcgagttctcgaaactgagtgactttgcagccgcacttgatccgccactcctgatcgcaaagcccaacaaggtccagctgatcgcaatggacctgcctatggtgagcggtgatcgcattcattgtctggacatccttttcgcatttactaagcgcgtcctgggcgagtctggggaaatggacgctctgcggattcagatggaggaccgcttcatggcctcaaaccctagcaaggtgagctacgaacccatcaccactactcttaagcgcaaacaggaagaggtttcggctgcaattatccaacgaaattttcggtgttacttgctgaagcagcgcctgaagaacataagctccaactacaataaggaggctatcaaggggcggatcgatctgcccatcaagcaggacatgattatcgacaagcttaatggtaattcgacacctgagaaaaccgatggctcctcatccaccacatcacctcccagctacgacagcgtgactaaacctgacaaagaaaagtttgaaaaggacaagcccgagaaggaatcaaagggcaaggaggtgcgcgagaaccagaaatag

SEQ ID NO: 37255 - DNA, 5856 bp, Artificial Sequence
  derived and/or modified sequence
atggcccaggccctgctggtgcccccaggccctgagagcttccgcctcttcacccgggagagcctggccgccatcgagaagagagctgctgaggagaaggccaagaagcccaagaaggagcaggacaatgatgatgagaacaagcccaagcccaacagcgacctggaggccggcaagaacctgcccttcatctatggagacatccccccagagatggtgtctgagcccctggaggacctggacccctactacatcaacaagaagaccttcatcgtgatgaacaagggcaaggccatcttccgcttcagcgccaccagcgccctgtacatcctgacccccctgaaccctgtgaggaagatcgccatcaagatcctggtgcacagcctcttctccatgctgatcatgtgcaccatcctgaccaactgtgtgttcatgaccctgagcaaccccccagactggaccaagaatgtggagtacaccttcaccggcatctacacctttgagagcctcatcaagatcctggcccggggcttctgcctggaggacttcaccttcctgcgggacccctggaactggctggacttcagcgtcatcgtgatggcctacgtgacagaatttgtgtccctgggcaatgtgtctgccctgcggaccttccgggtgctgcgggccctgaagaccatcagcgtcatccctggcctgaagaccatcgtgggcgccctgatccagagcgtgaagaagctgagtgatgtgatgatcctgaccgtcttctgcctgtctgtgtttgccctgattggcctgcagctgttcatgggcaacctgaggaacaagtgcctgcagtggcccccaagtgacagcgcctttgagaccaacaccaccagctacttcaacggcaccatggacagcaatggcacctttgtgaatgtgaccatgagcaccttcaactggaaggactacatcggagatgacagccacttctacgtgctggatggccagaaggaccccctgctgtgtggaaatggaagtgatgctggccagtgcccagagggctacatctgtgtgaaggccggcaggaaccccaactacggctacaccagctttgacaccttctcctgggccttcctgagcctcttccggctgatgacccaggactactgggagaacctgtaccagctgaccctgcgggccgccggcaagacctacatgatcttctttgtgctggtgatcttcctgggcagcttctacctggtgaacctgatcctggccgtggtggccatggcctatgaggagcagaaccaggccaccctggaggaggccgagcagaaggaggccgagttccagcagatgctggagcagctgaagaagcagcaggaggaggcccaggccgtggccgccgccagcgctgccagccgggacttctctggaattggaggcctgggggagctgctggagagcagcagcgaggccagcaagctgagcagcaagagcgccaaggagtggaggaacagaaggaagaagaggcggcagcgggagcacctggagggcaacaacaagggggagcgggacagcttccccaagtctgagagtgaagattctgtgaagaggagcagcttcctgttctccatggatggcaaccggctgaccagtgacaagaagttctgcagcccccaccagagcctgctgagcatccggggcagcctcttcagccccaggaggaacagcaagaccagcatcttctccttccggggccgggccaaggatgtgggctctgaaaatgactttgctgatgatgagcacagcacctttgaggacagcgagagcagaagagacagcctgtttgtgccccacagacatggagagaggaggaacagcaatggcaccaccacagaaacagaggtgaggaagaggcggctgagcagctaccagatctccatggagatgctggaggacagcagcggccggcagagagctgtgtccatcgccagcatcctgaccaacaccatggaggagctggaggagagccggcagaagtgccccccctgctggtacagatttgccaacgtgttcctgatctgggactgctgtgatgcctggctgaaggtgaagcacctggtgaacctgattgtgatggacccctttgtggacctggccatcaccatctgcatcgtgctgaacaccctcttcatggccatggagcactaccccatgacagagcagttcagctctgtgctgactgtgggcaacctggtgttcaccggcatcttcaccgctgagatggtgctgaagatcatcgccatggacccctactactacttccaggagggctggaacatctttgatggcatcatcgtgtccctgagcctgatggagctgggcctgagcaatgtggagggcctgtctgtgctgcgctccttccggctgctgcgggtcttcaagctggccaagtcctggcccaccctgaacatgctgatcaagatcatcggcaacagcgtgggcgccctgggcaacctgaccctggtgctggccatcatcgtgttcatctttgctgtggtgggcatgcagctgtttgggaagagctacaaggaatgtgtgtgcaagatcaatgatgactgcaccctgccccgctggcacatgaatgacttcttccacagcttcctgattgtgttccgggtgctgtgtggggagtggattgagaccatgtgggactgcatggaggtggccggccagaccatgtgcctgattgtgttcatgctggtgatggtgattggcaacctggtggtgctgaacctcttcctggccctgctgctgagcagcttcagcagtgacaacctggccgccacagatgatgacaatgagatgaacaacctgcagattgctgtgggccgcatgcagaagggcatcgactatgtgaagaacaagatgagggagtgcttccagaaggccttcttcaggaagcccaaggtgattgagatccacgagggcaacaagattgacagctgcatgagcaacaacacaggcatcgagatcagcaaggagctgaactacctgagagatggaaatggcaccaccagcggcgtgggcaccggcagctctgtggagaagtatgtgattgatgaaaatgactacatgtccttcatcaacaaccccagcctgactgtgacagtgcccatcgctgtgggggagagtgactttgagaacctgaacacagaggagttcagcagcgagagcgagctggaggagagcaaggagaagctgaatgccaccagcagcagcgagggcagcacagtggatgtggtgctgccccgggagggggagcaggccgagacagagcctgaggaggacctgaagccagaggcctgcttcacagagggctgcatcaagaagttccccttctgccaggtgtccacagaggagggcaagggcaagatctggtggaacctgaggaagacctgctacagcatcgtggagcacaactggtttgagaccttcatcgtgttcatgatcctgctgagcagcggggccctggcctttgaggacatctacatcgagcagaggaagaccatcaagaccatgctggagtatgctgacaaggtgttcacctacatcttcatcctggagatgctgctgaagtgggtggcctacggcttccagacctacttcaccaatgcctggtgctggctggacttcctgattgtggatgtgtccctggtgtccctggtggccaatgccctgggctacagcgagctgggcgccatcaagagcctgcggaccctgcgggccctgcggcccctgcgggccctgagcagatttgagggcatgagggtggtggtgaatgccctggtgggcgccatccccagcatcatgaatgtgctgctggtgtgcctgatcttctggctgatcttcagcatcatgggcgtgaacctgtttgctgggaagttctaccactgtgtgaacatgaccaccggcaacatgtttgacatcagtgatgtgaacaacctgagtgactgccaggccctgggcaagcaggcccgctggaagaatgtgaaggtgaactttgacaacgtgggcgccggctacctggccctgctgcaggtggccaccttcaagggctggatggacatcatgtatgctgctgtggacagcagagatgtgaagctgcagcctgtgtatgaagaaaatctctacatgtacctgtactttgtgatcttcatcatcttcggcagcttcttcaccctgaacctcttcatcggggtcatcatcgacaacttcaaccagcagaagaagaagtttggaggccaggacatcttcatgacagaggagcagaagaagtactacaatgccatgaagaagctgggcagcaagaagccccagaagcccatccccaggcctgccaacaagttccagggcatggtgtttgattttgtgacccggcaggtgtttgacatcagcatcatgatcctgatctgcctgaacatggtgaccatgatggtggagacagatgaccagggcaagtacatgaccctggtgctgagccgcatcaacctggtgttcatcgtgctcttcaccggggagtttgtgctgaagctggtgtccctgcggcactactacttcaccatcggctggaacatctttgattttgtggtggtgatcctgagcatcgtgggcatgttcctggccgagatgattgagaagtactttgtgagccccaccctcttccgggtcatccggctggccagaattggccgcatcctgcggctcatcaagggggccaagggcatccgcaccctgctgtttgccctgatgatgagcctgcctgccctcttcaacatcggcctgctgctcttcctggtgatgttcatctatgccatcttcggcatgagcaactttgcctacgtgaagaaggaggccggcattgatgacatgttcaactttgagaccttcggcaacagcatgatctgcctcttccagatcaccaccagcgctggctgggatggcctgctggcccccatcctgaacagcgcccccccagactgtgaccctgacaccatccaccctggcagctctgtgaagggggactgtggcaaccccagcgtgggcatcttcttctttgtgtcctacatcatcatctccttcctggtggtggtgaacatgtacatcgctgtgatcctggagaacttctctgtggccacagaggagagcgctgagcccctgtctgaagatgactttgagatgttttatgaggtgtgggagaagtttgatcctgatgccacccagttcatcgagttcagcaagctgagtgactttgctgctgccctggacccccccctgctgattgccaagcccaacaaggtgcagctgattgccatggacctgcccatggtgtctggggaccgcatccactgcctggacatcctgtttgccttcaccaagagggtgctgggggagagcggggagatggatgccctgcgcatccagatggaggaccgcttcatggccagcaaccccagcaaggtgtcctatgagcccatcaccaccaccctgaagaggaagcaggaggaggtgtctgctgccatcatccagaggaacttccgctgctacctgctgaagcagaggctgaagaacatcagcagcaactacaacaaggaggccatcaagggcagaattgacctgcccatcaagcaggacatgatcatcgacaagctgaatggaaacagcaccccagagaagacagatggcagcagcagcaccaccagcccccccagctatgattctgtgaccaagccagacaaggagaagtttgagaaggacaagccagagaaggagagcaagggcaaggaggtgcgggagaaccagaagtag

SEQ ID NO: 37256 - DNA, 5856 bp, Artificial Sequence
  derived and/or modified sequence
atggcccaggccctgctggtgccccccggccccgagagcttccggctattcactcgggagagcttagctgcaatcgaaaagcgcgctgccgaggaaaaagcgaaaaagcccaaaaaagagcaagacaatgacgatgaaaacaaacctaagccaaattctgatctggaggcgggaaaaaatctgccattcatctatggagatatcccaccagaaatggtctccgaaccactggaggatctcgacccctactacatcaataagaaaacctttatcgtgatgaacaaaggtaaggctatttttcgtttttccgccacaagtgcgctctacatactcaccccgctgaacccagtcagaaaaatagccattaaaatccttgtgcattctctgttctcgatgctcatcatgtgtacaatattgaccaattgcgtatttatgaccctgtcaaatccaccagattggactaaaaacgtcgagtacacttttaccggcatttacaccttcgagtcccttattaagatcttggcccggggattttgtctggaggacttcacttttctaagggatccttggaactggctcgacttctccgttattgtcatggcatatgtgaccgaatttgtgagcttgggcaatgtgagcgctttgcgaacattcagggtgctccgggccctaaagactatttcagtgattccaggcctcaagacaatcgtgggtgctcttattcagtccgtgaaaaagttgagcgacgtgatgattctaaccgttttctgcctctccgtgtttgccctcattggattacagctgttcatgggaaacctgaggaataagtgcctgcagtggccgccaagtgattctgcctttgaaaccaacaccaccagctacttcaatggaacaatggacagtaatggaaccttcgtcaacgtgaccatgagtacatttaattggaaggactacatcggcgatgactcgcacttctacgtgttggatggtcagaaagaccctcttctttgtggtaatgggtctgatgcaggacagtgtcctgagggctatatctgtgtgaaagccgggcggaaccccaactacggctatacctctttcgatacattctcctgggcctttttgagtctgtttcgtcttatgacacaagactattgggaaaacctgtatcagctaacactgcgtgctgccggcaagacttatatgatcttcttcgtactcgtgatctttctcggctcattttatctggtcaacctgatactcgccgtggtcgcaatggcttatgaagagcagaaccaagccactcttgaggaagcagaacagaaagaagcggaattccagcagatgctcgagcaattgaagaagcagcaggaagaggctcaggccgttgcagcggcttctgcagcatcccgggatttttcgggaattggcggcctgggggaactcctagaatcctctagcgaggcgagtaagctttcctcaaaatccgccaaggaatggagaaacagaagaaaaaagcggagacagcgtgagcacctggagggtaataacaagggagagagggactcttttcccaaaagcgaatctgaagattccgtgaagcgcagcagttttctcttcagtatggacggcaatcggctcacaagtgacaaaaagttctgttccccccaccaatctcttctaagcatcagagggtcactcttttctccaaggcgcaattcaaaaacgtctatcttcagtttcagggggagagccaaggatgtggggagcgagaacgattttgcggacgacgagcactccactttcgaagacagcgagagtaggagagattcactgttcgtcccccatcggcacggtgaacgtagaaactctaatggaaccaccacagaaacggaggtgcgcaagcgacggttatctagctaccagatctccatggaaatgcttgaagacagcagcgggaggcagagggctgtctctattgccagcattttaaccaatacaatggaggaactagaggagagtcggcaaaaatgtcctccctgttggtataggtttgctaatgttttcttgatatgggactgttgcgatgcttggctgaaggtcaaacatctcgtcaacttgatcgtgatggatccctttgtcgatctcgcgattaccatttgcatcgtgcttaatactctgttcatggcaatggaacattacccgatgacagaacagttcagctccgtcctgactgttggcaacctcgtcttcactggcatatttaccgccgaaatggtgcttaagattattgcgatggatccatactattatttccaggaaggatggaatatatttgatgggatcattgtttcgttaagcctaatggagctcggacttagtaatgtggagggattgtccgtgctgaggagtttccggcttctccgcgttttcaagctggctaagtcatggccaacactgaacatgctcattaaaattattggcaatagcgtgggggccctcggtaacctcaccctggtcctcgctattattgtttttatcttcgcggtcgtcgggatgcagttgtttggcaaatcttacaaagagtgtgtctgcaaaatcaacgatgactgtaccctgccccgatggcatatgaacgactttttccattcattcttgattgtttttcgcgtcctttgtggggaatggatcgaaactatgtgggattgcatggaagttgcaggccagacaatgtgtctgattgtgtttatgttggtgatggtcataggtaatctggtcgttctgaatctgtttctggccctgctgctgagcagtttcagttccgacaacctagcagccactgatgatgataacgagatgaacaaccttcagatcgccgtgggtcgcatgcaaaaggggatcgactatgttaaaaataagatgcgtgagtgcttccagaaggctttctttagaaagccaaaagtgattgaaatccacgaaggaaataaaatcgattcgtgcatgtctaacaacaccggtatagagataagcaaagagctgaactacctgcgggacggcaatggaacaacttctggcgtcggaacagggtcgagtgttgaaaagtatgtcatagatgagaacgattatatgtcctttatcaacaacccaagcctgacggtgacagtacccatcgcagttggcgaatccgacttcgagaacctcaacacggaagaattttcttcagaatccgagctggaagagagcaaggaaaaactcaatgccaccagcagcagtgagggatctacagtcgacgtggtcctgcctagagaaggggagcaggcagaaacggaacctgaagaagacctaaagccggaggcatgctttacggaaggctgtatcaaaaagttcccgttctgtcaggtgagtaccgaagaaggaaaaggaaagatctggtggaatctcagaaaaacctgttactccatcgtggagcacaattggtttgaaacctttatcgtattcatgatcctactgtccagcggggctctcgcttttgaggatatttatattgaacagcgcaagactattaaaacaatgttggaatatgctgacaaagtctttacatacatctttatcctggagatgctcctgaaatgggtcgcctatggattccagacgtatttcactaacgcatggtgctggcttgacttcctcattgtcgacgtgtcgttggtaagtttggttgccaatgctctgggatactcagaactgggagcgattaagtcacttaggaccctgcgtgccctgcgacctctccgcgccctttcaaggttcgagggaatgcgcgtggtcgtcaacgcgttggtgggagcaattccttctattatgaatgtgctccttgtgtgcctcatcttctggttaatctttagtattatgggcgtgaatctttttgctggcaaattttatcactgtgtaaacatgactaccggcaatatgttcgatattagcgatgtgaataacctgtctgattgccaggccctcggcaaacaggcacgttggaaaaatgtgaaagtgaacttcgacaatgttggagcaggctatctggcacttctgcaagttgctacttttaaggggtggatggacatcatgtatgccgctgtggactcaagagacgttaagctgcaaccggtgtatgaggagaatctctatatgtacctgtacttcgtaatatttattatatttgggtccttctttaccctgaacctgttcattggcgtcattattgacaattttaaccagcagaagaaaaaattcggtgggcaggacatttttatgactgaagaacaaaagaagtactacaatgccatgaagaagcttggttctaagaagcctcaaaagcccatccctcgacctgctaacaagtttcaggggatggtttttgatttcgtgacaagacaggtgttcgacattagtatcatgatcttgatctgcctcaatatggttacaatgatggtcgagaccgacgatcaggggaaatatatgacactcgtgctgtctcggattaacctagtcttcatcgtactgtttactggggaattcgttctgaaacttgtgtctctccggcattattacttcactatcggctggaatatcttcgactttgttgtggtgattctttctattgttgggatgtttctggccgaaatgattgagaaatacttcgtcagcccaaccctttttcgagtaatccgcctggcccggatagggaggatcctccgactcattaaaggcgccaaagggatcaggacactgctgttcgcccttatgatgagcctgcctgcgctgtttaacataggcctcctgctgtttttggtcatgttcatctacgccattttcggcatgagtaatttcgcctacgtcaaaaaggaggcaggcatcgatgacatgttcaactttgagacattcggcaatagcatgatctgcctgttccaaatcaccacgagcgctggctgggacggattgttggctccaattctgaactccgccccccccgactgcgaccccgatacaatccatccagggagttctgttaagggtgattgcggtaacccgagcgtggggatattcttttttgtatcctatatcatcatctcatttctggtcgtcgttaacatgtacattgccgtgatcctcgagaactttagcgtggcgactgaggaatccgctgaaccactatcagaggatgacttcgaaatgttttacgaggtgtgggaaaagttcgaccccgatgccactcagttcattgagttttccaagctttccgatttcgccgctgccctggatccacccttgctgatcgctaagcccaacaaagtgcagctcatcgcaatggatctgcctatggtgagtggtgatcgtattcactgtctggatattctgttcgcctttaccaaacgtgtcctcggagaatcaggcgagatggatgctcttcgcattcaaatggaggaccgtttcatggcctcaaatccttccaaggtgagctatgagccgatcacaaccactctgaaacggaagcaggaggaggtgtccgctgccatcatccagcgtaattttagatgctatctcctaaagcagaggcttaagaatatctcctctaactataataaggaggcgattaaaggtcgaatcgatttgccaataaagcaagacatgataatcgacaaacttaacggtaactccacaccagagaagactgatgggtctagcagcaccacaagtccaccgagttatgatagcgtcaccaagccagataaggaaaagttcgagaaggacaagcctgagaaagaatccaagggtaaggaggtccgagagaaccagaaatag

SEQ ID NO: 37257 - DNA, 5855 bp, Artificial Sequence
  derived and/or modified sequence
atggcacaggccctgttggtcccaccaggccctgaatctttcaggctgttcaccagggagagtctggctgccattgagaaaagagcagcagaagagaaggcaaagaaacctaaaaaggagcaggataacgacgatgagaacaagccaaaacctaacagcgatctagaagctgggaagaacctgcccttcatttacggcgatattccccctgagatggtgtccgagcccctcgaggaccttgacccatactatatcaacaaaaaaactttcattgtgatgaataagggaaaagccatatttcgattctcggccacaagcgcactctatattctgactcctctgaatcccgtgcggaagatagccataaaaatactcgtgcacagtctattctctatgctcatcatgtgcacaatcctgactaattgtgttttcatgactttgtctaacccgcctgactggaccaaaaatgtcgagtacaccttcaccggaatctacaccttcgaatcattgatcaaaattctggcgcgagggttctgtttggaggacttcacattccttcgcgatccgtggaactggcttgatttcagtgtgattgtgatggcttacgttacagaatttgtcagtctcgggaatgtctctgcacttcggaccttccgcgtcctgcgcgcactgaaaaccatttccgtgatccccggactaaagacaatcgtcggagctcttatacagagcgtgaagaaactctccgacgtgatgattttaacagtgttttgcctgtctgtgttcgcgttaattgggttacaactttttatgggaaacctgcgaaacaaatgtctgcagtggcctccttcggattcagcctttgagacaaatactacaagctattttaatggaaccatggactccaatggcacgtttgtgaacgtgactatgtctactttcaactggaaagattatattggagacgattcgcacttctacgtgctcgacggccaaaaagatcccctgctatgtggtaacggcagcgacgctggacagtgccctgaagggtacatctgtgtgaaggctgggaggaacccaaattacggctacacgtcgttcgatacgttctcatgggcttttctatctctgtttcgcctcatgacccaggattattgggagaatctttatcagctgacactgagggcggcaggtaagacatacatgatattttttgtgctggtgatcttcttggggtctttctacttagttaacttgatcctggctgttgtggcaatggcatatgaagaacagaatcaggccaccttggaggaagcggaacagaaggaggcagagttccaacaaatgctggaacaactcaaaaagcagcaggaagaggcccaggcggtggctgccgcatctgctgcatccagagacttttccggaatcgggggtcttggagagctcctagagtcttcttccgaagcttctaaactgagctccaagtccgccaaggaatggcggaataggagaaagaagagacgacagcgcgagcatctggaaggaaacaacaagggcgaaagggacagcttccctaagtcagagtccgaggattcagttaagcgtagctcttttcttttctctatggatggaaaccgtctgactagcgataaaaaattctgctccccccaccagtctctgctttccattcgaggctcactctttagcccaaggcggaattctaaaacctccattttctccttcagagggagagccaaggatgtcggaagtgaaaacgatttcgccgatgatgaacacagcactttcgaggactcagagagccgtcgcgacagtcttttcgtgcctcacagacacggagaaagaagaaacagtaacgggaccaccactgagaccgaagtgcgtaagagaagactctcttcctaccagataagtatggaaatgctcgaagatagtagtgggcgtcagcgggcagtctcaatcgcaagcattctgacgaatacgatggaagagctggaagagtcgcgccagaagtgcccaccttgttggtacagattcgcaaacgtcttcctgatctgggactgctgcgacgcatggctgaaggtgaagcatttggtgaatctgatcgtgatggatccattcgtagacttagcgataactatttgcattgtcctcaatacacttttcatggcaatggaacactatcccatgactgagcagttttcatcagtgctgactgtgggcaatcttgtgttcaccggcatattcactgcagaaatggtactcaaaatcatagccatggatccgtactactactttcaggagggatggaatatatttgatggcatcattgtatctttatcacttatggagttgggcctgtctaacgtagaaggactttctgtcctccggtctttcaggctgctccgggtcttcaagctagccaaatcctggccaaccctgaacatgcttataaaaatcatcggaaatagcgttggcgctttagggaacctgactttggtgctggccattatagtttttatcttcgctgttgttggaatgcaactcttcggtaagagctataaggaatgcgtgtgtaagattaatgacgactgcactctcccaaggtggcacatgaacgatttttttcattctttccttatcgtctttcgcgtgctgtgtggtgagtggatcgagacaatgtgggattgtatggaagtggctggtcaaacaatgtgcctgatcgtatttatgttggtgatggtaatcggcaacctggtagtgctaaatctgttcctcgccctgttgctgagctctttcagcagtgataatctggctgcaaccgacgacgacaatgagatgaataatctgcagattgccgtggggagaatgcagaagggtatcgactacgtcaagaacaaaatgcgagagtgctttcaaaaagcattttttaggaaacctaaggtgatcgagatacacgagggcaacaaaatagacagctgcatgtccaacaatacaggaatcgagattagcaaagagttaaattatctgagggatggtaacggcacgacttccggggtcggcactggaagttccgtggagaagtacgtgattgatgagaacgactatatgtcattcatcaataacccatcactcacggttaccgtgcccatcgccgtcggtgagtccgactttgagaacctaaacacagaggagttctcttccgaatctgaactcgaggaaagtaaagagaaactcaacgcaaccagctcctccgagggatcaacagtcgacgtggttctgcccagagaaggagaacaggccgagaccgaacctgaagaggatttgaagcctgaagcttgcttcacagaaggatgcatcaaaaagttcccgttctgccaggtgtctaccgaagaagggaagggaaaaatctggtggaacctccgaaaaacgtgttatagcatcgttgaacataactggttcgagacattcattgtatttatgatactcctatcttccggcgcattggccttcgaggatatctacattgaacagcgcaaaacaattaagaccatgctggaatacgccgataaagttttcacatacatttttattctggagatgctcctgaagtgggttgcgtatggcttccagacatatttcaccaacgcttggtgttggctcgattttcttatagtggatgttagccttgtctccctggtggctaacgctctgggttactccgaactgggagctattaagtctcttaggaccctaagagctttacgccctttgcgcgctcttagcagattcgagggaatgcgtgtggtggtaaatgctctggttggagcaataccttccattatgaacgtgctgctggtgtgcttgatcttctggctgatattctctattatgggagttaatctgttcgcaggaaaattctaccattgcgtgaatatgacaacagggaacatgttcgatatttcagacgtgaataacctaagcgattgtcaagcccttggcaagcaggcccgatggaagaatgtgaaagtcaatttcgataatgttggtgctgggtacctcgccctactccaggtggctacgttcaaaggctggatggacataatgtacgccgctgttgactcccgcgacgtgaagctgcagcctgtctatgaagagaacctgtacatgtacctgtactttgttatctttattatttttggatctttcttcactctcaatcttttcatcggggtcatcatcgacaactttaaccagcaaaaaaagaagtttggcggtcaagatatttttatgacggaagaacagaaaaagtattataatgccatgaagaaacttgggagtaagaagccacagaaacctataccgcgtcctgcgaacaagttccagggcatggtattcgactttgtgacacgccaggtcttcgacatttctatcatgatcctgatttgtctgaatatggtgaccatgatggtcgaaaccgatgaccaaggcaagtacatgaccctggtgctctccaggattaatctggtattcatcgtgctgtttaccggcgagtttgtgctgaaactcgttagcttgcgtcactactatttcaccatcggatggaacatcttcgattttgtagttgtaatcctcagcattgttggaatgttcctggccgagatgatcgaaaagtactttgtgagcccaactctgtttcgagtgatcaggttggctcggatcggcagaatcctgcgcttaataaagggtgctaagggaattcgcaccctgttgtttgccctaatgatgagtcttcctgctcttttcaacataggactccttctctttcttgtgatgttcatttatgctatctttggaatgagtaatttcgcctacgtgaaaaaggaggccggaatcgatgacatgttcaacttcgaaaccttcggtaacagcatgatctgtctcttccaaatcaccacctcggccggttgggacggactgctcgccccaatcctgaattcagcccctcccgactgcgatccagacaccattcaccctggatccagtgtgaagggcgattgcgggaacccaagtgtcggaattttctttttcgttagttatattatcatctcctttctggtggtcgtcaacatgtacattgccgtcatactcgagaacttctctgttgcgactgaagagtccgctgaaccgctgagcgaagacgattttgagatgttctatgaagtttgggaaaaattcgaccccgacgccactcagtttatcgaattcagcaaactgagcgacttcgctgctgcactcgatccgcctttgctgatagcgaaacctaacaaagtgcaactgatcgccatggatctccctatggtcagcggcgataggatccactgcctggacattctgttcgcctttacaaagcgagtcctgggggaatctggcgagatggacgccctgcgcattcagatggaagataggttcatggcatcaaatccctccaaggtcagctacgaaccaattacaacaacacttaaacgaaaacaggaggaagtctccgccgcaataatccaaaggaatttcagatgttacctgcttaagcagaggttgaaaaacatatccagtaactataataaggaagccatcaaagggcgaattgacctgccgattaagcaggatatgataattgataagcttaatgggaactccactccggagaagacagatggttcctcttccaccacctcaccgcctagctatgatagtgttaccaagccagataaagagaaatttgaaaaagacaaacccgagaaggaatcgaagggtaaagaagtccgcgaaaaccagaaata

SEQ ID NO: 37258 - DNA, 6599 bp, Artificial Sequence
  derived and/or modified sequence
taccctaaccatcttggatgctgggctttgttatgctgtaattcataaggctctgttttatcagagattatggagcaagaaaactgaagccaagccacatcaaggtttgacagggatgagatacctgtcaaggattcatagtagagtggcttactgggaaaggagcaaagaatctcttctagggatattgtaagaataaatgagataattcacagaagggacctggagcttttccggaaaaaggtgctgtgactatctaaggtaattcgtatgcaagaagctacacgtaattaaatgtgcaggatgaaaagatggcacaggcactgttggtacccccaggacctgaaagcttccgcctttttactagagaatctcttgctgctatcgaaaaacgtgctgcagaagagaaagccaagaagcccaaaaaggaacaagataatgatgatgagaacaaaccaaagccaaatagtgacttggaagctggaaagaaccttccatttatttatggagacattcctccagagatggtgtcagagcccctggaggacctggatccctactatatcaataagaaaacttttatagtaatgaataaaggaaaggcaattttccgattcagtgccacctctgccttgtatattttaactccactaaaccctgttaggaaaattgctatcaagattttggtacattctttattcagcatgcttatcatgtgcactattttgaccaactgtgtatttatgaccttgagcaaccctcctgactggacaaagaatgtagagtacacattcactggaatctatacctttgagtcacttataaaaatcttggcaagagggttttgcttagaagattttacgtttcttcgtgatccatggaactggctggatttcagtgtcattgtgatggcgtatgtaacagaatttgtaagcctaggcaatgtttcagcccttcgaactttcagagtcttgagagctctgaaaactatttctgtaattccaggtttaaagaccattgtgggggccctgatccagtcggtaaagaagctttctgatgtgatgatcctgactgtgttctgtctgagcgtgtttgctctcattgggctgcagctgttcatgggcaatctgaggaataaatgtttgcagtggcccccaagcgattctgcttttgaaaccaacaccacttcctactttaatggcacaatggattcaaatgggacatttgttaatgtaacaatgagcacatttaactggaaggattacattggagatgacagtcacttttatgttttggatgggcaaaaagaccctttactctgtggaaatggctcagatgcaggccagtgtccagaaggatacatctgtgtgaaggctggtcgaaaccccaactatggctacacaagctttgacacctttagctgggctttcctgtctctatttcgactcatgactcaagactactgggaaaatctttaccagttgacattacgtgctgctgggaaaacatacatgatattttttgtcctggtcattttcttgggctcattttatttggtgaatttgatcctggctgtggtggccatggcctatgaggagcagaatcaggccaccttggaagaagcagaacaaaaagaggccgaatttcagcagatgctcgaacagcttaaaaagcaacaggaagaagctcaggcagttgcggcagcatcagctgcttcaagagatttcagtggaataggtgggttaggagagctgttggaaagttcttcagaagcatcaaagttgagttccaaaagtgctaaagaatggaggaaccgaaggaagaaaagaagacagagagagcaccttgaaggaaacaacaaaggagagagagacagctttcccaaatccgaatctgaagacagcgtcaaaagaagcagcttccttttctccatggatggaaacagactgaccagtgacaaaaaattctgctcccctcatcagtctctcttgagtatccgtggctccctgttttccccaagacgcaatagcaaaacaagcattttcagtttcagaggtcgggcaaaggatgttggatctgaaaatgactttgctgatgatgaacacagcacatttgaagacagcgaaagcaggagagactcactgtttgtgccgcacagacatggagagcgacgcaacagtaacggcaccaccacagaaacggaagtcagaaagagaaggttaagctcttaccagatttcaatggagatgctggaggattcctctggaaggcaaagagccgtgagcatagccagcattctgaccaacacaatggaagaacttgaagaatctagacagaaatgtccgccatgctggtatagatttgccaatgtgttcttgatctgggactgctgtgatgcatggttaaaagtaaaacatcttgtgaatttaattgttatggatccatttgttgatcttgccatcactatttgcattgtcttaaataccctctttatggccatggagcactaccccatgactgagcaattcagtagtgtgttgactgtaggaaacctggtctttactgggattttcacagcagaaatggttctcaagatcattgccatggatccttattactatttccaagaaggctggaatatctttgatggaattattgtcagcctcagtttaatggagcttggtctgtcaaatgtggagggattgtctgtactgcgatcattcagactgcttagagttttcaagttggcaaaatcctggcccacactaaatatgctaattaagatcattggcaattctgtgggggctctaggaaacctcaccttggtgttggccatcatcgtcttcatttttgctgtggtcggcatgcagctctttggtaagagctacaaagaatgtgtctgcaagatcaatgatgactgtacgctcccacggtggcacatgaacgacttcttccactccttcctgattgtgttccgcgtgctgtgtggagagtggatagagaccatgtgggactgtatggaggtcgctggccaaaccatgtgccttattgttttcatgttggtcatggtcattggaaaccttgtggttctgaacctctttctggccttattgttgagttcatttagctcagacaaccttgctgctactgatgatgacaatgaaatgaataatctgcagattgcagtaggaagaatgcaaaagggaattgattatgtgaaaaataagatgcgggagtgtttccaaaaagccttttttagaaagccaaaagttatagaaatccatgaaggcaataagatagacagctgcatgtccaataatactggaattgaaataagcaaagagcttaattatcttagagatgggaatggaaccaccagtggtgtaggtactggaagcagtgttgaaaaatacgtaatcgatgaaaatgattatatgtcattcataaacaaccccagcctcaccgtcacagtgccaattgctgttggagagtctgactttgaaaacttaaatactgaagagttcagcagtgagtcagaactagaagaaagcaaagagaaattaaatgcaaccagctcatctgaaggaagcacagttgatgttgttctaccccgagaaggtgaacaagctgaaactgaacccgaagaagaccttaaaccggaagcttgttttactgaaggatgtattaaaaagtttccattctgtcaagtaagtacagaagaaggcaaagggaagatctggtggaatcttcgaaaaacctgctacagtattgttgagcacaactggtttgagactttcattgtgttcatgatccttctcagtagtggtgcattggcctttgaagatatatacattgaacagcgaaagactatcaaaaccatgctagaatatgctgacaaagtctttacctatatattcattctggaaatgcttctcaaatgggttgcttatggatttcaaacatatttcactaatgcctggtgctggctagatttcttgatcgttgatgtttctttggttagcctggtagccaatgctcttggctactcagaactcggtgccatcaaatcattacggacattaagagctttaagacctctaagagccttatcccggtttgaaggcatgagggtggttgtgaatgctcttgttggagcaattccctctatcatgaatgtgctgttggtctgtctcatcttctggttgatctttagcatcatgggtgtgaatttgtttgctggcaagttctaccactgtgttaacatgacaacgggtaacatgtttgacattagtgatgttaacaatttgagtgactgtcaggctcttggcaagcaagctcggtggaaaaacgtgaaagtaaactttgataatgttggcgctggctatcttgcactgcttcaagtggccacatttaaaggctggatggatattatgtatgcagctgttgattcacgagatgttaaacttcagcctgtatatgaagaaaatctgtacatgtatttatactttgtcatctttatcatctttgggtcattcttcactctgaatctattcattggtgtcatcatagataacttcaaccagcagaaaaagaagtttggaggtcaagacatctttatgacagaggaacagaaaaaatattacaatgcaatgaagaaacttggatccaagaaacctcagaaacccatacctcgcccagcaaacaaattccaaggaatggtctttgattttgtaaccagacaagtctttgatatcagcatcatgatcctcatctgcctcaacatggtcaccatgatggtggaaacggatgaccagggcaaatacatgaccctagttttgtcccggatcaacctagtgttcattgttctgttcactggagaatttgtgctgaagctcgtctccctcagacactactacttcactataggctggaacatctttgactttgtggtggtgattctctccattgtaggtatgtttctggctgagatgatagaaaagtattttgtgtcccctaccttgttccgagtgatccgtcttgccaggattggccgaatcctacgtctgatcaaaggagcaaaggggatccgcacgctgctctttgctttgatgatgtcccttcctgcgttgtttaacatcggcctcctgctcttcctggtcatgtttatctatgccatctttgggatgtccaactttgcctatgttaaaaaggaagctggaattgatgacatgttcaactttgagacctttggcaacagcatgatctgcttgttccaaattacaacctctgctggctgggatggattgctagcacctattcttaatagtgcaccacccgactgtgaccctgacacaattcaccctggcagctcagttaagggagactgtgggaacccatctgttgggattttcttttttgtcagttacatcatcatatccttcctggttgtggtgaacatgtacatcgcggtcatcctggagaacttcagtgttgctactgaagaaagtgcagagcccctgagtgaggatgactttgagatgttctatgaggtttgggaaaagtttgatcccgatgcgacccagtttatagagttctctaaactctctgattttgcagctgccctggatcctcctcttctcatagcaaaacccaacaaagtccagcttattgccatggatctgcccatggtcagtggtgaccggatccactgtcttgatattttatttgcctttacaaagcgtgttttgggtgagagtggagagatggatgcccttcgaatacagatggaagacaggtttatggcatcaaacccctccaaagtctcttatgagcctattacaaccactttgaaacgtaaacaagaggaggtgtctgccgctatcattcagcgtaatttcagatgttatcttttaaagcaaaggttaaaaaatatatcaagtaactataacaaagaggcaattaaagggaggattgacttacctataaaacaagacatgattattgacaaactaaatgggaactccactccagaaaaaacagatgggagttcctctaccacctctcctccttcctatgatagtgtaacaaaaccagacaaggaaaagtttgagaaagacaaaccagaaaaagaaagcaaaggaaaagaggtcagagaaaatcaaaagtaaaaagaaacaaagaattatctttgtgatcaattgtttacagcctatgaaggtaaagtatatgtgtcaactggacttcaagaggaggtccatgccaaactgactgttttaacaaatactcatagtcagtgcctatacaagacagtgaagtgacctctctgtcactgcaactctgtgaagcagggtatcaacattgacaagaggttgctgtttttattaccagctgacactgctgaggagaaacccaatggctacctagactatagggatagttgtgcaaagtgaacattgtaactacaccaaacacctttagtacagtccttgcatccattctatttttaacttccatatctgccatatttttacaaaatttgttctagtgcatttccatggtccccaattcatagtttattcataatgctatgtcactatttt

SEQ ID NO: 37259 - DNA, 5856 bp, Artificial Sequence
  derived and/or modified sequence
atggcccaggccctgctggtgccccccggccccgagagcttcagactgttcaccagagagagcctggccgccatcgagaagagagccgccgaggagaaggccaagaagcccaagaaggagcaggacaacgacgacgagaacaagcccaagcccaacagcgacctggaggccggcaagaacctgcccttcatctacggcgacatcccccccgagatggtgagcgagcccctggaggacctggacccctactacatcaacaagaagaccttcatcgtgatgaacaagggcaaggccatcttcagattcagcgccaccagcgccctgtacatcctgacccccctgaaccccgtgagaaagatcgccatcaagatcctggtgcacagcctgttcagcatgctgatcatgtgcaccatcctgaccaactgcgtgttcatgaccctgagcaacccccccgactggaccaagaacgtggagtacaccttcaccggcatctacaccttcgagagcctgatcaagatcctggccagaggcttctgcctggaggacttcaccttcctgagagacccctggaactggctggacttcagcgtgatcgtgatggcctacgtgaccgagttcgtgagcctgggcaacgtgagcgccctgagaaccttcagagtgctgagagccctgaagaccatcagcgtgatccccggcctgaagaccatcgtgggcgccctgatccagagcgtgaagaagctgagcgacgtgatgatcctgaccgtgttctgcctgagcgtgttcgccctgatcggcctgcagctgttcatgggcaacctgagaaacaagtgcctgcagtggccccccagcgacagcgccttcgagaccaacaccaccagctacttcaacggcaccatggacagcaacggcaccttcgtgaacgtgaccatgagcaccttcaactggaaggactacatcggcgacgacagccacttctacgtgctggacggccagaaggaccccctgctgtgcggcaacggcagcgacgccggccagtgccccgagggctacatctgcgtgaaggccggcagaaaccccaactacggctacaccagcttcgacaccttcagctgggccttcctgagcctgttcagactgatgacccaggactactgggagaacctgtaccagctgaccctgagagccgccggcaagacctacatgatcttcttcgtgctggtgatcttcctgggcagcttctacctggtgaacctgatcctggccgtggtggccatggcctacgaggagcagaaccaggccaccctggaggaggccgagcagaaggaggccgagttccagcagatgctggagcagctgaagaagcagcaggaggaggcccaggccgtggccgccgccagcgccgccagcagagacttcagcggcatcggcggcctgggcgagctgctggagagcagcagcgaggccagcaagctgagcagcaagagcgccaaggagtggagaaacagaagaaagaagagaagacagagagagcacctggagggcaacaacaagggcgagagagacagcttccccaagagcgagagcgaggacagcgtgaagagaagcagcttcctgttcagcatggacggcaacagactgaccagcgacaagaagttctgcagcccccaccagagcctgctgagcatcagaggcagcctgttcagccccagaagaaacagcaagaccagcatcttcagcttcagaggcagagccaaggacgtgggcagcgagaacgacttcgccgacgacgagcacagcaccttcgaggacagcgagagcagaagagacagcctgttcgtgccccacagacacggcgagagaagaaacagcaacggcaccaccaccgagaccgaggtgagaaagagaagactgagcagctaccagatcagcatggagatgctggaggacagcagcggcagacagagagccgtgagcatcgccagcatcctgaccaacaccatggaggagctggaggagagcagacagaagtgccccccctgctggtacagattcgccaacgtgttcctgatctgggactgctgcgacgcctggctgaaggtgaagcacctggtgaacctgatcgtgatggaccccttcgtggacctggccatcaccatctgcatcgtgctgaacaccctgttcatggccatggagcactaccccatgaccgagcagttcagcagcgtgctgaccgtgggcaacctggtgttcaccggcatcttcaccgccgagatggtgctgaagatcatcgccatggacccctactactacttccaggagggctggaacatcttcgacggcatcatcgtgagcctgagcctgatggagctgggcctgagcaacgtggagggcctgagcgtgctgagaagcttcagactgctgagagtgttcaagctggccaagagctggcccaccctgaacatgctgatcaagatcatcggcaacagcgtgggcgccctgggcaacctgaccctggtgctggccatcatcgtgttcatcttcgccgtggtgggcatgcagctgttcggcaagagctacaaggagtgcgtgtgcaagatcaacgacgactgcaccctgcccagatggcacatgaacgacttcttccacagcttcctgatcgtgttcagagtgctgtgcggcgagtggatcgagaccatgtgggactgcatggaggtggccggccagaccatgtgcctgatcgtgttcatgctggtgatggtgatcggcaacctggtggtgctgaacctgttcctggccctgctgctgagcagcttcagcagcgacaacctggccgccaccgacgacgacaacgagatgaacaacctgcagatcgccgtgggcagaatgcagaagggcatcgactacgtgaagaacaagatgagagagtgcttccagaaggccttcttcagaaagcccaaggtgatcgagatccacgagggcaacaagatcgacagctgcatgagcaacaacaccggcatcgagatcagcaaggagctgaactacctgagagacggcaacggcaccaccagcggcgtgggcaccggcagcagcgtggagaagtacgtgatcgacgagaacgactacatgagcttcatcaacaaccccagcctgaccgtgaccgtgcccatcgccgtgggcgagagcgacttcgagaacctgaacaccgaggagttcagcagcgagagcgagctggaggagagcaaggagaagctgaacgccaccagcagcagcgagggcagcaccgtggacgtggtgctgcccagagagggcgagcaggccgagaccgagcccgaggaggacctgaagcccgaggcctgcttcaccgagggctgcatcaagaagttccccttctgccaggtgagcaccgaggagggcaagggcaagatctggtggaacctgagaaagacctgctacagcatcgtggagcacaactggttcgagaccttcatcgtgttcatgatcctgctgagcagcggcgccctggccttcgaggacatctacatcgagcagagaaagaccatcaagaccatgctggagtacgccgacaaggtgttcacctacatcttcatcctggagatgctgctgaagtgggtggcctacggcttccagacctacttcaccaacgcctggtgctggctggacttcctgatcgtggacgtgagcctggtgagcctggtggccaacgccctgggctacagcgagctgggcgccatcaagagcctgagaaccctgagagccctgagacccctgagagccctgagcagattcgagggcatgagagtggtggtgaacgccctggtgggcgccatccccagcatcatgaacgtgctgctggtgtgcctgatcttctggctgatcttcagcatcatgggcgtgaacctgttcgccggcaagttctaccactgcgtgaacatgaccaccggcaacatgttcgacatcagcgacgtgaacaacctgagcgactgccaggccctgggcaagcaggccagatggaagaacgtgaaggtgaacttcgacaacgtgggcgccggctacctggccctgctgcaggtggccaccttcaagggctggatggacatcatgtacgccgccgtggacagcagagacgtgaagctgcagcccgtgtacgaggagaacctgtacatgtacctgtacttcgtgatcttcatcatcttcggcagcttcttcaccctgaacctgttcatcggcgtgatcatcgacaacttcaaccagcagaagaagaagttcggcggccaggacatcttcatgaccgaggagcagaagaagtactacaacgccatgaagaagctgggcagcaagaagccccagaagcccatccccagacccgccaacaagttccagggcatggtgttcgacttcgtgaccagacaggtgttcgacatcagcatcatgatcctgatctgcctgaacatggtgaccatgatggtggagaccgacgaccagggcaagtacatgaccctggtgctgagcagaatcaacctggtgttcatcgtgctgttcaccggcgagttcgtgctgaagctggtgagcctgagacactactacttcaccatcggctggaacatcttcgacttcgtggtggtgatcctgagcatcgtgggcatgttcctggccgagatgatcgagaagtacttcgtgagccccaccctgttcagagtgatcagactggccagaatcggcagaatcctgagactgatcaagggcgccaagggcatcagaaccctgctgttcgccctgatgatgagcctgcccgccctgttcaacatcggcctgctgctgttcctggtgatgttcatctacgccatcttcggcatgagcaacttcgcctacgtgaagaaggaggccggcatcgacgacatgttcaacttcgagaccttcggcaacagcatgatctgcctgttccagatcaccaccagcgccggctgggacggcctgctggcccccatcctgaacagcgccccccccgactgcgaccccgacaccatccaccccggcagcagcgtgaagggcgactgcggcaaccccagcgtgggcatcttcttcttcgtgagctacatcatcatcagcttcctggtggtggtgaacatgtacatcgccgtgatcctggagaacttcagcgtggccaccgaggagagcgccgagcccctgagcgaggacgacttcgagatgttctacgaggtgtgggagaagttcgaccccgacgccacccagttcatcgagttcagcaagctgagcgacttcgccgccgccctggacccccccctgctgatcgccaagcccaacaaggtgcagctgatcgccatggacctgcccatggtgagcggcgacagaatccactgcctggacatcctgttcgccttcaccaagagagtgctgggcgagagcggcgagatggacgccctgagaatccagatggaggacagattcatggccagcaaccccagcaaggtgagctacgagcccatcaccaccaccctgaagagaaagcaggaggaggtgagcgccgccatcatccagagaaacttcagatgctacctgctgaagcagagactgaagaacatcagcagcaactacaacaaggaggccatcaagggcagaatcgacctgcccatcaagcaggacatgatcatcgacaagctgaacggcaacagcacccccgagaagaccgacggcagcagcagcaccaccagcccccccagctacgacagcgtgaccaagcccgacaaggagaagttcgagaaggacaagcccgagaaggagagcaagggcaaggaggtgagagagaaccagaagtag

SEQ ID NO: 37260 - protein, 154 aa, Artificial Sequence
  derived and/or modified sequence
MDFLHRNGVLIIQHLQKDYRAYYTFLNFMSNVGDPRNIFFIYFPLCFQFNQTVGTKMIWVAVIGDWLNLIFKWILFGHRPYWWVQETQIYPNHSSPCLEQFPTTCETGPGSPSGHAMGASCVWYVMVTAALSHTVCGMDKFSITLHRHAGGRGL

SEQ ID NO: 37261 - DNA, 465 bp, Artificial Sequence
  derived and/or modified sequence
atggactttctccacaggaatggcgttctgattatccaacacctgcagaaagactacagagcatattacaccttcctcaatttcatgagcaatgtgggagatcccaggaacatcttctttatctacttcccgctctgttttcagtttaatcagaccgttgggacaaaaatgatctgggtggcagttatcggggattggctgaatttaatttttaaatggatcctcttcgggcataggccttactggtgggtgcaagaaacacagatttatcccaatcacagcagcccatgtctggaacagttcccgaccacctgcgagactgggcccggctctccatctgggcatgccatgggcgcatcctgcgtttggtacgttatggtcacagctgcgctgtcccataccgtttgcggcatggacaaattctccataaccttgcaccgtcacgcaggcggtcgggggctttag

SEQ ID NO: 37262 - DNA, 645 bp, Artificial Sequence
  derived and/or modified sequence
agctccaattgctctatgtttagaattgcctctttttcaagatggatttccttcacaggaatggagtgctcataattcagcatttgcagaaggactaccgagcttactacacttttctaaattttatgtccaatgttggagaccccaggaatatctttttcatttattttccactttgttttcaatttaatcagacagttggaaccaagatgatatgggtagcagtcattggggattggttaaatcttatatttaaatggatattatttggtcatcgaccttactggtgggtccaagaaactcagatttacccaaatcactcaagtccatgccttgaacagttccctactacatgtgaaacaggtccaggaagtccatctggccatgcaatgggcgcatcctgtgtctggtatgtcatggtaaccgctgccctgagccacactgtctgtgggatggataagttctctatcactctgcacaggcatgctggtggcagaggcctttgaacacactccaggcatccaaacggccagtctgggcacatacctgaagaccaacctctttctcttcctgtttgcagttggcttttacctgcttcttagggtgctcaacattgacctgctgtggtccgtgcccatagccaaa

SEQ ID NO: 37263 - DNA, 465 bp, Artificial Sequence
  derived and/or modified sequence
atggacttcctgcacagaaatggagtgctgatcatccagcacctgcagaaggactaccgggcctactacaccttcctgaacttcatgagcaatgtgggggaccccaggaacatcttcttcatctacttccccctgtgcttccagttcaaccagacagtgggcaccaagatgatctgggtggccgtgattggagactggctgaacctgatcttcaagtggatcctgtttggccaccggccctactggtgggtgcaggagacccagatctaccccaaccacagcagcccctgcctggagcagttccccaccacctgtgaaacaggccctggcagccccagcggccacgccatgggcgccagctgtgtgtggtacgtgatggtgacagctgccctgagccacacagtgtgtggcatggacaagttcagcatcaccctgcacagacatgctgggggccggggcctgtag

SEQ ID NO: 37264 - DNA, 465 bp, Artificial Sequence
  derived and/or modified sequence
atggacttcctgcaccggaacggcgtgctgatcatccagcacctgcagaaagactaccgagcttattacacctttcttaacttcatgagtaacgttggggacccacgtaacattttttttatctattttcccctgtgctttcagtttaaccaaactgtgggaacaaagatgatttgggtggccgtcatcggcgactggttgaacctgatttttaagtggattctgttcggccaccgaccctattggtgggtgcaggagacgcaaatctaccccaatcacagctctccatgtctcgaacagttccctaccacatgcgagacaggacccggatctccttctggacatgctatgggtgcaagttgtgtctggtatgtcatggtgactgcagccttaagccacaccgtctgcggaatggacaagttctcaataaccctgcatcggcacgctgggggacggggactgtag

SEQ ID NO: 37265 - DNA, 465 bp, Artificial Sequence
  derived and/or modified sequence
atggatttcctgcataggaacggcgtgctgatcatccaacacctgcagaaagactatcgggcatattacacctttctgaactttatgtctaacgtcggggatccacgcaatatctttttcatttactttccactgtgctttcagttcaaccaaacagttggcaccaaaatgatttgggtggccgttatcggggattggctgaacctgattttcaagtggatactcttcggacatcgcccatattggtgggttcaggagacacagatatatccaaatcattccagcccgtgtttagaacagttccccactacctgtgagacgggtccgggtagccccagcggccacgcgatgggcgctagttgtgtctggtatgttatggtgacggccgctcttagccacactgtctgtggaatggataaatttagcatcactctgcaccgccacgcgggaggtcggggactctag

SEQ ID NO: 37266 - DNA, 465 bp, Artificial Sequence
  derived and/or modified sequence
atggacttcctgcacagaaacggcgtgctgatcatccagcacctgcagaaggactacagagcctactacaccttcctgaacttcatgagcaacgtgggcgaccccagaaacatcttcttcatctacttccccctgtgcttccagttcaaccagaccgtgggcaccaagatgatctgggtggccgtgatcggcgactggctgaacctgatcttcaagtggatcctgttcggccacagaccctactggtgggtgcaggagacccagatctaccccaaccacagcagcccctgcctggagcagttccccaccacctgcgagaccggccccggcagccccagcggccacgccatgggcgccagctgcgtgtggtacgtgatggtgaccgccgccctgagccacaccgtgtgcggcatggacaagttcagcatcaccctgcacagacacgccggcggcagaggcctgtag

SEQ ID NO: 37267 - protein, 792 aa, Artificial Sequence
  derived and/or modified sequence
MAGLTAAAPRPGVLLLLLSILHPSRPGGVPGAIPGGVPGGVFYPGAGLGALGGGALGPGGKPLKPVPGGLAGAGLGAGLGAFPAVTFPGALVPGGVADAAAAYKAAKAGAGLGGVPGVGGLGVSAGAVVPQPGAGVKPGKVPGVGLPGVYPGGVLPGARFPGVGVLPGVPTGAGVKPKAPGVGGAFAGIPGVGPFGGPQPGVPLGYPIKAPKLPGGYGLPYTTGKLPYGYGPGGVAGAAGKAGYPTGTGVGPQAAAAAAAKAAAKFGAGAAGVLPGVGGAGVPGVPGAIPGIGGIAGVGTPAAAAAAAAAAKAAKYGAAAGLVPGGPGFGPGVVGVPGAGVPGVGVPGAGIPVVPGAGIPGAAVPGVVSPEAAAKAAAKAAKYGARPGVGVGGIPTYGVGAGGFPGFGVGVGGIPGVAGVPGVGGVPGVGGVPGVGISPEAQAAAAAKAAKYGAAGAGVLGGLVPGAPGAVPGVPGTGGVPGVGTPAAAAAKAAAKAAQFALLNLAGLVPGVGVAPGVGVAPGVGVAPGVGLAPGVGVAPGVGVAPGVGVAPGIGPGGVAAAAKSAAKVAAKAQLRAAAGLGAGIPGLGVGVGVPGLGVGAGVPGLGVGAGVPGFGAGADEGVRRSLSPELREGDPSSSQHLPSTPSSPRVPGALAAAKAAKYGAAVPGVLGGLGALGGVGIPGGVVGAGPAAAAAAAKAAAKAAQFGLVGAAGLGGLGVGGLGVPGVGGLGGIPPAAAAKAAKYGAAGLGGVLGGAGQFPLGGVAARPGFGLSPIFPGGACLGKACGRKRK

SEQ ID NO: 37268 - protein, 677 aa, Artificial Sequence
  derived and/or modified sequence
MAGLTAAAPRPGVLLLLLSILHPSRPGGVPGAIPGGVPGGVFYPALGPGGKPLKPVPGGLAGAGLGAGLGAFPAVTFPGALVPGGVADAAAAYKAAKAGAGLGGVPGVGGLGVSAGAVVPQPGAGVKPGKVPGVGLPGVYPGGVLPGARFPGVGVLPGVPTGAGVKPKAPGVGGAFAGIPGVGPFGGPQPGVPLGYPIKAPKLPGGYGLPYTTGKLPYGYGPGGVAGAAGKAGYPTGTGVGPQAAAAAAAKAAAKFGAGAAGVLPGVGGAGVPGVPGAIPGIGGIAGVGTPAAAAAAAAAAKAAKYGAAAGLVPGGPGFGPGVVGVPGAGVPGVGVPGAGIPVVPGAGIPGAAVPGVVSPEAAAKAAAKAAKYGARPGVGVGGIPTYGVGAGGFPGFGVGVGGIPGVAGVPGVGGVPGVGGVPGVGISPEAQAAAAAKAAKYGLVPGVGVAPGVGVAPGVGVAPGVGLAPGVGVAPGVGVAPGVGVAPGIGPGGVAAAAKSAAKVAAKAQLRAAAGLGAGIPGLGVGVGVPGLGVGAGVPGLGVGAGVPGFGAVPGALAAAKAAKYGAAVPGVLGGLGALGGVGIPGGVVGAGPAAAAAAAKAAAKAAQFGLVGAAGLGGLGVGGLGVPGVGGLGGIPPAAAAKAAKYGVAARPGFGLSPIFPGGACLGKACGRKRK

SEQ ID NO: 37269 - protein, 692 aa, Artificial Sequence
  derived and/or modified sequence
MAGLTAAAPRPGVLLLLLSILHPSRPGGVPGAIPGGVPGGVFYPGAGLGALGGGALGPGGKPLKPVPGGLAGAGLGAGLGAFPAVTFPGALVPGGVADAAAAYKAAKAGAGLGGVPGVGGLGVSAAPSVPGAVVPQPGAGVKPGKVPGVGLPGVYPGGVLPGARFPGVGVLPGVPTGAGVKPKAPGVGGAFAGIPGVGPFGGPQPGVPLGYPIKAPKLPGGYGLPYTTGKLPYGYGPGGVAGAAGKAGYPTGTGVGPQAAAAAAAKAAAKFGAGAAGVLPGVGGAGVPGVPGAIPGIGGIAGVGTPAAAAAAAAAAKAAKYGAAAGLVPGGPGFGPGVVGVPGAGVPGVGVPGAGIPVVPGAGIPGAAVPGVVSPEAAAKAAAKAAKYGARPGVGVGGIPTYGVGAGGFPGFGVGVGGIPGVAGVPGVGGVPGVGGVPGVGISPEAQAAAAAKAAKYGLVPGVGVAPGVGVAPGVGVAPGVGLAPGVGVAPGVGVAPGVGVAPGIGPGGVAAAAKSAAKVAAKAQLRAAAGLGAGIPGLGVGVGVPGLGVGAGVPGLGVGAGVPGFGAVPGALAAAKAAKYGAAVPGVLGGLGALGGVGIPGGVVGAGPAAAAAAAKAAAKAAQFGLVGAAGLGGLGVGGLGVPGVGGLGGIPPAAAAKAAKYGVAARPGFGLSPIFPGGACLGKACGRKRK

SEQ ID NO: 37270 - protein, 711 aa, Artificial Sequence
  derived and/or modified sequence
MAGLTAAAPRPGVLLLLLSILHPSRPGGVPGAIPGGVPGGVFYPGAGLGALGGGALGPGGKPLKPVPGGLAGAGLGAGLGAFPAVTFPGALVPGGVADAAAAYKAAKAGAGLGGVPGVGGLGVSAAPSVPGAVVPQPGAGVKPGKVPGVGLPGVYPGGVLPGARFPGVGVLPGVPTGAGVKPKAPGVGGAFAGIPGVGPFGGPQPGVPLGYPIKAPKLPGGYGLPYTTGKLPYGYGPGGVAGAAGKAGYPTGTGVGPQAAAAAAAKAAAKFGAGAAGVLPGVGGAGVPGVPGAIPGIGGIAGVGTPAAAAAAAAAAKAAKYGAAAGLVPGGPGFGPGVVGVPGAGVPGVGVPGAGIPVVPGAGIPGAAVPGVVSPEAAAKAAAKAAKYGARPGVGVGGIPTYGVGAGGFPGFGVGVGGIPGVAGVPGVGGVPGVGGVPGVGISPEAQAAAAAKAAKYGVGTPAAAAAKAAAKAAQFGLVPGVGVAPGVGVAPGVGVAPGVGLAPGVGVAPGVGVAPGVGVAPGIGPGGVAAAAKSAAKVAAKAQLRAAAGLGAGIPGLGVGVGVPGLGVGAGVPGLGVGAGVPGFGAVPGALAAAKAAKYGAAVPGVLGGLGALGGVGIPGGVVGAGPAAAAAAAKAAAKAAQFGLVGAAGLGGLGVGGLGVPGVGGLGGIPPAAAAKAAKYGVAARPGFGLSPIFPGGACLGKACGRKRK

SEQ ID NO: 37271 - protein, 705 aa, Artificial Sequence
  derived and/or modified sequence
MAGLTAAAPRPGVLLLLLSILHPSRPGGVPGAIPGGVPGGVFYPGAGLGALGGGALGPGGKPLKPVPGGLAGAGLGAGLGAFPAVTFPGALVPGGVADAAAAYKAAKAGAGLGGVPGVGGLGVSAGAVVPQPGAGVKPGKVPGVGLPGVYPGGVLPGARFPGVGVLPGVPTGAGVKPKAPGVGGAFAGIPGVGPFGGPQPGVPLGYPIKAPKLPGGYGLPYTTGKLPYGYGPGGVAGAAGKAGYPTGTGVGPQAAAAAAAKAAAKFGAGAAGVLPGVGGAGVPGVPGAIPGIGGIAGVGTPAAAAAAAAAAKAAKYGAAAGLVPGGPGFGPGVVGVPGAGVPGVGVPGAGIPVVPGAGIPGAAVPGVVSPEAAAKAAAKAAKYGARPGVGVGGIPTYGVGAGGFPGFGVGVGGIPGVAGVPGVGGVPGVGGVPGVGISPEAQAAAAAKAAKYGLVPGVGVAPGVGVAPGVGVAPGVGLAPGVGVAPGVGVAPGVGVAPGIGPGGVAAAAKSAAKVAAKAQLRAAAGLGAGIPGLGVGVGVPGLGVGAGVPGLGVGAGVPGFGAVPGALAAAKAAKYGAAVPGVLGGLGALGGVGIPGGVVGAGPAAAAAAAKAAAKAAQFGLVGAAGLGGLGVGGLGVPGVGGLGGIPPAAAAKAAKYGAAGLGGVLGGAGQFPLGGVAARPGFGLSPIFPGGACLGKACGRKRK

SEQ ID NO: 37272 - protein, 671 aa, Artificial Sequence
  derived and/or modified sequence
MTIRHQGQQYRPRMAFLQKIEALVKDMQNPETGVRMQNQRVLVTSVPHAMTGSDVLQWIVQRLWISSLEAQNLGNFIVRYGYIYPLQDPKNLILKPDGSLYRFQTPYFWPTQQWPAEDTDYAIYLAKRNIKKKGILEEYEKENYNFLNQKMNYKWDFVIMQAKEQYRAGKERNKADRYALDCQEKAYWLVHRCPPGMDNVLDYGLDRVTNPNEVKKQTVVAVKKEIMYYQQALMRSTVKSSVSLGGIVKYSEQFSSNDAIMSGCLPSNPWITDDTQFWDLNAKLVEIPTKMRVERWAFNFSELIRDPKGRQSFQYFLKKEFSGENLGFWEACEDLKYGDQSKVKEKAEEIYKLFLAPGARRWINIDGKTMDITVKGLKHPHRYVLDAAQTHIYMLMKKDSYARYLKSPIYKDMLAKAIEPQETTKKSSTLPFMRRHLRSSPSPVILRQLEEEAKAREAANTVDITQPGQHMAPSPHLTVYTGTCMPPSPSSPFSSSCRSPRKPFASPSRFIRRPSTTICPSPIRVALESSSGLEQKGECSGSMAPRGPSVTESSEASLDTSWPRSRPRAPPKARMALSFSRFLRRGCLASPVFARLSPKCPAVSHGRVQPLGDVGQQLPRLKSKRVANFFQIKMDVPTGSGTCLMDSEDAGTGESGDRATEKEVICPWESL

SEQ ID NO: 37273 - DNA, 2016 bp, Artificial Sequence
  derived and/or modified sequence
atgaccattcgtcaccagggccagcaatatcgaccaaggatggcgttcctccagaaaatcgaagcactggtaaaggacatgcagaacccggaaaccggcgttcgcatgcagaaccagcgagtgctcgtgacctccgtgcctcacgccatgaccggcagcgatgtgcttcagtggatcgttcaaaggctatggatcagctctctcgaggctcagaaccttggtaatttcatcgtgcgctacggatacatttaccctctccaggaccctaagaatctcattctgaaacccgatggcagcttgtaccgctttcaaacaccctacttctggccgacccaacaatggcccgctgaagacacggattatgccatctacctagctaaacgtaatattaagaagaaagggatcctggaggagtatgaaaaagaaaattacaattttctgaaccagaagatgaactacaaatgggacttcgtgatcatgcaggcaaaggagcagtatcgggcaggcaaagagagaaacaaggccgaccgctatgctctggactgccaagaaaaagcttattggttggtgcacaggtgtcctcccggtatggacaatgtgctggattatggcctggaccgagttactaatcctaatgaagtgaagaaacagaccgtcgttgcggtaaaaaaagagatcatgtattaccagcaggcccttatgcgctccaccgttaagtcctccgtgtcgctcggaggaattgttaagtactctgagcaattctccagcaacgacgccataatgtccggctgtctcccgagcaacccatggatcaccgacgatacacagttctgggatcttaacgccaaactggtcgaaattccaaccaagatgcgcgtcgagaggtgggcgtttaatttcagcgagctcattagagaccccaaggggcgtcagagctttcaatacttcctgaagaaggaattttctggcgagaacctgggattctgggaggcctgtgaagacctgaagtacggcgaccagtctaaggttaaggagaaggccgaagagatatacaagctgtttctggcgccaggcgcgaggcggtggatcaacatcgatggaaaaactatggacataacagtcaagggcctgaagcaccctcataggtatgtgctggacgcagctcagacccacatttacatgcttatgaaaaaagattcatacgcaaggtatctgaagtctccaatctataaagatatgttggcaaaagccattgagccccaggagacaacaaagaaaagcagcacacttcctttcatgcgaaggcacctgcgatcctcaccctctcccgttatactccggcaattggaggaggaagccaaagcgagagaagccgccaatacggtagatataacacagccgggccagcacatggccccctctccacacctgactgtatacaccgggacgtgtatgccccccagcccatcaagcccattcagtagctcttgcagatctcccagaaagccattcgcttcgccaagcaggtttatcagacgcccctctaccaccatctgtccttcacctatcagggtcgcactggaaagtagctccgggctggaacagaaaggcgagtgctcaggctctatggccccgagagggccctcagttacagaaagctcagaggcctccctggacacatcatggccgcggtcccgccctcgcgcacctccaaaggctcggatggcgctgagcttttctcgttttctgcggagagggtgcctagcttcccccgtcttcgcaagactctcacccaaatgccccgccgttagtcatggcagagtgcaacccctgggagacgtcgggcagcagcttcctcgcctgaaatcgaaacgggtggccaattttttccagatcaagatggacgtccctacaggctctgggacttgtttgatggacagcgaagatgccggaactggtgaatccggggatcgggccacagagaaagaggttatttgtccgtgggagtcactctag

SEQ ID NO: 37274 - DNA, 2016 bp, Artificial Sequence
  derived and/or modified sequence
atgaccatccgccaccagggccagcagtaccggcccaggatggccttcctgcagaagattgaggccctggtgaaggacatgcagaaccctgagaccggggtgaggatgcagaaccagagggtgctggtgacctctgtgccccacgccatgactggaagtgatgtgctgcagtggatcgtgcagaggctgtggatcagcagcctggaggcccagaacctgggcaacttcatcgtgcgctatggctacatctaccccctgcaggaccccaagaacctgatcctgaagccagatggcagcctgtaccgcttccagaccccctacttctggcccacccagcagtggccagctgaggacacagattatgccatctacctggccaagaggaacatcaagaagaagggcatcctggaggagtatgagaaggagaactacaacttcctgaaccagaagatgaactacaagtgggactttgtgatcatgcaggccaaggagcagtaccgggccggcaaggagaggaacaaggctgacagatatgccctggactgccaggagaaggcctactggctggtgcaccgctgccccccaggcatggacaacgtgctggactatggcctggacagagtgaccaaccccaatgaggtgaagaagcagacagtggtggccgtgaagaaggagatcatgtactaccagcaggccctgatgaggagcacagtgaagagctctgtgtccctgggcggcatcgtgaagtacagcgagcagttcagcagcaatgatgccatcatgagcggctgcctgcccagcaacccctggatcacagatgacacccagttctgggacctgaatgccaagctggtggagatccccaccaagatgagggtggagcgctgggccttcaacttcagcgagctgatccgggaccccaagggccggcagagcttccagtacttcctgaagaaggagttcagcggggagaacctgggcttctgggaggcctgtgaggacctgaagtatggagaccagagcaaggtgaaggagaaggccgaggagatctacaagctgttcctggcccctggggcccggcgctggatcaacattgatggcaagaccatggacatcaccgtgaagggcctgaagcacccccacagatatgtgctggatgctgcccagacccacatctacatgctgatgaagaaggacagctatgcccgctacctgaagagccccatctacaaggacatgctggccaaggccatcgagccccaggagaccaccaagaagagcagcaccctgcccttcatgaggaggcacctgcggagcagccccagccctgtgatcctgcggcagctggaggaggaggccaaggcccgggaggccgccaacacagtggacatcacccagcccggccagcacatggcccccagcccccacctgactgtgtacacaggcacctgcatgccacccagccccagcagccccttcagcagcagctgccgcagccccaggaagccctttgccagccccagccgcttcatccggcggcccagcaccaccatctgccccagccccatccgggtggccctggagagcagcagcggcctggagcagaagggggagtgcagcggctccatggccccccggggccccagcgtgacagagagcagcgaggccagcctggacacctcctggcccaggagccggccccgggccccacccaaggccaggatggccctgtccttcagccgcttcctgcggcggggctgcctggccagccctgtgtttgcccggctgagccccaagtgcccagctgtgagccacggccgggtgcagcccctgggagatgtgggccagcagctgccccggctgaagagcaagagggtggccaacttcttccagatcaagatggatgtgcccaccggcagcggcacctgcctgatggattctgaagatgctggcaccggggagagcggggaccgggccacagagaaggaggtgatctgcccctgggagagcctgtag

SEQ ID NO: 37275 - DNA, 2016 bp, Artificial Sequence
  derived and/or modified sequence
atgaccatccggcaccagggccagcagtaccggccccggatggcctttctacaaaagatcgaagctctggtcaaggatatgcagaatcccgagaccggcgttaggatgcagaatcagcgggtcctcgtgacatctgttccccacgcaatgactggcagcgacgttctgcagtggatagtgcagaggctgtggatcagcagtctggaagcccagaacctcggcaacttcattgtaagatacggatacatctaccctcttcaggacccaaagaatctaattttaaaacccgatggcagtttgtaccggttccagaccccgtacttttggccgacccagcaatggcctgccgaagatacagactatgccatctatctcgctaagaggaacatcaagaaaaaaggaattctggaggagtacgaaaaagaaaattacaattttcttaatcagaagatgaattacaaatgggatttcgtgatcatgcaggccaaggagcagtatcgggctggtaaggagagaaataaagcggaccggtatgctctcgattgccaggaaaaagcgtactggctggtccacaggtgtcctccagggatggacaatgtgctggattatggcctggacagggtaaccaacccgaacgaggtgaaaaaacaaaccgttgttgcagtgaagaaagagatcatgtactatcagcaggcgctgatgagatccaccgttaaatctagcgtgtctctcggcggaattgtcaagtactccgagcagtttagttccaatgacgcaatcatgtccggatgcttgccttctaatccctggatcacagacgacacacagttctgggacctgaacgccaagctcgttgaaatacctaccaaaatgcgcgtcgagcggtgggcatttaatttcagtgaactaatccgagacccaaaaggccgccagtcttttcaatatttcctcaagaaggagttctctggggagaacctgggtttttgggaagcgtgcgaggacctcaaatatggggaccagagtaaggttaaggagaaagccgaggagatatacaagctgttcctcgcccccggagccaggaggtggatcaacatcgacggaaaaaccatggacattactgtgaaaggcctgaagcatcctcacagatacgtgctggacgctgctcagacccacatctacatgttgatgaaaaaggattcctacgcccgctacctgaagtctccaatatacaaagacatgctcgccaaagcgattgaaccgcaggaaaccacgaaaaaatccagtactctcccattcatgagacggcacctgcgctcttctccttcccccgtaatacttcggcaacttgaagaggaggccaaggctcgagaagcggccaacaccgtcgacatcacccagcccggacagcacatggccccgtcaccccaccttaccgtgtatacgggcacctgtatgcctccttctccaagttcccccttctctagcagctgccggtcacccagaaaaccgttcgcctctccgtccaggttcattaggaggcccagtaccaccatttgtccgagcccaataagagttgctctagagtctagctctggtcttgaacaaaaaggagaatgcagcgggagcatggcaccaaggggaccctccgtcactgagagttcggaggccagtttggacacatcctggccacgaagccgcccacgggcccctcccaaagcccgaatggctctgtcctttagccgcttcctgcgccgagggtgcctggcatcgcctgtgttcgcacgccttagcccaaaatgcccagccgtaagtcatgggcgcgtgcagccacttggtgatgtgggtcaacagctgcctagactgaaatccaagcgggtcgcaaatttcttccagataaaaatggacgtccctaccggctctggtacgtgtctgatggactccgaggatgccggaactggagagagcggggaccgggctacagagaaggaagtcatttgcccttgggagtcactgtag

SEQ ID NO: 37276 - DNA, 2016 bp, Artificial Sequence
  derived and/or modified sequence
atgaccatcaggcaccaaggccagcaatatagaccccgtatggcgtttctgcagaagatcgaggctctggtgaaggatatgcagaaccctgagaccggcgtgagaatgcaaaaccaaagagtgctggttactagtgtaccccatgccatgactggatccgatgtactgcagtggatagtgcagcggctttggatttcttctttagaggctcagaatttgggcaacttcattgtgaggtacggctatatctatccattgcaggacccaaaaaatctgatattgaagccagacggaagcttgtaccgctttcaaacaccctatttttggcccacacaacagtggccagcggaagataccgattacgccatctatcttgcaaagcggaatatcaagaaaaaaggtatcttggaggagtatgaaaaggagaattataacttcctcaaccagaaaatgaactacaaatgggattttgttatcatgcaagccaaggagcagtacagagctgggaaggagcgcaacaaagcagaccgctacgccttggattgtcaagagaaggcatattggttagtgcacaggtgtcctcccggtatggataacgtcctggattacgggctggatagagtcaccaatcctaatgaggtgaagaagcaaacggtggtggccgtgaaaaaagaaatcatgtattatcagcaggcactgatgcggagcactgttaaaagcagtgtgtcattgggaggaatcgtcaaatatagtgagcagttttccagcaacgatgctattatgtctggctgcttgcctagcaacccttggatcacagacgatacacagttctgggatttgaatgctaagctggtggagatcccaaccaagatgagagtagagaggtgggcctttaacttttccgagctcattagggatccaaagggcaggcagagcttccagtacttcttaaagaaggaatttagtggggagaatctgggcttctgggaggcgtgcgaggacttaaaatacggagatcagtcaaaagtgaaagaaaaggcagaagagatctacaagctgtttctcgcccctggtgcaaggagatggattaacattgacgggaagaccatggatatcaccgtgaaaggcctgaaacatccccacaggtatgtgttagacgccgcacagacccatatctacatgttgatgaaaaaggacagttacgctaggtacctcaaatcacccatctataaagatatgctcgcaaaagctatcgagccccaggaaacaaccaagaaaagttccactcttccatttatgaggcggcacctacgcagctctccaagcccagtcattcttagacaattggaggaggaagctaaagcccgtgaagcagcaaatacagttgacataactcagcccggtcagcatatggctccctctcctcatcttactgtgtacacaggcacatgtatgcctccttctccttccagccccttctctagctcatgcagatccccacggaagccattcgcaagtcccagcagattcataagacggccttccacaacaatttgtccatcacctatccgtgttgcactggaatcatcttctggcctagagcaaaaaggagagtgtagcgggtccatggcccctcgcggtccatccgtcacagaaagttccgaagcatctctggacacatcgtggccgaggtcccgccctagggcccctcctaaggccagaatggctttgtcctttagtagatttcttagaagaggttgcctggcctctcccgttttcgctcgcctttctccaaagtgccccgctgttagtcacggacgagttcagcccctcggcgatgtcggtcaacagctgcctagattaaaatccaagcgggtggcaaacttctttcagataaaaatggacgtacctaccggctcaggaacatgcctaatggactctgaggacgcagggacaggcgagtccggagacagagccacggagaaggaagtgatctgtccatgggagtccctgtag

SEQ ID NO: 37277 - DNA, 2513 bp, Artificial Sequence
  derived and/or modified sequence
gattggctggcgcggattccagctgctttccaagtcagcggcgcctagtgagagtcaggggggcccggcccgcgccctccccgcccagccgcctccccgtcgacgcccagggctggggcgagccaggctgcctttcgaacttggggggcttctcctcttgtctcccactggtgctctggctgtgaatccatccaggggccaggatgacaatccgacaccaaggccagcagtacaggccgaggatggcatttctccaaaagattgaagcgctcgtgaaggacatgcagaacccagagacaggggtccgaatgcagaaccagagggtcctggtcaccagcgttcctcatgccatgacaggaagtgatgttctgcaatggatcgtccagcggctttggatctccagtctggaggcacagaacttgggcaactttattgtcaggtatggctacatttaccccctgcaagaccccaagaatctcattctcaagcctgatggcagcctctacagatttcagacaccgtatttctggcccacccagcagtggccagctgaagataccgattacgccatctatctggccaagcgaaatatcaaaaagaaagggattttggaagaatatgaaaaggaaaattacaatttcttgaaccaaaaaatgaactataagtgggactttgtcattatgcaggccaaagagcagtacagggctggaaaggagaggaacaaagcagacagatatgccctggactgccaggagaaggcatactggctggtgcaccgatgccctcctggaatggacaatgtgctggactacggcctggaccgagtgaccaatccgaatgaagtcaagaaacaaacagtcgttgctgtcaaaaaagagatcatgtattaccaacaggccttgatgaggtccacagtgaagtcttctgtgtccctgggagggattgtgaaatacagtgagcagttctcatccaacgatgccatcatgtcaggctgcctccccagcaacccctggatcaccgatgacacccagttctgggacttaaatgccaaattggtggaaatcccaaccaagatgcgagtggaacgatgggccttcaacttcagcgaattgatccgagaccccaaaggtcgacagagcttccagtacttcctcaagaaagaattcagtggagagaatctgggattctgggaagcctgcgaggatctgaagtatggagatcagtccaaagtcaaggagaaagcagaggagatttacaagctgttcctggccccgggggcgaggcgctggatcaacatagatggcaaaaccatggacatcacagtgaaggggctgaagcacccccaccgctatgtgctggacgccgcacaaacccacatttacatgctcatgaagaaggattcttatgctcgctatttaaaatctccgatctataaggacatgctggccaaagctattgaacctcaggaaaccaccaagaaaagctccaccctcccttttatgcggcgtcacctgcgctccagcccaagccctgtcatcctgagacagctggaagaggaagccaaggcccgagaagcagccaacactgtggacatcacccagccgggccagcacatggctcccagcccccatctgaccgtgtacaccgggacctgcatgcccccgtctccttctagccccttctcctcctcctgccgctcccccaggaagcctttcgcctcacccagccgcttcatccggcgacccagcaccaccatctgcccctcacccatcagagtggccttggagagctcatcgggcttggagcagaaaggggagtgcagcgggtccatggccccccgtgggccctctgtcaccgagagcagcgaggcctccctcgacacctcctggcctcgcagccggcccagggcccctcctaaggcccgcatggctctgtccttcagcaggtttctgagacgaggctgtctggcctcacctgtctttgccaggctctcacccaagtgccctgctgtgtcccacgggagggtgcagcccctgggggacgtgggccagcagctgccacgattgaaatccaagagagtagcaaactttttccagatcaaaatggatgtgcccacggggagcgggacctgcttgatggactcggaggatgctggaacaggagagtcgggtgaccgggccacagaaaaggaggtcatctgcccctgggagagcctgtaaggaaagaggcaggctgagctgggggctctggaccaggaagatgctctgacagatgccatggtatgggccacaggacacacttgctcgagaaccaaagtgcatttgggtgacatttgaagattggggagacaagatggggtagattgtggcaaagaatgctctggctggttaccaggggccaactccttctcctcttcctgaccctccctcccctgggcagaagaaacgcatgtggaccagaagactttccctgctgccttaaaaccaataaaaggttaactttaagtttcttgg

SEQ ID NO: 37278 - DNA, 2016 bp, Artificial Sequence
  derived and/or modified sequence
atgaccatcagacaccagggccagcagtacagacccagaatggccttcctgcagaagatcgaggccctggtgaaggacatgcagaaccccgagaccggcgtgagaatgcagaaccagagagtgctggtgaccagcgtgccccacgccatgaccggcagcgacgtgctgcagtggatcgtgcagagactgtggatcagcagcctggaggcccagaacctgggcaacttcatcgtgagatacggctacatctaccccctgcaggaccccaagaacctgatcctgaagcccgacggcagcctgtacagattccagaccccctacttctggcccacccagcagtggcccgccgaggacaccgactacgccatctacctggccaagagaaacatcaagaagaagggcatcctggaggagtacgagaaggagaactacaacttcctgaaccagaagatgaactacaagtgggacttcgtgatcatgcaggccaaggagcagtacagagccggcaaggagagaaacaaggccgacagatacgccctggactgccaggagaaggcctactggctggtgcacagatgcccccccggcatggacaacgtgctggactacggcctggacagagtgaccaaccccaacgaggtgaagaagcagaccgtggtggccgtgaagaaggagatcatgtactaccagcaggccctgatgagaagcaccgtgaagagcagcgtgagcctgggcggcatcgtgaagtacagcgagcagttcagcagcaacgacgccatcatgagcggctgcctgcccagcaacccctggatcaccgacgacacccagttctgggacctgaacgccaagctggtggagatccccaccaagatgagagtggagagatgggccttcaacttcagcgagctgatcagagaccccaagggcagacagagcttccagtacttcctgaagaaggagttcagcggcgagaacctgggcttctgggaggcctgcgaggacctgaagtacggcgaccagagcaaggtgaaggagaaggccgaggagatctacaagctgttcctggcccccggcgccagaagatggatcaacatcgacggcaagaccatggacatcaccgtgaagggcctgaagcacccccacagatacgtgctggacgccgcccagacccacatctacatgctgatgaagaaggacagctacgccagatacctgaagagccccatctacaaggacatgctggccaaggccatcgagccccaggagaccaccaagaagagcagcaccctgcccttcatgagaagacacctgagaagcagccccagccccgtgatcctgagacagctggaggaggaggccaaggccagagaggccgccaacaccgtggacatcacccagcccggccagcacatggcccccagcccccacctgaccgtgtacaccggcacctgcatgccccccagccccagcagccccttcagcagcagctgcagaagccccagaaagcccttcgccagccccagcagattcatcagaagacccagcaccaccatctgccccagccccatcagagtggccctggagagcagcagcggcctggagcagaagggcgagtgcagcggcagcatggcccccagaggccccagcgtgaccgagagcagcgaggccagcctggacaccagctggcccagaagcagacccagagccccccccaaggccagaatggccctgagcttcagcagattcctgagaagaggctgcctggccagccccgtgttcgccagactgagccccaagtgccccgccgtgagccacggcagagtgcagcccctgggcgacgtgggccagcagctgcccagactgaagagcaagagagtggccaacttcttccagatcaagatggacgtgcccaccggcagcggcacctgcctgatggacagcgaggacgccggcaccggcgagagcggcgacagagccaccgagaaggaggtgatctgcccctgggagagcctgtag

SEQ ID NO: 37279 - protein, 544 aa, Artificial Sequence
  derived and/or modified sequence
MPGRCQSDAAMRVNGPASRAPAGWTSGSLHTGPRAGRPRAQARGVRGRGLLLRPRPAKELPLPRKGGAWAPAGNPGPLHPLGVAVGMAGSGRLVLRPWIRELILGSETPSSPRAGQLLEVLQDAEAAVAGPSHAPDTSDVGATLLVSDGTHSVRCLVTREALDTSDWEEKEFGFRGTEGRLLLLQDCGVHVQVAEGGAPAEFYLQVDRFSLLPTEQPRLRVPGCNQDLDVQKKLYDCLEEHLSESTSSNAGLSLSQLLDEMREDQEHQGALVCLAESCLTLEGPCTAPPVTHWAASRCKATGEAVYTVPSSMLCISENDQLILSSLGPCQRTQGPELPPPDPALQDLSLTLIASPPSSPSSSGTPALPGHMSSEESGTSISLLPALSLAAPDPGQRSSSQPSPAICSAPATLTPRSPHASRTPSSPLQSCTPSLSPRSHVPSPHQALVTRPQKPSLEFKEFVGLPCKNRPPFPRTGATRGAQEPCSVWEPPKRHRDGSAFQYEYEPPCTSLCARVQAVRLPPQLMAWALHFLMDAQPGSEPTPM

SEQ ID NO: 37280 - DNA, 1635 bp, Artificial Sequence
  derived and/or modified sequence
atgccggggaggtgccagtctgacgctgcaatgagagtgaacggccctgctagccgcgccccagcaggctggacatctggcagccttcataccggcccgcgggccggcaggccaagagcccaggccagaggcgtgcgcgggcggggtctgctcttaaggccacggccagcgaaggagctcccactccccagaaagggaggtgcctgggcccctgccggcaaccctggtcctcttcaccctctgggagtcgccgtgggaatggccggatccggacgactggtcctacggccctggattcgcgagttaatcctcggaagtgagacaccctccagccctagagctggacagctgctagaggtactccaggacgccgaggccgctgtcgcgggcccgtcccacgcacccgatacctctgacgttggtgccaccctgctcgtgagcgacggcacccatagtgttagatgcctagtcacgagagaagcattagatacgtcagactgggaggaaaaggaatttggattcaggggaaccgaaggacgtctgttgctgctccaggattgcggcgtacacgtgcaggtagccgaagggggagctcccgccgagttctacctgcaagtggatagattttctcttctgcctaccgagcagcccagactccgggtaccaggctgcaaccaggacctggacgtccagaaaaaactgtacgactgtcttgaggaacacctgtctgaatcgacctcgtcgaacgccgggctgagtctcagccagctcttggatgagatgagggaggaccaggaacaccagggagcgttagtgtgcctggcagaaagctgcctcaccttggaaggcccatgtacagccccgcctgttactcattgggccgcctcccgttgtaaagccacgggcgaggctgtctatacggtgcccagttctatgctgtgtatttccgagaatgaccagctaatcctgtcctctctgggcccctgccagcgcactcagggtcccgaactgccaccccccgatcctgctctccaggatctgtccctcacattgatcgcgagtccaccgtcctcgccctcatctagcggaacacccgcacttcccggccacatgagcagcgaggagagtggtacttctatcagtttactaccggccttatctctggcggcgcctgatcccggccaaagatccagctctcaaccctcccctgccatttgttcggcgcccgctactctgacgccacggtccccccacgcctctagaaccccctcatctcccttgcagtcctgtacccccagcctctcccctagatcccacgttcccagcccacaccaagctctggtgactcggccgcagaagccatctctggaatttaaagaatttgttggcctaccctgcaaaaatcgccctcccttcccccgaaccggggccactcggggcgcccaggagccctgctccgtgtgggagccacctaaacgacacagagatgggagtgcttttcagtacgaatatgagcctccttgcaccagcctatgcgcgagggtgcaggcagtgaggcttcctccacagctcatggcatgggccctccacttccttatggatgcacaacccggatctgagccaaccccaatgtag

SEQ ID NO: 37281 - DNA, 1635 bp, Artificial Sequence
  derived and/or modified sequence
atgcctggccgctgccagagtgatgctgccatgagggtgaatggacctgccagccgggccccagctggctggaccagcggcagcctgcacacaggccccagggctggccggccccgggcccaggcccggggcgtgcggggccggggcctgctgctgcggcccaggcctgccaaggagctgcccctgcccaggaaaggaggagcctgggccccagctggcaaccctggccccctgcaccccctgggcgtggccgtgggcatggccggcagcggccgcctggtgctgcggccctggatccgggagctgatcctgggcagcgagacccccagcagcccccgggccggccagctgctggaggtgctgcaggatgctgaggccgctgtggccggccccagccacgccccagacaccagtgatgtgggcgccaccctgctggtgtctgatggcacccacagcgtgcgctgcctggtgacccgggaggccctggacaccagtgactgggaggagaaggagtttggcttccggggcacagagggccgcctgctgctgctgcaggactgtggggtgcacgtgcaggtggccgagggcggggccccagctgagttctacctgcaggtggaccgcttcagcctgctgcccacagagcagccccggctgcgggtgcccggctgcaaccaggacctggatgtgcagaagaagctgtatgactgcctggaggagcacctgtctgagagcaccagcagcaatgccggcctgagcctgagccagctgctggatgagatgagggaggaccaggagcaccagggcgccctggtgtgcctggccgagagctgcctgaccctggagggcccctgcacagcccctcctgtgacccactgggccgccagccgctgcaaggccactggagaggccgtgtacacagtgcccagctccatgctgtgcatcagtgaaaatgaccagctgatcctgagcagcctgggcccctgccagaggacccagggccctgagctgcccccaccagaccctgccctgcaggacctgagcctgaccctcatcgccagcccccccagcagccccagcagcagcggcaccccagccctgcccggccacatgagcagcgaggagagcggcaccagcatcagcctgctgcctgccctgagcctggccgccccagaccccggccagaggagcagcagccagcccagccctgccatctgcagcgccccagccaccctgacccccaggagcccccacgccagcaggacccccagcagccccctgcagagctgcacccccagcctgagccccaggagccacgtgcccagcccccaccaggccctggtgacccggccccagaagcccagcctggagttcaaggagtttgtgggcctgccctgcaagaaccggccccccttccccaggactggagccaccaggggggcccaggagccctgcagcgtgtgggagccccccaagaggcacagagatggcagcgccttccagtatgaatatgagcccccctgcaccagcctgtgtgcccgggtgcaggccgtgcggctgcccccccagctgatggcctgggccctgcacttcctgatggatgcccagcccggcagcgagcccacccccatgtag

SEQ ID NO: 37282 - DNA, 1635 bp, Artificial Sequence
  derived and/or modified sequence
atgcccggccggtgccagagcgacgccgccatgcgggtgaacggccccgcttccagggccccggcaggttggacctccggcagcctgcacaccggaccacgggcaggccgtcccagggcccaagcccggggtgtccgtgggcgggggctgcttctccgcccaagacccgctaaagagctgccactgccccgtaagggcggcgcatgggcgcctgccggtaaccccggccctttgcatcctttgggggtcgccgtgggaatggctggctccggacgcctggtcctccgcccttggataagggagctgatcctcggcagcgagacacccagtagtccccgtgccgggcagctgttggaggtcctgcaagatgccgaggcagcggtggctgggcccagccatgcacccgacaccagcgatgttggcgcgacgctgctggtgtccgatgggacccacagcgtacggtgtctggtgacccgcgaagccttggacacatcagattgggaggaaaaagaattcgggttccgagggaccgagggccggcttttactcctccaggactgcggcgtgcacgtgcaagtagctgaggggggtgcacctgcggaattctatttacaggtcgacagattttcactactcccgacagaacagcccagactccgcgtaccaggatgcaaccaggatctggacgtccagaagaaattgtatgactgtctcgaagaacatttaagcgaaagcacatccagcaatgccggcctgtcgctgagtcagctactggacgagatgcgtgaggaccaggagcatcagggtgccctagtgtgcctcgctgagtcttgcttgaccctggagggaccctgcaccgcgccacctgtcactcactgggcggcatcacggtgtaaggccactggggaggcggtttacactgtcccttcttcaatgctgtgcattagcgagaatgaccagctgatcctctcttcgcttggaccgtgtcagcgcacacaaggtcccgaactgcccccgcctgatcccgctttgcaagacttgagcctgactctgatagcctcccctccctctagcccttcaagttcaggcaccccagcactgcctgggcacatgtcttcggaggaaagcggaacctcaatcagcttgctgcccgcgttgtcactcgcagctcctgatccagggcagagatcctcctcccagcccagccctgccatttgtagcgctcccgccactcttacaccccgttcccctcacgctagcaggaccccatccagtcccctgcaaagctgtactccgtccctgtctccaagatcccatgtgcccagcccacaccaggcactggtgacgcgaccgcagaagccatcactggagtttaaggagttcgtgggcctcccctgcaagaataggccaccattccctcgaactggggcaacacggggggctcaggaaccttgctccgtgtgggagccccccaaacggcatcgcgacggttcggcttttcagtatgagtacgagcctccctgtaccagtctgtgcgcacgcgtccaggccgtgcgtctcccgccacagctcatggcctgggccttgcatttcctaatggatgcgcagccagggtcagaacctaccccaatgtag

SEQ ID NO: 37283 - DNA, 1974 bp, Artificial Sequence
  derived and/or modified sequence
aaggaagtaccatttatttagcgctgtgtgtgtgctcttatttccactggccttacaagaccgtgcactgtgtagatgaggaaactgagtcataataaatatgtgctgaaccgttcgggggtcacacggtgctgaaatggtttcgagtcaactcgctcggacggcactcggcctcagcctccggccctggaaccctctccagggacgggaccagcccttgttctgttccctaccggtaccacaggaatcttgacgaacggcccaaatgcctggccgctgtcagagtgacgccgcgatgagagtaaacgggccagcatcccgtgcaccagcggggtggaccagcgggagtctgcacacaggcccccgagcaggacgccctcgtgcgcaggcgcggggtgtacgtgggcggggcctcctcctccggccccgcccagcgaaggagcttcctcttccgaggaaaggcggggcctgggcgcccgcgggaaacccgggcccgttgcatccgctgggtgtagccgtggggatggcaggttcggggaggctggtcctacggccctggattcgggagctgattctggggtcagagacaccctccagtccacgagccgggcagctgcttgaggtactacaggacgccgaggccgcggtcgcgggcccatcccacgcccctgatacgtccgacgtcggggccacgctgcttgtgtctgacgggacccacagtgtccgatgcctggtgacgcgggaggccctggacacctcggactgggaggagaaggagttcggcttccgcgggacagagggccggctgctgctgctgcaggactgcggggttcatgtccaggtcgctgagggcggcgcgcccgcagagttctatctccaggtggaccgcttcagcctgctgcccacggagcagccccggctacgggtgcctggttgcaaccaagacttagatgttcagaaaaagctctatgactgccttgaggagcacctttcagagtccacctcgtccaatgcaggcctatcactgtcccagcttctggatgaaatgcgggaggaccaggagcatcagggggcactcgtgtgcctggctgaaagctgcctgacactggagggcccttgcacagcaccccctgtcacccactgggctgcctcacgatgcaaggccacgggagaagctgtgtacactgtccccagctcaatgctgtgcatctctgagaatgaccagctaattctgagctctctaggcccctgtcagaggacacagggccctgagctgcccccaccagacccggctctgcaggacctatctctgaccctcatagcctctcctccttcctcacccagttcctcaggaaccccggccttacccggccacatgtcatccgaggaaagtggtaccagcatcagccttctgcctgccctgtccttggctgctccagacccagggcagagaagcagctcccagccctcaccagccatctgctcagcccctgccaccctgacccccaggtccccacacgccagccgtacccccagctccccactccagagctgcactcccagtctctcaccccgtagccatgtccccagtccacaccaggctcttgtgaccaggccccagaaacctagcctggagttcaaggagtttgtagggttgccctgcaagaatcggccgccttttcccaggaccggagctaccaggggagcccaggagccctgctctgtctgggaacccccaaagaggcatcgtgatggttctgccttccagtatgagtatgagccaccctgcacgtccctctgtgctcgggtccaagctgtcaggcttcctccccagctcatggcctgggccttgcactttctgatggatgcacagccagggtctgagccaactccgatgtgagacgtcacgcaggacagataccgctccacactctgcttcctttgagttttttaataaaataatctcatgcggca

SEQ ID NO: 37284 - DNA, 1635 bp, Artificial Sequence
  derived and/or modified sequence
atgccaggccgttgtcagtccgatgccgcaatgagggtaaacggtccagcaagccgggctccagcgggatggacttcggggagcttgcacacagggccaagggctgggagaccacgagcacaggcgaggggcgttcgaggcaggggcttactactgaggcctcggcctgccaaggaactccctctgccccgtaagggaggcgcttgggcacccgctggaaatccaggacctttacatcccctgggggttgcggtcggaatggcgggaagcggacggttagtgctgagaccctggatcagggaactgattctggggtccgagacaccatcttcacctcgtgctggccagctgctggaagtgcttcaggacgctgaggccgcagtcgcagggccatcacacgccccagataccagtgacgttggggctactctactggtgagtgacggcacccacagcgtgcggtgtctggtaaccagggaagctttggacacatcagactgggaagaaaaggagttcggctttagggggacagagggcaggctgctactccttcaggactgcggagttcatgtgcaggtcgcagaaggcggagcgcctgccgagttttacctgcaggtcgatcggttcagtctgcttccgaccgaacagcccaggcttcgggtgccaggctgtaaccaggatttggacgtgcagaaaaagctgtatgattgtctagaagagcacctctcagagtcaacatctagtaatgccggactgagcctgtcccagcttctcgatgaaatgcgtgaagatcaagagcatcaaggtgctctggtctgcctcgcggagagctgcctgaccctagaagggccttgtaccgcacctcccgtcacgcattgggcagcctctcggtgtaaagcgaccggtgaagctgtgtataccgtgccttcatccatgttatgcatctcggagaacgaccaactgatcctctcgagtctcgggccttgccagcgcacccaaggtccagaactcccacccccagaccctgccctccaggatcttagtctcaccctaattgcctcccccccttcttcccccagctcctccggaactcctgccttgccaggccatatgagtagtgaggaatcagggaccagtattagtttgctccccgcactcagcctggccgcaccggacccaggtcagaggagcagcagccagccctcccctgctatttgctccgcgccagctaccctcacaccaagatctccacacgcttctcgcacacccagttcccctctgcagtcatgtacaccttcactgtccccccgtagtcacgtccctagtccacatcaggcactggtcaccaggccccagaaaccctctttggaattcaaggagttcgtcggcctcccttgtaagaatcgacctccattcccaaggacaggtgccacccgtggagcacaagaaccgtgctcggtgtgggaaccaccaaaacggcacagagacggtagcgcctttcagtatgaatatgagcctccctgtacaagcctatgcgcgcgtgttcaagccgtgcgactgccaccccagttgatggcatgggcactgcacttcctgatggatgcccaacctggctccgagccaacccccatgtag

SEQ ID NO: 37285 - DNA, 1635 bp, Artificial Sequence
  derived and/or modified sequence
atgcccggcagatgccagagcgacgccgccatgagagtgaacggccccgccagcagagcccccgccggctggaccagcggcagcctgcacaccggccccagagccggcagacccagagcccaggccagaggcgtgagaggcagaggcctgctgctgagacccagacccgccaaggagctgcccctgcccagaaagggcggcgcctgggcccccgccggcaaccccggccccctgcaccccctgggcgtggccgtgggcatggccggcagcggcagactggtgctgagaccctggatcagagagctgatcctgggcagcgagacccccagcagccccagagccggccagctgctggaggtgctgcaggacgccgaggccgccgtggccggccccagccacgcccccgacaccagcgacgtgggcgccaccctgctggtgagcgacggcacccacagcgtgagatgcctggtgaccagagaggccctggacaccagcgactgggaggagaaggagttcggcttcagaggcaccgagggcagactgctgctgctgcaggactgcggcgtgcacgtgcaggtggccgagggcggcgcccccgccgagttctacctgcaggtggacagattcagcctgctgcccaccgagcagcccagactgagagtgcccggctgcaaccaggacctggacgtgcagaagaagctgtacgactgcctggaggagcacctgagcgagagcaccagcagcaacgccggcctgagcctgagccagctgctggacgagatgagagaggaccaggagcaccagggcgccctggtgtgcctggccgagagctgcctgaccctggagggcccctgcaccgccccccccgtgacccactgggccgccagcagatgcaaggccaccggcgaggccgtgtacaccgtgcccagcagcatgctgtgcatcagcgagaacgaccagctgatcctgagcagcctgggcccctgccagagaacccagggccccgagctgcccccccccgaccccgccctgcaggacctgagcctgaccctgatcgccagcccccccagcagccccagcagcagcggcacccccgccctgcccggccacatgagcagcgaggagagcggcaccagcatcagcctgctgcccgccctgagcctggccgcccccgaccccggccagagaagcagcagccagcccagccccgccatctgcagcgcccccgccaccctgacccccagaagcccccacgccagcagaacccccagcagccccctgcagagctgcacccccagcctgagccccagaagccacgtgcccagcccccaccaggccctggtgaccagaccccagaagcccagcctggagttcaaggagttcgtgggcctgccctgcaagaacagaccccccttccccagaaccggcgccaccagaggcgcccaggagccctgcagcgtgtgggagccccccaagagacacagagacggcagcgccttccagtacgagtacgagcccccctgcaccagcctgtgcgccagagtgcaggccgtgagactgcccccccagctgatggcctgggccctgcacttcctgatggacgcccagcccggcagcgagcccacccccatgtag

SEQ ID NO: 37286 - DNA, 558 bp, Artificial Sequence
  derived and/or modified sequence
atgcacggcctgtgcatggtgcccagcccccacggccaccccggcatcagcggcacctgctgcgcccccggccaggcccccgacagacaccccctgagcctgtgcgcccccacccccggcagaaagagacagcaccacctggtggcctggcagccctgccccgcccccagctgcctgtggccccactggacccagccccccagcagagaggccttcggctgcagagccggcgccggcagagcccaccccgtggccggcggcacccaggagccctggctgcacctgtgcagcagaagaacctgcggccagctgaccctgcagcagggcagcggccccaagagcctgacccacagagtgctgagccccgacagagccgtggacagcttccccttccaccccggcacctgctggcaggagctgcccggcccccaccccggcgccgccacccccgccccccccgccacccccggccacgagaaggtgcagaacagcagcggccccagccacaacttcctggagctgagagacagcttcctgagcaccaacggcgtgagatag

SEQ ID NO: 37287 - DNA, 558 bp, Artificial Sequence
  derived and/or modified sequence
atgcacgggctctgtatggtgccctccccccacggccaccccggtattagtggcacctgttgcgccccaggtcaggctccagataggcatcccctcagtctgtgtgcgccaacgcctggtcgcaagaggcaacaccacctggtggcctggcagccttgcccagccccatcatgtctatggccccactggacgcagcccccatccagagaagcttttgggtgtcgagctggcgcaggaagagcgcatcccgtagctgggggtactcaggaaccttggctgcacctctgttctaggaggacatgtggccagctgactctgcagcaaggctctggcccaaagagcctgacccatcgtgtcctttccccagatcgggcagtcgactctttccccttccatcctgggacttgctggcaggagctacccggaccacatccaggggctgctacgcctgcacccccagctacccccggacatgagaaggtccagaattcctccggaccctcgcataacttccttgagttaagggatagcttcctttccacgaacggcgtgagatag

SEQ ID NO: 37288 - protein, 328 aa, Artificial Sequence
  derived and/or modified sequence
MEIVWEVLFLLQANFIVCISAQQNSPKIHEGWWAYKEVVQGSFVPVPSFWGLVNSAWNLCSVGKRQSPVNIETSHMIFDPFLTPLRINTGGRKVSGTMYNTGRHVSLRLDKEHLVNISGGPMTYSHRLEEIRLHFGSEDSQGSEHLLNGQAFSGEVQLIHYNHELYTNVTEAAKSPNGLVVVSIFIKVSDSSNPFLNRMLNRDTITRITYKNDAYLLQGLNIEELYPETSSFITYDGSMTIPPCYETASWIIMNKPVYITRMQMHSLRLLSQNQPSQIFLSMSDNFRPVQPLNNRCIRTNINFSLQGKDCPNNRAQKLQYRVNEWLLK

SEQ ID NO: 37289 - protein, 334 aa, Artificial Sequence
  derived and/or modified sequence
MASIRSRSGCGFTEPDELCMVGVRENAQQNSPKIHEGWWAYKEVVQGSFVPVPSFWGLVNSAWNLCSVGKRQSPVNIETSHMIFDPFLTPLRINTGGRKVSGTMYNTGRHVSLRLDKEHLVNISGGPMTYSHRLEEIRLHFGSEDSQGSEHLLNGQAFSGEVQLIHYNHELYTNVTEAAKSPNGLVVVSIFIKVSDSSNPFLNRMLNRDTITRITYKNDAYLLQGLNIEELYPETSSFITYDGSMTIPPCYETASWIIMNKPVYITRMQMHSLRLLSQNQPSQIFLSMSDNFRPVQPLNNRCIRTNINFSLQGKDCPNNRAQKLQYRVNEWLLK

SEQ ID NO: 37290 - DNA, 987 bp, Artificial Sequence
  derived and/or modified sequence
atggaaatcgtatgggaggtcttattccttttacaggcgaacttcatcgtctgcatttccgctcaacagaatagccccaagatccacgaagggtggtgggcgtataaggaagtggttcagggctcctttgtgccagtgcctagtttctggggactggtgaatagcgcctggaacctgtgctcagtcggtaaaagacagagcccagtgaacatcgagacatcacatatgatatttgaccctttcctgactcccttgagaatcaatacgggaggaagaaaagttagcggcaccatgtataacacagggcgccatgtcagtctgcggcttgacaaggaacacctcgtgaacataagcgggggaccgatgacttactctcaccgcctcgaggagatcaggctgcacttcggaagtgaagattcccaggggtcagagcacctcctgaatggccaagctttctctggcgaagtgcaattgattcactacaaccacgaactttacactaacgtcacagaggcggcaaagtctcctaatgggttggtggtggtgtcaatcttcattaaagtgagtgattccagcaatccctttctgaatcgcatgcttaatcgcgacactatcactaggataacatataagaatgatgcatatctgttgcagggactgaatattgaagaactctatcctgagaccagctccttcattacctacgacggctccatgaccattcccccatgctatgagactgcctcatggattatcatgaacaaaccggtgtatatcacaaggatgcagatgcacagcctgaggctgctatctcagaaccagccctctcagattttcctctcgatgtccgacaattttcgccccgtgcagccgttaaataaccgctgcattagaactaatatcaatttctccctgcaggggaaagattgccccaacaacagggctcagaagctgcaataccgtgtcaacgagtggctgctgaaatag

SEQ ID NO: 37291 - DNA, 1005 bp, Artificial Sequence
  derived and/or modified sequence
atggccagtattcggagtcgttctggctgtggatttaccgagcctgatgaactgtgcatggtcggcgtgcgggaaaacgcccaacagaatagccccaagatccatgaaggctggtgggcctacaaggaggtcgtgcaaggatcctttgtccctgtcccctccttctggggtctcgttaattctgcctggaacctgtgttccgtcggcaagcgccaatcgcctgtgaacatcgagacatcacacatgatctttgatccatttctgactccacttagaataaacacaggcggtcgaaaagttagcgggactatgtacaacacaggccgtcatgtgagcctgcgtctggacaaagagcatctggtgaacatctcaggggggccaatgacctatagccaccgcctcgaggaaattaggctccactttggatctgaagattcccagggttccgagcacctgttgaatggtcaggctttctccggggaggtccaacttatacattacaaccatgagctgtacaccaatgttactgaggccgccaagagtccaaatgggctcgtcgttgtgagtatctttatcaaagtgtccgactcaagtaatccctttcttaatcgcatgctcaacagggatactattacacgcatcacatacaagaacgatgcttacctcctccaaggtctgaatatagaggaattgtaccccgagacgtcctccttcatcacttacgatgggtctatgaccattcctccatgttacgaaacagcctcttggatcataatgaacaagcccgtgtacattacaagaatgcaaatgcattctcttcggctgttgtctcagaaccagccctctcagatcttcctttccatgtccgataatttccgcccagtgcaaccattgaacaatcggtgcattaggaccaacattaatttcagcctccagggcaaggattgccccaataaccgcgcccagaaactccagtatcgcgtgaacgagtggctgttgaagtag

SEQ ID NO: 37292 - DNA, 987 bp, Artificial Sequence
  derived and/or modified sequence
atggagatcgtgtgggaggttctgtttctccttcaagcaaacttcatagtctgcatcagtgcccagcagaattcacctaagattcacgagggctggtgggcttataaagaggtggtgcagggatcgttcgttccggtcccgagcttttgggggcttgtcaactctgcctggaacctgtgcagcgtgggtaaacggcagtcgcctgttaacattgagacaagtcacatgatctttgacccttttctgaccccattaagaataaacaccggcggccgtaaagtatctgggacaatgtacaacacaggacgacatgtctctctgcggctggataaagaacacctggtgaatataagtggcgggcccatgacatacagtcacaggctagaagaaatccggctgcactttgggtcagaagattcccagggcagcgaacacttactcaacggacaggccttctccggtgaagtgcagttgattcactacaatcatgagctgtacacaaacgtgacagaggcagccaagagcccaaatggactggttgtggtgagcatttttataaaggtgagcgatagcagtaacccattcctaaacaggatgttaaatcgtgatacgatcactcgcatcacatacaaaaatgatgcttatctgctccaggggcttaatatcgaggagttgtatccagagaccagcagttttatcacttatgacggctcgatgaccattcctccctgctacgaaactgcaagctggattatcatgaacaagccggtatatatcacgcgaatgcagatgcacagcctgagattgctctcccagaatcagcccagccaaatctttctatctatgtcagataactttagaccagttcagccactgaataaccggtgtatcagaaccaatatcaacttcagcctccaaggcaaggactgcccgaataatcgcgcgcagaaactgcagtatcgtgtgaacgagtggctattgaagtag

SEQ ID NO: 37293 - DNA, 987 bp, Artificial Sequence
  derived and/or modified sequence
atggaaatcgtgtgggaggtgctgtttctgcttcaggcaaatttcatagtttgtattagcgcccagcagaactcaccaaaaattcatgagggctggtgggcctacaaagaggtggtgcaggggtcttttgtgcccgttccctctttctggggcctggtcaacagcgcttggaatctgtgctctgtgggaaagcgtcagtctcccgtaaacatcgagacttcgcacatgattttcgacccgtttctgaccccgctgaggataaacactggcggaagaaaggtgagtggcacaatgtataatacagggaggcatgtctccctgaggttggataaagagcatctggttaacatcagcgggggtccgatgacttatagtcaccgattagaggagattaggttgcacttcggcagcgaagattcccagggatctgaacacctgcttaatggccaggcctttagcggcgaagtgcagctgatccattacaaccacgaactgtataccaatgttacagaggccgccaaaagcccgaacggtctggtcgttgtgtcgatctttatcaaagtgtctgattccagcaatccctttttgaaccggatgctgaacagagataccattactaggatcacttacaaaaacgatgcataccttttgcaaggtttgaacatcgaagagctctatcctgagacatccagctttatcacgtacgatggaagcatgacaatccctccatgctacgaaactgccagttggatcattatgaacaagccagtgtatattactcgtatgcaaatgcactcactgcgactgctgtcccagaatcagccgagtcagatctttctgtccatgtccgacaatttccgccccgtacaaccacttaataatcgctgtataaggaccaacatcaatttctcattgcaggggaaagactgcccaaataatagagcacagaagttacagtatcgcgtgaatgagtggctcctgaagtag

SEQ ID NO: 37294 - DNA, 987 bp, Artificial Sequence
  derived and/or modified sequence
atggagatcgtgtgggaggtgctcttcctgctgcaggccaacttcatcgtgtgcatcagcgcccagcagaacagccccaagatccacgagggctggtgggcctacaaggaggtggtgcagggcagctttgtgcctgtgcccagcttctggggcctggtgaacagcgcctggaacctgtgcagcgtgggcaagaggcagagccctgtgaacatcgagaccagccacatgatctttgaccccttcctgacccccctgcgcatcaacacaggaggcaggaaggtgtctggcaccatgtacaacacaggccgccacgtgtccctgcggctggacaaggagcacctggtgaacatcagcggcggccccatgacctacagccaccggctggaggagatccggctgcactttggaagtgaggacagccagggcagcgagcacctgctgaatggccaggccttctctggagaggtgcagctgatccactacaaccacgagctgtacaccaacgtgacagaggccgccaagagccccaacggcctggtggtggtgtccatcttcatcaaggtgtctgacagcagcaaccccttcctgaacaggatgctgaacagagacaccatcacccgcatcacctacaagaatgatgcctacctgctgcagggcctgaacatcgaggagctgtacccagagaccagcagcttcatcacctatgatggctccatgaccatccccccctgctatgaaacagcctcctggatcatcatgaacaagcctgtgtacatcaccaggatgcagatgcacagcctgcggctgctgagccagaaccagcccagccagatcttcctgtccatgtctgacaacttccggcctgtgcagcccctgaacaaccgctgcatccgcaccaacatcaacttcagcctgcagggcaaggactgccccaacaacagagcccagaagctgcagtacagagtgaatgagtggctgctgaagtag

SEQ ID NO: 37295 - DNA, 1005 bp, Artificial Sequence
  derived and/or modified sequence
atggccagcatccgcagccgcagcggctgcggcttcacagagccagatgagctgtgcatggtgggcgtgagagaaaatgcccagcagaacagccccaagatccacgagggctggtgggcctacaaggaggtggtgcagggcagctttgtgcctgtgcccagcttctggggcctggtgaacagcgcctggaacctgtgcagcgtgggcaagaggcagagccctgtgaacatcgagaccagccacatgatctttgaccccttcctgacccccctgcgcatcaacacaggaggcaggaaggtgtctggcaccatgtacaacacaggccgccacgtgtccctgcggctggacaaggagcacctggtgaacatcagcggcggccccatgacctacagccaccggctggaggagatccggctgcactttggaagtgaggacagccagggcagcgagcacctgctgaatggccaggccttctctggagaggtgcagctgatccactacaaccacgagctgtacaccaacgtgacagaggccgccaagagccccaacggcctggtggtggtgtccatcttcatcaaggtgtctgacagcagcaaccccttcctgaacaggatgctgaacagagacaccatcacccgcatcacctacaagaatgatgcctacctgctgcagggcctgaacatcgaggagctgtacccagagaccagcagcttcatcacctatgatggctccatgaccatccccccctgctatgaaacagcctcctggatcatcatgaacaagcctgtgtacatcaccaggatgcagatgcacagcctgcggctgctgagccagaaccagcccagccagatcttcctgtccatgtctgacaacttccggcctgtgcagcccctgaacaaccgctgcatccgcaccaacatcaacttcagcctgcagggcaaggactgccccaacaacagagcccagaagctgcagtacagagtgaatgagtggctgctgaagtag

SEQ ID NO: 37296 - DNA, 987 bp, Artificial Sequence
  derived and/or modified sequence
atggagatcgtgtgggaggtgctgttcctgctgcaggccaacttcatcgtttgcatcagtgcacaacaaaacagtcctaaaatccatgaggggtggtgggcctacaaggaagtcgtgcaggggtcctttgtgcccgtgccgagtttttggggattggttaacagtgcctggaacctgtgttcagtaggtaagaggcagtcaccagtcaatattgaaacttcacacatgatattcgatcccttcctgacaccgctgagaattaatacgggtgggaggaaggtgagcggtacgatgtataacactggccggcatgtgtcattgagactcgacaaagaacatctggttaacatctcaggcggcccgatgacgtactcacataggctagaggagatccgcctccacttcggcagcgaggacagccagggctccgagcacttacttaacggtcaggccttttctggagaggtgcagctgatccattataatcacgaactatatacaaatgtgacagaggcagccaaaagccctaatggtctggtcgttgtttccatcttcattaaagtctctgatagttctaatccttttctcaatcgaatgcttaaccgggatacaatcacccggataacctataaaaatgatgcgtatctgctgcaaggactaaatattgaggagctgtatcctgaaacctcctctttcataacttacgacggaagcatgaccatcccaccatgctacgagaccgcgagctggatcatcatgaataaacccgtctatatcacgcggatgcaaatgcactcactcagactgcttagccagaatcagccttcacagatcttcctcagcatgtccgacaattttcggcccgtgcagccactgaataatcggtgcattcgaactaatatcaacttttctctgcagggcaaggactgtcctaataaccgcgcccagaaactacagtacagagtgaatgagtggttactcaagtag

SEQ ID NO: 37297 - DNA, 1005 bp, Artificial Sequence
  derived and/or modified sequence
atggccagcatccggagccggagcggctgcggcttcaccgagcccgatgagttgtgcatggtgggcgtacgagagaatgcacaacagaattcacccaagattcatgagggatggtgggcatacaaggaggtcgtgcaggggagctttgtcccggtcccaagtttttggggactggtaaacagcgcctggaacctctgctcagtgggtaaacgacaaagcccggtgaatatcgagacgagccatatgatcttcgacccattcctcacaccgctgcggatcaataccggtggtcggaaggtcagcggaactatgtacaacactggccgccatgtctccctgcggctcgacaaggagcacctggtaaacatcagtggaggcccgatgacctactcccatagattggaggaaatcaggctccactttggcagcgaggatagccagggaagtgagcatctcctgaacggtcaggcctttagcggggaagtccaactcatccactataaccatgagttgtacactaatgtgactgaggctgctaagagcccaaatgggttagtggtcgtttcaatttttatcaaggtgagcgattcttccaatccttttctcaatcgtatgctaaacagggacacaattaccaggatcacatacaaaaatgacgcgtatctgctgcagggactgaacattgaggagctgtaccccgagacttcatcatttatcacttacgacggatccatgacgatacccccgtgttatgaaactgcttcttggatcattatgaataagcctgtctatattacccggatgcagatgcactccctgcgtcttctatcccagaatcaaccttcgcaaatttttctgagcatgtccgataatttccgaccggtgcaaccactgaataataggtgtatcaggaccaatatcaacttcagcttgcaggggaaggactgcccaaataaccgggcgcaaaaattgcaatatagggtcaacgaatggctgctgaagtag

SEQ ID NO: 37298 - DNA, 987 bp, Artificial Sequence
  derived and/or modified sequence
atggagatcgtgtgggaggtgctgttcctgctgcaggccaacttcatcgtgtgtatatccgcgcagcaaaactcccccaagatccatgagggctggtgggcctacaaagaagttgttcagggctcttttgttcctgtaccaagcttctggggattagtgaacagcgcatggaacctttgctccgtgggaaagaggcagagtccggtaaatattgagacctcacatatgatctttgatccatttctcactccgctgcgcatcaatacaggaggaagaaaagtttccgggaccatgtataatactgggagacatgtgtcattgcgtctggacaaagaacacctcgttaacatctctggtgggcctatgacgtacagccacaggttggaggaaatcagactgcactttggcagcgaagattcacagggatctgagcatttgctcaacggacaagcgttctccggggaggtgcaactgattcattataatcatgagctgtacaccaatgtcacagaggccgcaaaatccccaaatggccttgtcgtcgtttccatttttattaaggtgagtgatagcagcaatccatttctcaatcgcatgttaaatagggacactattacacgtataacttataaaaacgatgcgtacctgttgcaggggctgaacatcgaagaattgtatccagagacatcaagctttatcacctatgacggtagcatgacaatccccccctgttatgaaactgcctcctggattatcatgaataaacctgtgtacattacccggatgcagatgcatagcttgcgactcctgagtcagaaccagccttcacagattttcctgtcgatgagtgacaacttcagacccgtgcagcctctgaataaccggtgcatcaggacaaatattaatttcagcttacaggggaaggattgtccaaataatcgtgcccagaaacttcagtacagggtgaacgaatggctgcttaagtag

SEQ ID NO: 37299 - DNA, 987 bp, Artificial Sequence
  derived and/or modified sequence
atggagatcgtgtgggaggtgctgttcctgctgcaggccaacttcatcgtctgcatttctgcgcaacagaacagcccaaaaatccacgagggatggtgggcctacaaagaagtagtgcaagggtctttcgtgcccgtgccttctttctggggactggtgaatagcgcttggaatctgtgttccgtgggtaagcgccagagcccagttaatatagagacatctcatatgatcttcgatccctttctgaccccccttcgcattaacaccggtggaagaaaagttagcggcacgatgtacaacacagggagacacgtctccctaaggctggacaaggagcatctggtgaatatctctggcgggccaatgacatacagccaccgtcttgaggaaattcggctgcacttcgggtcagaagattcccaaggatccgagcatctgctgaacggtcaggctttcagcggcgaagtgcagttaatccattacaaccacgaattgtacactaatgtaaccgaggccgccaaaagcccaaatgggttggtggttgtgtcaatctttatcaaagtgtccgacagtagcaatccctttctgaaccggatgctcaatcgagacaccataacaagaatcacgtacaagaacgacgcctacctcttacagggcctaaatatcgaagagctttaccccgagacctcatctttcattacttacgatggctcgatgaccatccctccctgctacgaaacagcctcttggatcattatgaacaagccagtctatatcacccggatgcagatgcacagcttgagactgctgtcacaaaatcagccctcacagatattcctgtcaatgtccgacaactttcggccagtgcagcctctcaacaatcgatgtatcaggacaaacatcaatttttccctgcagggaaaggattgcccaaataatagggcccaaaagctgcagtaccgcgtcaacgagtggttgctgaagtag

SEQ ID NO: 37300 - DNA, 987 bp, Artificial Sequence
  derived and/or modified sequence
atggagatcgtctgggaggttctgttccttctgcaagcgaatttcatcgtgtgtatctccgcccagcaaaattcaccaaaaattcacgagggctggtgggcctacaaggaggtcgtacagggcagttttgtgccagttcccagcttctggggactcgtcaatagcgcctggaacttgtgctccgttggtaagcggcagtcccccgtgaacattgagacctctcacatgatattcgaccccttcctcaccccattgagaatcaatacaggcggtcggaaagtgagcggaaccatgtataacacaggacgccatgtcagccttagactggataaagagcatctggttaatatttctggcggtcccatgacttacagccaccggctcgaggaaatacggttacatttcggtagcgaagactctcagggaagtgagcacctgctcaatggccaagctttctccggcgaggtacagttaatacactataaccacgagttgtatacaaacgtcactgaagctgccaagtctcctaatggcctagtggtagtgagtatctttatcaaagtgagcgactctagtaatccattcttaaatcggatgttgaaccgggataccattacccgcatcacatacaaaaacgacgcctatttgctgcaggggcttaatatcgaggaactgtatcctgagacatcatccttcatcacctatgatggctcaatgactatcccaccgtgttatgagaccgcctcatggataatcatgaataaaccggtatacataacaaggatgcagatgcactctcttcgtctattgtcccagaaccagccaagccaaatctttctttcaatgtccgataacttcagacccgtgcagcccctgaataacagatgcattcgcactaacattaacttttcattgcaggggaaggactgtcctaataaccgagcccaaaagctccagtatcgggttaacgagtggttacttaagtag

SEQ ID NO: 37301 - DNA, 1005 bp, Artificial Sequence
  derived and/or modified sequence
atggcgtccatccgctcgaggtctggctgtggcttcaccgaaccagatgagctatgcatggtaggcgtgagggaaaacgcgcagcagaatagcccaaaaatccatgagggttggtgggcctacaaggaagtggtgcagggcagtttcgtgccagtgcctagtttctggggtctggtcaatagtgcgtggaacctgtgctccgtgggaaagcggcagagccctgttaatatcgagacctcacacatgatcttcgatcctttcctgacgccgctgagaatcaacaccgggggtcggaaggtgtcaggtacaatgtacaatacaggtaggcatgtctctctcagactggataaggagcacctggtgaacatcagtggcggtcccatgacctactcccaccgattggaggagattcggcttcacttcggctcggaggactcccaaggctccgagcaccttctgaacgggcaagcattctccggggaagtgcaactgattcactataaccatgaactgtataccaacgtgaccgaggcagctaagagccccaatgggctcgtggtagtcagcatcttcattaaagttagtgatagtagcaatccttttctcaacaggatgctgaaccgcgacaccataacacgaattacctacaagaacgacgcctaccttctccaaggactgaacatagaagaattgtacccggaaacttccagtttcatcacttatgacggaagtatgaccatcccaccatgttatgaaaccgctagctggattattatgaacaaacccgtctacattacccgaatgcagatgcacagtctgagactactgagccagaatcagcctagccagattttcctctctatgagcgacaacttccgtcctgtgcagccactgaataaccgctgtattagaaccaacatcaacttctctctccagggcaaggactgtccaaacaacagggctcagaaattgcagtaccgcgttaacgagtggttactgaaatag

SEQ ID NO: 37302 - DNA, 987 bp, Artificial Sequence
  derived and/or modified sequence
atggaaatcgtttgggaggttttatttctgctccaagccaactttatcgtgtgcattagtgcgcagcagaattcaccgaagattcacgagggatggtgggcctataaggaggtcgttcaggggtccttcgtgccggtcccatccttctggggcctggtgaactcagcgtggaacctttgctcagtcggcaagaggcagtcaccggtgaatatagaaacctctcacatgattttcgatccatttttaacaccattgcggattaacaccggtgggagaaaggtaagtggcacaatgtacaatacaggccgacatgtctccctacgcctcgataaggagcatttagtgaacatctccggcggtccgatgacctactcccacagactcgaagaaatcagactccatttcggtagcgaagactcacaagggagtgagcatctattaaatggacaagcctttagcggcgaagtgcagctgatccactacaatcatgagctgtacactaacgtaaccgaagctgcgaagtccccaaacggtctcgttgtcgtttctatcttcattaaagtttccgatagctccaatccatttctcaacaggatgctgaatagagataccataacacgcattacatacaagaacgacgcatatcttctgcagggcctgaatatagaggaactgtatcccgaaacaagtagcttcattacatatgatgggagtatgactatccctccatgctatgagactgcctcatggataatcatgaataagccagtttacatcacgcggatgcaaatgcatagcctcaggttgctttctcagaaccagccttcgcaaatcttcctgagtatgagtgataacttcaggcccgtgcaacccctaaataatcgttgtatccggaccaacattaacttttccttacagggcaaggattgcccgaacaaccgcgcacagaagcttcagtatagggtgaatgagtggctcctgaagtag

SEQ ID NO: 37303 - DNA, 987 bp, Artificial Sequence
  derived and/or modified sequence
atggagatcgtgtgggaagtgctttttctgttacaggccaactttatagtgtgtatctccgcacagcagaatagccctaaaattcatgaagggtggtgggcctacaaagaagtcgtacagggctcgttcgtgcctgttcccagcttttggggccttgtgaattctgcctggaatctctgctccgttggcaaacggcagagcccagtgaatatcgaaacctcccacatgatctttgatccattcctgaccccactaagaataaacactggagggcgtaaggtgagcggcacgatgtataatacaggccgacacgtgtctcttcggctggacaaagaacacctcgtgaatatcagtggcggtcctatgacatattcccatagactagaagagattaggttgcattttggcagtgaagattcccaggggagtgaacatctccttaatggccaagcttttagcggcgaagtgcagctgattcattacaaccatgagctatataccaatgtcaccgaggccgcaaaaagccccaacggcctagtagtggttagcatttttattaaggtgtccgattccagtaacccttttctgaaccgcatgctaaatagagatactatcacgcggataacttataaaaatgatgcgtacctccttcaagggctcaatattgaagaactttaccctgaaactagctcgttcataacctatgacggcagtatgacaattccaccctgttatgaaacagcctcctggattataatgaataagccggtctacatcacaagaatgcaaatgcattcactcagactgctgtcacagaaccagccctctcagatctttctgagtatgtccgacaactttagacccgtgcaaccccttaataatcgatgcattcgaacgaatataaatttctcactacagggcaaagattgccctaacaatcgtgctcagaagctgcagtatcgggtgaacgaatggcttctgaagtag

SEQ ID NO: 37304 - DNA, 3369 bp, Artificial Sequence
  derived and/or modified sequence
ttcaattcccctgcatccacactgcaaccgggtgcaagtctttcctaggttatagacagcccgcctccccacgagaccttctgcggactggctgcccctggcctcggcctgggtgggtgggtggtgctcgcgccgcccctactttcccctggggccctggagagccgcgcgctgggtgtgtgtgtgtgtgcgcgcgcgggtttggtggggaaatctccttcagtggaagctgctgagtgtcgttggcggaaagtatcctggagcccagcaaaagcctccaaagcactagagcttccctaaagaaaagcagaataaaagaaagacaagaagggaagcccgttcctctaaagcccgggtttccaatagtcccggatcctcctggagttgggcgaaggcgcagttggcagcagccgctgctggcacccggacttggaaaggcggtgttcccccttttcgggaggagggaggcagggacttgcaggcaagagttgcacctggtctaggaacctgcagagaaaagaactctggggagaagaactgccccggagcgcagcagccaccctccgaccatgccccggtgaggggggcggacttcgagggcaacttgccgcggactgcctgggcttagccagcgagctacgcgctcccgggagcccggaattgcacggcgcagcccggcggggggctatcgtctatgtcttcttggggcgccagacgaatcggggtctcgtttttgctggaagagcccagtgttggtggcttcaggtggctgctgccgccgccgccgccgccgccgctgctagtgcggtttccgccgctggtgcgaagagaagagacacgcgagcggggagacctccaaggcagcgaggcatcggacatgtgtcagcacatctggggcgcacatccgtcgagcccgaggggagatttgccggaacaattcaaactgcgatattgatcttgggggtgactgtccctggccggctgtcgggtgggagtgcgagtgtgcactcgctcggaagtgtgtgcgagtgtgtatgtgtgtgtgccgtgtcgggctccccccttccccccgttttcccgtcgagtgatgcacttggaatgagaatcagaggatggaaatagtctgggaggtgctttttcttcttcaagccaatttcatcgtctgcatatcagctcaacagaattcaccaaaaatccatgaaggctggtgggcatacaaggaggtggtccagggaagctttgttccagttccttctttctggggattggtgaactcagcttggaatctttgctctgtggggaaacggcagtcgccagtcaacatagagaccagtcacatgatcttcgacccctttctgacacctcttcgcatcaacacggggggcaggaaggtcagtgggaccatgtacaacactggaagacacgtatcccttcgcctggacaaggagcacttggtcaacatatctggagggcccatgacatacagccaccggctggaggagatccgactacactttgggagtgaggacagccaagggtcggagcacctcctcaatggacaggccttctctggggaggtgcagctcatccactataaccatgagctatatacgaatgtcacagaagctgcaaagagtccaaatggattggtggtagtttctatatttataaaagtttctgattcatcaaacccatttcttaatcgaatgctcaacagagatactatcacaagaataacatataaaaatgatgcatatttactacaggggcttaatatagaggaactatatccagagacctctagtttcatcacttacgatgggtcgatgactatcccaccctgctatgagacagcaagttggatcataatgaacaaacctgtctatataaccaggatgcagatgcattccttgcgcctgctcagccagaaccagccatctcagatctttctgagcatgagtgacaacttcaggcctgtccagccactcaacaaccgctgcatccgcaccaatatcaacttcagtttacaggggaaggactgtccaaacaaccgagcccagaagcttcagtatagagtaaatgaatggctcctcaagtagggaacaaagccaagaagaatcccacctcagtgaaatgctacaactgtgaattgacgtaacctagaatgtcccccttcttgcttctctctccttctttcccccaagcctcattcattcttgggattggccctttcttcatgaaaagtgtctgcaaaaccatggcagaggaatacatctctcacacatactcacaaacacacacacaagcacttgcacatacatacaaacacatgcaaacatacctacacacacacacactcttacaacctccatcatgggaagtcaagtttcagaaacaaaagtctcattcataagaggtcttagaagaaaataaccagttaacctgatttcaattttgataccgttttcctgaactaataaatctacccaatgagacttttcagcctttgtacatacaaaattcttccaaaagagagaggagaaaatacagctctgatggcatcaaacggactttgcatcaagtaatttcagatagtgtcctaggatcctttgagggtgctggtagcaggtgagcaggacaaagttgaccaaggacacttatttctagattatgattcttctgtttactcaacaatttacaaagaaaaaaaggacagacattgaagagctacacattgtatatatatcaccacagactataaggaaatggaattatttccctctttgtcacatatctgtagtaggatttgccaagatcagaaatgatccatttgctgtttcttgttttccaaaggtcatacattgtgtttggttattgttaccagctcaataaatgtgtttaacgagttaatttcatttttctggctttggtctgttctccttccttacaggctaagccctggctccatgcaactgcattctttgatttcacttgttccttcatctacatgttttgttcatttgcagccagtttttactgagtttgtggcaatcaggaatgcatttgctaagcaagtatgactttaattccactccatggctcaatcattcacatgaggtgagcttcagcctgagatagcaggcgacagacttcttgcgtttcaaaactgccatgcccccctgtgatgctcccgtgaaggaatgcactttgccttgtaagttcctgggaaaggggtatgttttctctccaggtgcagccagatctcacaaagtacaaaacgaatgcctttcttttcttgtttataatggtcactcactgtgtttggttactgtcaagaaatcaataaatgtgtttaacaagttacccagt

SEQ ID NO: 37305 - DNA, 2698 bp, Artificial Sequence
  derived and/or modified sequence
acacgcgagcggggagacctccaaggcagcgaggcatcggacatgtgtcagcacatctggggcgcacatccgtcgagcccgaggggagatttgccggaacaattcaaactgcgatattgatcttgggggtgactgtccctggccggctgtcgggtgggagtgcgagtgtgcactcgctcggaagtgtgtgcgagtgtgtatgtgtgtgtgccgtgtcgggctccccccttccccccgttttcccgtcgagtgatgcacttggaatgagaatcagaggatggaaatagtctgggaggtgctttttcttcttcaagccaatttcatcgtctgcatatcaggcgacctcaggagggcagtcaggaggctctggtggcagtctgggttggagatgcaggtaacctgttgaaggtgatggcacacatggagagcaatggccagcatcaggagccgttcaggatgtggattcacagagcctgatgaactgtgtatggtgggggtgagggagaatgctcaacagaattcaccaaaaatccatgaaggctggtgggcatacaaggaggtggtccagggaagctttgttccagttccttctttctggggattggtgaactcagcttggaatctttgctctgtggggaaacggcagtcgccagtcaacatagagaccagtcacatgatcttcgacccctttctgacacctcttcgcatcaacacggggggcaggaaggtcagtgggaccatgtacaacactggaagacacgtatcccttcgcctggacaaggagcacttggtcaacatatctggagggcccatgacatacagccaccggctggaggagatccgactacactttgggagtgaggacagccaagggtcggagcacctcctcaatggacaggccttctctggggaggtgcagctcatccactataaccatgagctatatacgaatgtcacagaagctgcaaagagtccaaatggattggtggtagtttctatatttataaaagtttctgattcatcaaacccatttcttaatcgaatgctcaacagagatactatcacaagaataacatataaaaatgatgcatatttactacaggggcttaatatagaggaactatatccagagacctctagtttcatcacttacgatgggtcgatgactatcccaccctgctatgagacagcaagttggatcataatgaacaaacctgtctatataaccaggatgcagatgcattccttgcgcctgctcagccagaaccagccatctcagatctttctgagcatgagtgacaacttcaggcctgtccagccactcaacaaccgctgcatccgcaccaatatcaacttcagtttacaggggaaggactgtccaaacaaccgagcccagaagcttcagtatagagtaaatgaatggctcctcaagtagggaacaaagccaagaagaatcccacctcagtgaaatgctacaactgtgaattgacgtaacctagaatgtcccccttcttgcttctctctccttctttcccccaagcctcattcattcttgggattggccctttcttcatgaaaagtgtctgcaaaaccatggcagaggaatacatctctcacacatactcacaaacacacacacaagcacttgcacatacatacaaacacatgcaaacatacctacacacacacacactcttacaacctccatcatgggaagtcaagtttcagaaacaaaagtctcattcataagaggtcttagaagaaaataaccagttaacctgatttcaattttgataccgttttcctgaactaataaatctacccaatgagacttttcagcctttgtacatacaaaattcttccaaaagagagaggagaaaatacagctctgatggcatcaaacggactttgcatcaagtaatttcagatagtgtcctaggatcctttgagggtgctggtagcaggtgagcaggacaaagttgaccaaggacacttatttctagattatgattcttctgtttactcaacaatttacaaagaaaaaaaggacagacattgaagagctacacattgtatatatatcaccacagactataaggaaatggaattatttccctctttgtcacatatctgtagtaggatttgccaagatcagaaatgatccatttgctgtttcttgttttccaaaggtcatacattgtgtttggttattgttaccagctcaataaatgtgtttaacgagttaatttcatttttctggctttggtctgttctccttccttacaggctaagccctggctccatgcaactgcattctttgatttcacttgttccttcatctacatgttttgttcatttgcagccagtttttactgagtttgtggcaatcaggaatgcatttgctaagcaagtatgactttaattccactccatggctcaatcattcacatgaggtgagcttcagcctgagatagcaggcgacagacttcttgcgtttcaaaactgccatgcccccctgtgatgctcccgtgaaggaatgcactttgccttgtaagttcctgggaaaggggtatgttttctctccaggtgcagccagatctcacaaagtacaaaacgaatgcctttcttttcttgtttataatggtcactcactgtgtttggttactgtcaagaaatcaataaatgtgtttaacaagtt

SEQ ID NO: 37306 - DNA, 2934 bp, Artificial Sequence
  derived and/or modified sequence
acagttcccaatcgggacaagcgcgccgagaaatcctggatcttcccagggattccctctacgctccctcctcttcttcaataaccccaaagaggagaagaactgccccggagcgcagcagccaccctccgaccatgccccggtgaggggggcggacttcgagggcaacttgccgcggactgcctgggcttagccagcgagctacgcgctcccgggagcccggaattgcacggcgcagcccggcggggggctatcgtctatgtcttcttggggcgccagacgaatcggggtctcgtttttgctggaagagcccagtgttggtggcttcaggtggctgctgccgccgccgccgccgccgccgctgctagtgcggtttccgccgctggtgcgaagagaagagacacgcgagcggggagacctccaaggcagcgaggcatcggacatgtgtcagcacatctggggcgcacatccgtcgagcccgaggggagatttgccggaacaattcaaactgcgatattgatcttgggggtgactgtccctggccggctgtcgggtgggagtgcgagtgtgcactcgctcggaagtgtgtgcgagtgtgtatgtgtgtgtgccgtgtcgggctccccccttccccccgttttcccgtcgagtgatgcacttggaatgagaatcagaggatggaaatagtctgggaggtgctttttcttcttcaagccaatttcatcgtctgcatatcagctcaacagaattcaccaaaaatccatgaaggctggtgggcatacaaggaggtggtccagggaagctttgttccagttccttctttctggggattggtgaactcagcttggaatctttgctctgtggggaaacggcagtcgccagtcaacatagagaccagtcacatgatcttcgacccctttctgacacctcttcgcatcaacacggggggcaggaaggtcagtgggaccatgtacaacactggaagacacgtatcccttcgcctggacaaggagcacttggtcaacatatctggagggcccatgacatacagccaccggctggaggagatccgactacactttgggagtgaggacagccaagggtcggagcacctcctcaatggacaggccttctctggggaggtgcagctcatccactataaccatgagctatatacgaatgtcacagaagctgcaaagagtccaaatggattggtggtagtttctatatttataaaagtttctgattcatcaaacccatttcttaatcgaatgctcaacagagatactatcacaagaataacatataaaaatgatgcatatttactacaggggcttaatatagaggaactatatccagagacctctagtttcatcacttacgatgggtcgatgactatcccaccctgctatgagacagcaagttggatcataatgaacaaacctgtctatataaccaggatgcagatgcattccttgcgcctgctcagccagaaccagccatctcagatctttctgagcatgagtgacaacttcaggcctgtccagccactcaacaaccgctgcatccgcaccaatatcaacttcagtttacaggggaaggactgtccaaacaaccgagcccagaagcttcagtatagagtaaatgaatggctcctcaagtagggaacaaagccaagaagaatcccacctcagtgaaatgctacaactgtgaattgacgtaacctagaatgtcccccttcttgcttctctctccttctttcccccaagcctcattcattcttgggattggccctttcttcatgaaaagtgtctgcaaaaccatggcagaggaatacatctctcacacatactcacaaacacacacacaagcacttgcacatacatacaaacacatgcaaacatacctacacacacacacactcttacaacctccatcatgggaagtcaagtttcagaaacaaaagtctcattcataagaggtcttagaagaaaataaccagttaacctgatttcaattttgataccgttttcctgaactaataaatctacccaatgagacttttcagcctttgtacatacaaaattcttccaaaagagagaggagaaaatacagctctgatggcatcaaacggactttgcatcaagtaatttcagatagtgtcctaggatcctttgagggtgctggtagcaggtgagcaggacaaagttgaccaaggacacttatttctagattatgattcttctgtttactcaacaatttacaaagaaaaaaaggacagacattgaagagctacacattgtatatatatcaccacagactataaggaaatggaattatttccctctttgtcacatatctgtagtaggatttgccaagatcagaaatgatccatttgctgtttcttgttttccaaaggtcatacattgtgtttggttattgttaccagctcaataaatgtgtttaacgagttaatttcatttttctggctttggtctgttctccttccttacaggctaagccctggctccatgcaactgcattctttgatttcacttgttccttcatctacatgttttgttcatttgcagccagtttttactgagtttgtggcaatcaggaatgcatttgctaagcaagtatgactttaattccactccatggctcaatcattcacatgaggtgagcttcagcctgagatagcaggcgacagacttcttgcgtttcaaaactgccatgcccccctgtgatgctcccgtgaaggaatgcactttgccttgtaagttcctgggaaaggggtatgttttctctccaggtgcagccagatctcacaaagtacaaaacgaatgcctttcttttcttgtttataatggtcactcactgtgtttggttactgtcaagaaatcaataaatgtgtttaacaagttacccagt

SEQ ID NO: 37307 - DNA, 3243 bp, Artificial Sequence
  derived and/or modified sequence
ctctctgagttgggaagcgtagggatccgtaggcgaggaaataacgacccctgcagttgtattgcggaaaatctcgacagcggcgctagttgcgggcgatggaagccaggcaactgggggttctggggagttcaggaaaatagcagaggagcaggaagggcgcgcgcgacctggagagtctgtgtgcccccaccgcgccccagtccccggggcccagcccttcccctcggcgccctggacgcactgccggaacccggctgagaggctgcaggctgcgcgcggacctggggagcagggagggtcggcggaggctgccggcggctggcggtttcgggcaataatccctgcctctctttctctgtgtgtctgctgtgtctgctccttccccgccccccggaagcaggagaagaactgccccggagcgcagcagccaccctccgaccatgccccggtgaggggggcggacttcgagggcaacttgccgcggactgcctgggcttagccagcgagctacgcgctcccgggagcccggaattgcacggcgcagcccggcggggggctatcgtctatgtcttcttggggcgccagacgaatcggggtctcgtttttgctggaagagcccagtgttggtggcttcaggtggctgctgccgccgccgccgccgccgccgctgctagtgcggtttccgccgctggtgcgaagagaagagacacgcgagcggggagacctccaaggcagcgaggcatcggacatgtgtcagcacatctggggcgcacatccgtcgagcccgaggggagatttgccggaacaattcaaactgcgatattgatcttgggggtgactgtccctggccggctgtcgggtgggagtgcgagtgtgcactcgctcggaagtgtgtgcgagtgtgtatgtgtgtgtgccgtgtcgggctccccccttccccccgttttcccgtcgagtgatgcacttggaatgagaatcagaggatggaaatagtctgggaggtgctttttcttcttcaagccaatttcatcgtctgcatatcagctcaacagaattcaccaaaaatccatgaaggctggtgggcatacaaggaggtggtccagggaagctttgttccagttccttctttctggggattggtgaactcagcttggaatctttgctctgtggggaaacggcagtcgccagtcaacatagagaccagtcacatgatcttcgacccctttctgacacctcttcgcatcaacacggggggcaggaaggtcagtgggaccatgtacaacactggaagacacgtatcccttcgcctggacaaggagcacttggtcaacatatctggagggcccatgacatacagccaccggctggaggagatccgactacactttgggagtgaggacagccaagggtcggagcacctcctcaatggacaggccttctctggggaggtgcagctcatccactataaccatgagctatatacgaatgtcacagaagctgcaaagagtccaaatggattggtggtagtttctatatttataaaagtttctgattcatcaaacccatttcttaatcgaatgctcaacagagatactatcacaagaataacatataaaaatgatgcatatttactacaggggcttaatatagaggaactatatccagagacctctagtttcatcacttacgatgggtcgatgactatcccaccctgctatgagacagcaagttggatcataatgaacaaacctgtctatataaccaggatgcagatgcattccttgcgcctgctcagccagaaccagccatctcagatctttctgagcatgagtgacaacttcaggcctgtccagccactcaacaaccgctgcatccgcaccaatatcaacttcagtttacaggggaaggactgtccaaacaaccgagcccagaagcttcagtatagagtaaatgaatggctcctcaagtagggaacaaagccaagaagaatcccacctcagtgaaatgctacaactgtgaattgacgtaacctagaatgtcccccttcttgcttctctctccttctttcccccaagcctcattcattcttgggattggccctttcttcatgaaaagtgtctgcaaaaccatggcagaggaatacatctctcacacatactcacaaacacacacacaagcacttgcacatacatacaaacacatgcaaacatacctacacacacacacactcttacaacctccatcatgggaagtcaagtttcagaaacaaaagtctcattcataagaggtcttagaagaaaataaccagttaacctgatttcaattttgataccgttttcctgaactaataaatctacccaatgagacttttcagcctttgtacatacaaaattcttccaaaagagagaggagaaaatacagctctgatggcatcaaacggactttgcatcaagtaatttcagatagtgtcctaggatcctttgagggtgctggtagcaggtgagcaggacaaagttgaccaaggacacttatttctagattatgattcttctgtttactcaacaatttacaaagaaaaaaaggacagacattgaagagctacacattgtatatatatcaccacagactataaggaaatggaattatttccctctttgtcacatatctgtagtaggatttgccaagatcagaaatgatccatttgctgtttcttgttttccaaaggtcatacattgtgtttggttattgttaccagctcaataaatgtgtttaacgagttaatttcatttttctggctttggtctgttctccttccttacaggctaagccctggctccatgcaactgcattctttgatttcacttgttccttcatctacatgttttgttcatttgcagccagtttttactgagtttgtggcaatcaggaatgcatttgctaagcaagtatgactttaattccactccatggctcaatcattcacatgaggtgagcttcagcctgagatagcaggcgacagacttcttgcgtttcaaaactgccatgcccccctgtgatgctcccgtgaaggaatgcactttgccttgtaagttcctgggaaaggggtatgttttctctccaggtgcagccagatctcacaaagtacaaaacgaatgcctttcttttcttgtttataatggtcactcactgtgtttggttactgtcaagaaatcaataaatgtgtttaacaagttacccagt

SEQ ID NO: 37308 - DNA, 987 bp, Artificial Sequence
  derived and/or modified sequence
atggagatcgtgtgggaggtgctgttcctgctgcaggccaacttcatcgtgtgcatcagcgcccagcagaacagccccaagatccacgagggctggtgggcctacaaggaggtggtgcagggcagcttcgtgcccgtgcccagcttctggggcctggtgaacagcgcctggaacctgtgcagcgtgggcaagagacagagccccgtgaacatcgagaccagccacatgatcttcgaccccttcctgacccccctgagaatcaacaccggcggcagaaaggtgagcggcaccatgtacaacaccggcagacacgtgagcctgagactggacaaggagcacctggtgaacatcagcggcggccccatgacctacagccacagactggaggagatcagactgcacttcggcagcgaggacagccagggcagcgagcacctgctgaacggccaggccttcagcggcgaggtgcagctgatccactacaaccacgagctgtacaccaacgtgaccgaggccgccaagagccccaacggcctggtggtggtgagcatcttcatcaaggtgagcgacagcagcaaccccttcctgaacagaatgctgaacagagacaccatcaccagaatcacctacaagaacgacgcctacctgctgcagggcctgaacatcgaggagctgtaccccgagaccagcagcttcatcacctacgacggcagcatgaccatccccccctgctacgagaccgccagctggatcatcatgaacaagcccgtgtacatcaccagaatgcagatgcacagcctgagactgctgagccagaaccagcccagccagatcttcctgagcatgagcgacaacttcagacccgtgcagcccctgaacaacagatgcatcagaaccaacatcaacttcagcctgcagggcaaggactgccccaacaacagagcccagaagctgcagtacagagtgaacgagtggctgctgaagtag

SEQ ID NO: 37309 - DNA, 1005 bp, Artificial Sequence
  derived and/or modified sequence
atggccagcatcagaagcagaagcggctgcggcttcaccgagcccgacgagctgtgcatggtgggcgtgagagagaacgcccagcagaacagccccaagatccacgagggctggtgggcctacaaggaggtggtgcagggcagcttcgtgcccgtgcccagcttctggggcctggtgaacagcgcctggaacctgtgcagcgtgggcaagagacagagccccgtgaacatcgagaccagccacatgatcttcgaccccttcctgacccccctgagaatcaacaccggcggcagaaaggtgagcggcaccatgtacaacaccggcagacacgtgagcctgagactggacaaggagcacctggtgaacatcagcggcggccccatgacctacagccacagactggaggagatcagactgcacttcggcagcgaggacagccagggcagcgagcacctgctgaacggccaggccttcagcggcgaggtgcagctgatccactacaaccacgagctgtacaccaacgtgaccgaggccgccaagagccccaacggcctggtggtggtgagcatcttcatcaaggtgagcgacagcagcaaccccttcctgaacagaatgctgaacagagacaccatcaccagaatcacctacaagaacgacgcctacctgctgcagggcctgaacatcgaggagctgtaccccgagaccagcagcttcatcacctacgacggcagcatgaccatccccccctgctacgagaccgccagctggatcatcatgaacaagcccgtgtacatcaccagaatgcagatgcacagcctgagactgctgagccagaaccagcccagccagatcttcctgagcatgagcgacaacttcagacccgtgcagcccctgaacaacagatgcatcagaaccaacatcaacttcagcctgcagggcaaggactgccccaacaacagagcccagaagctgcagtacagagtgaacgagtggctgctgaagtag

SEQ ID NO: 37310 - protein, 587 aa, Artificial Sequence
  derived and/or modified sequence
MRPRGLPPLLVVLLGCWASVSAQTDATPAVTTEGLNSTEAALATFGTFPSTRPPGTPRAPGPSSGPRPTPVTDVAVLCVCDLSPAQCDINCCCDPDCSSVDFSVFSACSVPVVTGDSQFCSQKAVIYSLNFTANPPQRVFELVDQINPSIFCIHITNYKPALSFINPEVPDENNFDTLMKTSDGFTLNAESYVSFTTKLDIPTAAKYEYGVPLQTSDSFLRFPSSLTSSLCTDNNPAAFLVNQAVKCTRKINLEQCEEIEALSMAFYSSPEILRVPDSRKKVPITVQSIVIQSLNKTLTRREDTDVLQPTLVNAGHFSLCVNVVLEVKYSLTYTDAGEVTKADLSFVLGTVSSVVVPLQQKFEIHFLQENTQPVPLSGNPGYVVGLPLAAGFQPHKGSGIIQTTNRYGQLTILHSTTEQDCLALEGVRTPVLFGYTMQSGCKLRLTGALPCQLVAQKVKSLLWGQGFPDYVAPFGNSQAQDMLDWVPIHFITQSFNRKDSCQLPGALVIEVKWTKYGSLLNPQAKIVNVTANLISSSFPEANSGNERTILISTAVTFVDVSAPAEAGFRAPPAINARLPFNFFFPFV

SEQ ID NO: 37311 - DNA, 1764 bp, Artificial Sequence
  derived and/or modified sequence
atgcggccccggggcctgccccccctgctggtggtgctgctgggctgttgggcatcggtgagtgcacagactgatgccactcccgcagtcactactgagggattaaatagtaccgaggcagctctcgctaccttcgggaccttccctagtacccgtcctccagggacaccacgggcgcctggcccttccagtggaccccgcccaacgccagtaacagatgtggccgtgttgtgcgtgtgtgacctgtccccggcccagtgcgatataaattgctgttgtgaccccgattgtagtagtgtggactttagtgtgttcagcgcatgcagcgttccggtcgtgacaggcgatagtcaattttgttctcagaaagccgtaatctattctctgaacttcaccgctaacccccctcaaagagtattcgagctcgtagaccaaatcaaccccagtattttttgtatccatatcaccaactacaaacccgccctgtcttttatcaatccggaggtccccgatgagaataacttcgatacactcatgaaaacctctgacgggtttacccttaatgccgaaagctatgtgtcgttcacaacaaagctggacattccaaccgctgctaagtatgaatatggcgtccctctgcaaactagcgatagcttcctgagattccctagttcccttacatcatctttatgcacggataacaatccagccgcttttctcgtgaatcaggccgtcaaatgtacaagaaaaatcaatctggagcaatgcgaagaaattgaagctttgtcgatggctttctatagcagtcccgaaatcctgcgcgttccagacagtcggaagaaagtcccgattactgttcagagtatcgtgatacagtccctgaacaaaaccttaacacggcgagaggacaccgatgtgttgcagcccacactggtcaacgccggccacttctcactgtgcgtcaacgttgtactggaggttaagtacagtctgacatacaccgacgctggcgaagttaccaaagccgatttatcttttgttctggggactgtgtcttcagtggtggttccgcttcaacaaaaattcgaaatccactttcttcaggaaaatacccaacccgtgcctttgtccggtaatcccggctatgtggttgggctccctttggctgctggattccagccacacaaaggcagtggaatcatccaaactacgaatcgctatggccagctgacaattctgcactctactacagaacaggattgtctggcgctggagggggtgcgcactcccgtgctcttcggctataccatgcagtctggatgtaagttgcggttgacgggagcgctcccatgtcaactggttgcccagaaggtgaagagtttgttgtgggggcaggggtttccagattacgtagccccctttggaaattctcaggcccaggacatgctggactgggtgcctattcactttatcacccaaagcttcaaccgaaaggatagctgccagctgcccggcgctttggttattgaagttaaatggacaaagtatggatccctgctcaatccgcaggcaaaaatcgtcaatgtgactgctaatctgatcagcagcagtttcccggaagccaattcaggtaatgaacgcacaatcctgatcagcaccgcagtgacctttgtcgacgtctctgccccagccgaagccggatttagagccccccccgccattaatgccagactccctttcaacttcttctttcccttcgtgtag

SEQ ID NO: 37312 - DNA, 1764 bp, Artificial Sequence
  derived and/or modified sequence
atgcgacctaggggactgccacctctgctcgtggtgctattagggtgctgggcatctgtatcagcgcagactgacgcaacgccagccgttaccacggaaggcttaaacagtaccgaggcagcactggccacttttggcacttttccctccaccaggcctcctggcactccccgtgcgccaggcccatcctctggtccacgtcccacgcccgtgaccgacgttgctgtgttgtgtgtttgtgacctctctccagcacaatgtgacatcaattgctgctgtgacccagactgtagtagcgtcgatttttctgtgttcagcgcatgctctgtcccagtggtgaccggcgactcccagttctgctctcaaaaagccgtgatctacagcctgaatttcaccgccaaccccccacagagggtctttgagcttgttgatcaaattaacccctctatcttttgtatccatatcactaactacaaacctgccctcagcttcataaatccggaggtgcccgatgaaaataatttcgacaccttgatgaagacctcagatggcttcaccctcaacgcagagtcctacgtcagcttcaccactaagctggacatccctaccgccgcaaagtacgaatacggagtgcctttgcagaccagcgattccttcctgcgattcccctcctcgcttacatcgtctctatgtaccgataacaaccctgcggcattcctggtgaatcaggccgtgaagtgcacgcgtaaaatcaacctggagcagtgcgaggaaattgaggcactctctatggccttctactccagccccgagattctgcgggtgccggattctcgcaagaaagtccccatcacggtacagtcgatcgttatccagtccctgaacaagacattgacccgcagagaggacaccgacgttctgcaacctacactggtgaatgcaggtcacttttctctttgtgtcaatgtcgtgctggaagtgaagtacagcctgacctatactgatgcaggcgaagtcaccaaggcggatctgtctttcgtcctgggtacagtgtcctcagtggtggtacctctgcaacaaaagtttgagatacactttctgcaagaaaacacgcaaccggtccccctaagcggcaatcccggttatgtggtgggtctgcctctggctgccggtttccagccacacaagggaagcggaatcatccaaacaacaaacaggtatggccagctgacaatccttcattcaactaccgaacaggattgcttggctttagaaggtgttcgaactcccgtcttattcggttatacaatgcagtcaggttgcaaactgcggctgactggcgctttaccctgccaactcgtcgcgcagaaggtgaagagcctgctttgggggcaaggttttccggattacgtcgcgccattcggcaattcacaggcccaggatatgttggattgggtgcccatccacttcatcacgcagtctttcaatcgtaaggactcttgccagctaccaggcgctctcgtgattgaggtgaagtggacgaagtacggttcactgctgaaccctcaagcaaaaatcgtcaatgttacagctaatcttatctcctcctcttttccagaggctaatagcggcaatgaaagaaccatcctgatttcaactgctgtgacgtttgtggatgtgtcagctcctgctgaggccggttttagagcaccccctgcaatcaatgcacggctcccgtttaacttctttttcccattcgtctag

SEQ ID NO: 37313 - DNA, 1764 bp, Artificial Sequence
  derived and/or modified sequence
atgagacctcggggtctgcctcccctactcgtcgtgctcctgggctgttgggcgagcgtctccgcccagacggatgccacgcccgcggtaactactgagggtctgaacagtaccgaagccgcgttggccaccttcggcaccttcccgagtactagacctccaggcacccctagagcccctgggccttcaagtggacctcggcctacacctgtcactgacgtagcagtgctgtgtgtctgtgaccttagtcccgcccagtgtgacatcaactgctgctgcgatcctgattgttcatccgttgattttagcgtgttttctgcctgtagcgtacccgtggtgacgggtgatagccagttctgctcccagaaagccgtgatttactccctgaactttaccgccaaccctccacaacgagtgtttgagctagtcgaccagattaaccctagcatattctgtatccatatcacgaattacaagcccgccctttctttcatcaatcctgaagtcccagacgaaaataatttcgacactctcatgaaaacctcagacggcttcacactgaacgcagaaagctatgtgtcctttaccacaaaattggacattcccactgctgctaaatacgagtatggggtcccccttcagacgagcgacagcttcctcagattcccatccagcctaacttcctccctctgtaccgacaacaatccagctgcatttctagtcaatcaggcagtcaagtgtacccgtaaaatcaatcttgagcaatgtgaggagatcgaggctctgagtatggccttctatagctcgcccgaaattctgagggtgccggacagccggaagaaggttcccatcaccgtccagagcatagtgatccaaagcctaaataaaaccctgacacggcgcgaagatacagacgtcctacagccaacccttgttaatgctggtcatttctctctgtgcgtcaatgtggtgctcgaggtgaaatactcgctgacatatacagatgccggcgaagtgactaaggcggatctgtcctttgttttgggaactgtgtcatctgtggtggtgcctctgcagcagaagttcgaaatccatttcctccaggaaaatacccaacccgtgcccctctctggaaaccctggttacgtcgtaggcctgcctcttgccgccggtttccaaccacacaaaggatcagggatcatccaaacaaccaaccgttatgggcagcttaccattttacacagcacaacggaacaggactgcctcgcactcgagggggtccgtacgccagtcctgtttggatacaccatgcaatccgggtgcaaactcagattaacgggggcgctcccctgccagctcgtggcccaaaaggtgaaaagcttattatggggccagggcttccctgactacgtggctccttttggcaactcccaagcacaagacatgctggactgggtacctatccactttattacacaaagtttcaatcgtaaggattcctgccaattacctggcgctctggtaatcgaggtgaagtggactaaatacgggtcactgttgaacccccaggccaagattgtcaacgttactgccaatctgatcagtagctcttttccggaagcaaattcagggaacgagaggactattctgatctcgacggccgtgacctttgtggacgtgagcgcgccagcagaagcaggcttcagggccccacctgcgattaacgcacgtctgccttttaatttttttttcccatttgtgtag

SEQ ID NO: 37314 - DNA, 1764 bp, Artificial Sequence
  derived and/or modified sequence
atgaggcccaggggtctccctcctctcttagtcgtgttacttggctgttgggcaagtgtgtcagcccaaactgatgctacgcctgccgtcactactgaaggactgaactcaactgaggctgctctggctaccttcggcacttttcctagcacacgaccaccaggaacaccacgtgcccccggccccagctctggcccaagacccacgccagtgaccgatgttgccgtcctctgcgtatgcgacctctccccggcacagtgcgatatcaattgctgttgcgatcccgactgttcttctgtggacttttccgtttttagcgcttgctcagttcccgtcgttactggagactcgcagttctgctctcagaaagccgtaatttactccctcaattttactgccaatccaccccagagagtctttgaactggttgatcagataaatccgtccattttctgcatccatatcactaactacaagccggccctatccttcattaaccctgaagtgcccgacgaaaataactttgacacccttatgaaaacctcagatggatttacgctgaacgcagaatcctatgtttctttcaccacaaagctggatattccgaccgccgcaaaatatgaatatggcgtgccccttcagaccagcgacagttttcttagattccccagctccttgacatctagcttgtgcacagataacaacccggccgcgttcttggtgaaccaggcagtgaaatgtaccaggaagatcaaccttgagcaatgcgaagaaattgaggccctatcgatggcattttactcgtctcccgagatcctgcgggttcctgactctcgcaaaaaagtacctattacagtccagtctatcgtaatccagtctctgaataaaaccttgacgaggcgcgaagatacagacgtcctacagccaacccttgttaatgctggtcatttctctctgtgcgtcaatgtggtgctcgaggtgaaatactcgctgacatatacagatgccggcgaagtgactaaggcggatctgtcctttgttttgggaactgtgtcatctgtggtggtgcctctgcagcagaagttcgaaatccatttcctccaggaaaatacccaacccgtgcccctctctggaaaccctggttacgtcgtaggcctgcctcttgccgccggtttccaaccacacaaaggatcagggatcatacaaactactaacagatacggacagctgaccatacttcacagtaccacggaacaggactgcctggcactggagggggtgcggaccccagtgttatttggatatacaatgcagagcggatgcaagttaagactgaccggggcacttccctgtcaactcgttgctcagaaagtaaagagtcttttatggggccaaggctttccagactatgtcgctccctttggtaactcgcaggcccaggatatgctcgattgggtcccaattcattttatcactcaatctttcaatcggaaagatagctgtcaactgccaggcgcgctggtaattgaagtcaagtggacaaagtacgggagcctcctgaacccccaggccaagatcgtgaatgtaaccgccaatctcattagctcaagttttcccgaagcgaactccggtaacgaaagaactatcctgatctcaaccgcagtcacctttgttgatgttagtgctcccgccgaagctggctttcgagctccccccgccatcaacgcccgattacctttcaattttttcttccctttcgtatag

SEQ ID NO: 37315 - DNA, 2309 bp, Artificial Sequence
  derived and/or modified sequence
atccgccccctgcctcatccaggcttcgccccagtcagtctccggcagcttctcgcggcttcgcaagccccttcccgtgatgccccgcgcctggctgtcgcggttgccgggcaacgcgctgtccatgtcgcgggcctcgctgggactccctgggagatgaggccgcgaggtctcccgccgctcctggtggtgctcctgggctgctgggcctccgtgagcgcccagaccgatgccaccccggcggtgacgacagagggcctcaactccaccgaggcagccctggccaccttcggaactttcccgtcgaccaggccccccgggactcccagggctccagggccctcctccggccccaggcctaccccagtcacggacgttgctgttctctgtgtctgtgacttatccccagcacagtgtgacatcaactgctgctgtgatcccgactgcagctccgtggatttcagtgtcttttctgcctgctcagttccagttgtcacgggcgacagccagttttgtagtcaaaaagcagtcatctattcattgaattttacagcaaacccacctcaaagagtatttgaacttgttgaccagattaatccatctattttctgcattcatattacaaactataaacctgcattatcctttattaatccagaagtacctgatgaaaacaattttgatacattgatgaaaacatctgatggttttacattgaatgctgaatcatatgtttccttcacaaccaaactggatattcctactgctgctaaatatgagtatggggttcctctgcagacttcagattcgtttctgagatttccttcgtccctgacatcatctctgtgcactgataataaccctgcagcgtttctggtgaaccaggctgttaagtgcaccagaaaaataaatttagaacagtgtgaagaaattgaagccctcagcatggctttttacagcagcccggaaattctgagggtacctgattcaagaaaaaaggtccctatcactgttcagtccatcgtcattcagtctctaaataaaacgctcacccgacgggaggacactgatgtgctgcagccgactctcgtcaacgctggacactttagcctttgcgtgaatgttgttcttgaggtaaagtacagcctcacatacacagatgcaggtgaagtcaccaaagctgatctctcattcgttctggggacagttagcagcgtagtggtcccactgcagcaaaagtttgaaattcattttcttcaggaaaatacccagccagtccctctcagtggaaaccctggttatgtcgtggggctcccattagctgctggattccagcctcataaggggtctgggattattcagaccacaaatagatatggacagcttactattcttcatagcacaactgagcaagactgcttagcactggagggggtccggaccccagtattatttggttacactatgcaatctggctgtaaactaagactgactggagctctcccgtgtcagctcgtagcacagaaggtgaagagcctgctgtggggccagggcttcccagattacgtggccccttttggaaattcccaggcccaggacatgctggactgggtgcccatccacttcatcacccagtcattcaacaggaaggattcctgccagctcccaggggctttggttatagaagtgaagtggactaaatacggatccctgctgaatccacaggccaaaatagtcaatgtaactgcaaatctaatttcatcctcctttcctgaggccaactcaggaaatgaaaggacgattcttatttccactgcggttacttttgtggatgtgtctgcacctgcagaggcaggcttcagagctccaccagccatcaatgccaggctgccctttaacttcttcttcccgtttgtttgacaatgctcagatgcatcagttccttaatatacacgtgaaatttgaaaactgtacattcggtgagattaaattttatatacaactagcaattgtccagctttgttgctcattttcaattaaggctaaagtgttcaacatgagaaaatgtgatacatttgatacagtgtggggtgggagtggatgggcagctcttggtggtactggaccttccacaaggctgtgtccacccagaatccatgctggcaggagggaggcagaggtatcaaaccaaacctctcaccaagcggcccaggaggggcagctgttcctctcgtgacagcacaggcccatgagacagtgtcttctttttgaggggagctggtccgggtctagttcacttcaccaagaag

SEQ ID NO: 37316 - DNA, 1764 bp, Artificial Sequence
  derived and/or modified sequence
atgagacccagaggcctgccccccctgctggtggtgctgctgggctgctgggccagcgtgagcgcccagaccgacgccacccccgccgtgaccaccgagggcctgaacagcaccgaggccgccctggccaccttcggcaccttccccagcaccagaccccccggcacccccagagcccccggccccagcagcggccccagacccacccccgtgaccgacgtggccgtgctgtgcgtgtgcgacctgagccccgcccagtgcgacatcaactgctgctgcgaccccgactgcagcagcgtggacttcagcgtgttcagcgcctgcagcgtgcccgtggtgaccggcgacagccagttctgcagccagaaggccgtgatctacagcctgaacttcaccgccaaccccccccagagagtgttcgagctggtggaccagatcaaccccagcatcttctgcatccacatcaccaactacaagcccgccctgagcttcatcaaccccgaggtgcccgacgagaacaacttcgacaccctgatgaagaccagcgacggcttcaccctgaacgccgagagctacgtgagcttcaccaccaagctggacatccccaccgccgccaagtacgagtacggcgtgcccctgcagaccagcgacagcttcctgagattccccagcagcctgaccagcagcctgtgcaccgacaacaaccccgccgccttcctggtgaaccaggccgtgaagtgcaccagaaagatcaacctggagcagtgcgaggagatcgaggccctgagcatggccttctacagcagccccgagatcctgagagtgcccgacagcagaaagaaggtgcccatcaccgtgcagagcatcgtgatccagagcctgaacaagaccctgaccagaagagaggacaccgacgtgctgcagcccaccctggtgaacgccggccacttcagcctgtgcgtgaacgtggtgctggaggtgaagtacagcctgacctacaccgacgccggcgaggtgaccaaggccgacctgagcttcgtgctgggcaccgtgagcagcgtggtggtgcccctgcagcagaagttcgagatccacttcctgcaggagaacacccagcccgtgcccctgagcggcaaccccggctacgtggtgggcctgcccctggccgccggcttccagccccacaagggcagcggcatcatccagaccaccaacagatacggccagctgaccatcctgcacagcaccaccgagcaggactgcctggccctggagggcgtgagaacccccgtgctgttcggctacaccatgcagagcggctgcaagctgagactgaccggcgccctgccctgccagctggtggcccagaaggtgaagagcctgctgtggggccagggcttccccgactacgtggcccccttcggcaacagccaggcccaggacatgctggactgggtgcccatccacttcatcacccagagcttcaacagaaaggacagctgccagctgcccggcgccctggtgatcgaggtgaagtggaccaagtacggcagcctgctgaacccccaggccaagatcgtgaacgtgaccgccaacctgatcagcagcagcttccccgaggccaacagcggcaacgagagaaccatcctgatcagcaccgccgtgaccttcgtggacgtgagcgcccccgccgaggccggcttcagagccccccccgccatcaacgccagactgcccttcaacttcttcttccccttcgtgtag

SEQ ID NO: 37317 - DNA, 1764 bp, Artificial Sequence
  derived and/or modified sequence
atgaggcctcggggcctgccccctctcctcgtggtgctgctagggtgctgggctagtgtgagcgcccaaaccgacgctaccccagcggtgacaacagaaggactgaacagcacagaagccgccctcgctactttcgggaccttcccctctacaagacctcctggaactcctcgggccccgggccctagcagtggtcctcgccctacacccgtaactgacgttgccgttctgtgcgtatgcgatctcagcccagcacagtgcgacatcaattgttgctgtgatcccgactgctcaagcgtggattttagcgtgttctccgcctgcagtgttccagtggtgacgggagactcacagttctgctcccagaaagcggtgatctacagtctgaacttcactgctaacccaccccaacgcgtgtttgaactagtcgatcagattaacccgagtattttctgcatccatatcaccaactacaagccagctctgagtttcatcaaccccgaagtaccagacgagaataacttcgatacactgatgaagacatcagatggattcaccctaaacgccgagagctacgtgagttttacaacgaaactggatatacctactgctgctaaatatgaatatggggttcccctccagacttcagactccttcctgcgcttcccttcttctctgacctccagcctctgcacagacaacaatcctgcagcatttctggtcaaccaagccgtgaagtgtacccgtaaaatcaatttggaacaatgtgaggagatagaggctctgtcaatggctttttatagctcaccagaaattctcagagttcccgattctcggaagaaagttcccatcacggttcagtcaattgtgatacaatctctcaacaaaaccctgacacgcagagaggacaccgatgtcttgcagcccacactcgtgaatgcagggcactttagtctgtgcgtaaacgtcgtgctcgaggtgaagtactcactgacctatacagacgcaggagaagtgaccaaggctgacctttcttttgttttggggaccgtgagcagcgtggtggtgccactgcagcagaaattcgaaatacactttcttcaggagaatacccaaccggtccccctatccggcaaccctggatacgtggttggcctgccactggctgcgggcttccagcctcataagggttcaggcattattcagaccactaataggtacggccagctaacaatcctgcactctaccactgaacaggattgccttgcactcgaaggcgtgcgcactcccgtgctctttggctacaccatgcagtcaggctgcaaattgcgcttgactggtgccctcccatgccagctagtggctcagaaagtgaagtcattgctttggggccagggctttcccgattatgttgccccttttggaaactcgcaagctcaggacatgctcgactgggttccaatccactttatcacacagtccttcaatcgtaaggactcatgtcaactgcctggcgcgttggttattgaggtgaaatggaccaaatacggatccctgttgaatccccaggccaagatcgtgaacgtcacagcgaacctgatctctagctcgtttccagaggctaactctgggaacgaaaggacaattctgatttcaactgccgtcacattcgtggatgtttccgcccccgcagaagcgggcttccgagcccctcccgccatcaacgcaaggttgccctttaatttcttcttcccattcgtctag

SEQ ID NO: 37318 - DNA, 1764 bp, Artificial Sequence
  derived and/or modified sequence
atgaggccccggggcctgccccccctgctggtggtgctgctgggctgctgggcctctgtgtctgcccagacagatgccaccccagctgtgaccacagagggcctgaacagcacagaggccgccctggccaccttcggcaccttccccagcaccaggcctcctggcaccccccgggcccctggccccagcagcggcccccggcccacccctgtgacagatgtggccgtgctgtgtgtgtgtgacctgagccctgcccagtgtgacatcaactgctgctgtgaccctgactgcagctctgtggacttctctgtgttcagcgcctgcagcgtgcctgtggtgactggagacagccagttctgcagccagaaggccgtcatctacagcctgaacttcaccgccaaccccccccagagggtgtttgagctggtggaccagatcaaccccagcatcttctgcatccacatcaccaactacaagccagccctgtccttcatcaaccctgaggtgcctgatgagaacaactttgacaccctgatgaagaccagtgatggcttcaccctgaatgctgagagctatgtgtccttcaccaccaagctggacatccccacagctgccaagtatgaatatggagtgcccctgcagaccagtgacagcttcctgcgcttccccagcagcctgaccagcagcctgtgcacagacaacaacccagctgccttcctggtgaaccaggccgtgaagtgcaccaggaagatcaacctggagcagtgtgaggagattgaggccctgtccatggccttctacagcagccctgagatcctgcgggtgcctgacagcaggaagaaggtgcccatcaccgtgcagagcatcgtcatccagagcctgaacaagaccctgacccggcgggaggacacagatgtgctgcagcccaccctggtgaatgccggccacttcagcctgtgtgtgaatgtggtgctggaggtgaagtacagcctgacctacacagatgctggggaggtgaccaaggctgacctgagctttgtgctgggcaccgtgtcctctgtggtggtgcccctgcagcagaagtttgagatccacttcctgcaggagaacacccagcctgtgcccctgagcggcaaccctggctacgtggtgggcctgcccctggccgccggcttccagccccacaagggcagcggcatcatccagaccaccaacagatatggccagctgaccatcctgcacagcaccacagagcaggactgcctggccctggagggcgtgaggacccctgtgctgtttggctacaccatgcagagcggctgcaagctgcggctgaccggggccctgccctgccagctggtggcccagaaggtgaagagcctgctgtggggccagggcttcccagactatgtggcccccttcggcaacagccaggcccaggacatgctggactgggtgcccatccacttcatcacccagagcttcaacaggaaggacagctgccagctgcccggggccctggtgattgaggtgaagtggaccaagtatggcagcctgctgaacccccaggccaagatcgtgaatgtgacagccaacctgatcagcagcagcttccctgaggccaacagcggaaatgaaagaaccatcctgatcagcacagctgtgacctttgtggatgtgtctgccccagctgaggccggcttccgggcccccccagccatcaatgcccggctgcccttcaacttcttcttcccctttgtgtag

SEQ ID NO: 37319 - RNA, 1764 nt, Artificial Sequence
  derived and/or modified sequence
augagaccucggggucugccuccccuacucgucgugcuccugggcuguugggcgagcgucuccgcccagacggaugccacgcccgcgguaacuacugagggucugaacaguaccgaagccgcguuggccaccuucggcaccuucccgaguacuagaccuccaggcaccccuagagccccugggccuucaaguggaccucggccuacaccugucacugacguagcagugcugugugucugugaccuuagucccgcccagugugacaucaacugcugcugcgauccugauuguucauccguugauuuuagcguguuuucugccuguagcguacccguggugacgggugauagccaguucugcucccagaaagccgugauuuacucccugaacuuuaccgccaacccuccacaacgaguguuugagcuagucgaccagauuaacccuagcauauucuguauccauaucacgaauuacaagcccgcccuuucuuucaucaauccugaagucccagacgaaaauaauuucgacacucucaugaaaaccucagacggcuucacacugaacgcagaaagcuauguguccuuuaccacaaaauuggacauucccacugcugcuaaauacgaguauggggucccccuucagacgagcgacagcuuccucagauucccauccagccuaacuuccucccucuguaccgacaacaauccagcugcauuucuagucaaucaggcagucaaguguacccguaaaaucaaucuugagcaaugugaggagaucgaggcucugaguauggccuucuauagcucgcccgaaauucugagggugccggacagccggaagaagguucccaucaccguccagagcauagugauccaaagccuaaauaaaacccugacacggcgcgaagauacagacguccuacagccaacccuuguuaaugcuggucauuucucucugugcgucaauguggugcucgaggugaaauacucgcugacauauacagaugccggcgaagugacuaaggcggaucuguccuuuguuuugggaacugugucaucugugguggugccucugcagcagaaguucgaaauccauuuccuccaggaaaauacccaacccgugccccucucuggaaacccugguuacgucguaggccugccucuugccgccgguuuccaaccacacaaaggaucagggaucauccaaacaaccaaccguuaugggcagcuuaccauuuuacacagcacaacggaacaggacugccucgcacucgaggggguccguacgccaguccuguuuggauacaccaugcaauccgggugcaaacucagauuaacgggggcgcuccccugccagcucguggcccaaaaggugaaaagcuuauuauggggccagggcuucccugacuacguggcuccuuuuggcaacucccaagcacaagacaugcuggacuggguaccuauccacuuuauuacacaaaguuucaaucguaaggauuccugccaauuaccuggcgcucugguaaucgaggugaaguggacuaaauacgggucacuguugaacccccaggccaagauugucaacguuacugccaaucugaucaguagcucuuuuccggaagcaaauucagggaacgagaggacuauucugaucucgacggccgugaccuuuguggacgugagcgcgccagcagaagcaggcuucagggccccaccugcgauuaacgcacgucugccuuuuaauuuuuuuuucccauuuguguag

SEQ ID NO: 37320 - RNA, 1764 nt, Artificial Sequence
  derived and/or modified sequence
augaggcccaggggucucccuccucucuuagucguguuacuuggcuguugggcaagugugucagcccaaacugaugcuacgccugccgucacuacugaaggacugaacucaacugaggcugcucuggcuaccuucggcacuuuuccuagcacacgaccaccaggaacaccacgugcccccggccccagcucuggcccaagacccacgccagugaccgauguugccguccucugcguaugcgaccucuccccggcacagugcgauaucaauugcuguugcgaucccgacuguucuucuguggacuuuuccguuuuuagcgcuugcucaguucccgucguuacuggagacucgcaguucugcucucagaaagccguaauuuacucccucaauuuuacugccaauccaccccagagagucuuugaacugguugaucagauaaauccguccauuuucugcauccauaucacuaacuacaagccggcccuauccuucauuaacccugaagugcccgacgaaaauaacuuugacacccuuaugaaaaccucagauggauuuacgcugaacgcagaauccuauguuucuuucaccacaaagcuggauauuccgaccgccgcaaaauaugaauauggcgugccccuucagaccagcgacaguuuucuuagauuccccagcuccuugacaucuagcuugugcacagauaacaacccggccgcguucuuggugaaccaggcagugaaauguaccaggaagaucaaccuugagcaaugcgaagaaauugaggcccuaucgauggcauuuuacucgucucccgagauccugcggguuccugacucucgcaaaaaaguaccuauuacaguccagucuaucguaauccagucucugaauaaaaccuugacgaggcgcgaagauacagacguccuacagccaacccuuguuaaugcuggucauuucucucugugcgucaauguggugcucgaggugaaauacucgcugacauauacagaugccggcgaagugacuaaggcggaucuguccuuuguuuugggaacugugucaucugugguggugccucugcagcagaaguucgaaauccauuuccuccaggaaaauacccaacccgugccccucucuggaaacccugguuacgucguaggccugccucuugccgccgguuuccaaccacacaaaggaucagggaucauacaaacuacuaacagauacggacagcugaccauacuucacaguaccacggaacaggacugccuggcacuggagggggugcggaccccaguguuauuuggauauacaaugcagagcggaugcaaguuaagacugaccggggcacuucccugucaacucguugcucagaaaguaaagagucuuuuauggggccaaggcuuuccagacuaugucgcucccuuugguaacucgcaggcccaggauaugcucgauugggucccaauucauuuuaucacucaaucuuucaaucggaaagauagcugucaacugccaggcgcgcugguaauugaagucaaguggacaaaguacgggagccuccugaacccccaggccaagaucgugaauguaaccgccaaucucauuagcucaaguuuucccgaagcgaacuccgguaacgaaagaacuauccugaucucaaccgcagucaccuuuguugauguuagugcucccgccgaagcuggcuuucgagcuccccccgccaucaacgcccgauuaccuuucaauuuuuucuucccuuucguauag

SEQ ID NO: 37321 - protein, 592 aa, Artificial Sequence
  derived and/or modified sequence
MRPRGLPPLLVVLLGCWASVSAQTDATPAVTTEGLNSTEAALATFGTFPSTRPPGTPRAPGPSSGPRPTPVTDVAVLCVCDLSPAQCDINCCCDPDCSSVDFSVFSACSVPVVTGDSQFCSQKAVIYSLNFTANPPQRVFELVDQINPSIFCIHITNYKPALSFINPEVPDENNFDTLMKTSDGFTLNAESYVSFTTKLDIPTAAKYEYGVPLQTSDSFLRFPSSLTSSLCTDNNPAAFLVNQAVKCTRKINLEQCEEIEALSMAFYSSPEILRVPDSRKKVPITVQSIVIQSLNKTLTRREDTDVLQPTLVNAGHFSLCVNVVLEVKYSLTYTDAGEVTKADLSFVLGTVSSVVVPLQQKFEIHFLQENTQPVPLSGNPGYVVGLPLAAGFQPHKGSGIIQTTNRYGQLTILHSTTEQDCLALEGVRTPVLFGYTMQSGCKLRLTGALPCQLVAQKVKSLLWGQGFPDYVAPFGNSQAQDMLDWVPIHFITQSFNRKHFVLQDSCQLPGALVIEVKWTKYGSLLNPQAKIVNVTANLISSSFPEANSGNERTILISTAVTFVDVSAPAEAGFRAPPAINARLPFNFFFPFV

SEQ ID NO: 37322 - DNA, 1885 bp, Artificial Sequence
  derived and/or modified sequence
cgctgggactccctgggagatgaggccgcgaggtctcccgccgctcctggtggtgctcctgggctgctgggcctccgtgagcgcccagaccgatgccaccccggcggtgacgacagagggcctcaactccaccgaggcagccctggccaccttcggaactttcccgtcgaccaggccccccgggactcccagggctccagggccctcctccggccccaggcctaccccagtcacggacgttgctgttctctgtgtctgtgacttatccccagcacagtgtgacatcaactgctgctgtgatcccgactgcagctccgtggatttcagtgtcttttctgcctgctcagttccagttgtcacgggcgacagccagttttgtagtcaaaaagcagtcatctattcattgaattttacagcaaacccacctcaaagagtatttgaacttgttgaccagattaatccatctattttctgcattcatattacaaactataaacctgcattatcctttattaatccagaagtacctgatgaaaacaattttgatacattgatgaaaacatctgatggttttacattgaatgctgaatcatatgtttccttcacaaccaaactggatattcctactgctgctaaatatgagtatggggttcctctgcagacttcagattcgtttctgagatttccttcgtccctgacatcatctctgtgcactgataataaccctgcagcgtttctggtgaaccaggctgttaagtgcaccagaaaaataaatttagaacagtgtgaagaaattgaagccctcagcatggctttttacagcagcccggaaattctgagggtacctgattcaagaaaaaaggtccctatcactgttcagtccatcgtcattcagtctctaaataaaacgctcacccgacgggaggacactgatgtgctgcagccgactctcgtcaacgctggacactttagcctttgcgtgaatgttgttcttgaggtaaagtacagcctcacatacacagatgcaggtgaagtcaccaaagctgatctctcattcgttctggggacagttagcagcgtagtggtcccactgcagcaaaagtttgaaattcattttcttcaggaaaatacccagccagtccctctcagtggaaaccctggttatgtcgtggggctcccattagctgctggattccagcctcataaggggtctgggattattcagaccacaaatagatatggacagcttactattcttcatagcacaactgagcaagactgcttagcactggagggggtccggaccccagtattatttggttacactatgcaatctggctgtaaactaagactgactggagctctcccgtgtcagctcgtagcacagaaggtgaagagcctgctgtggggccagggcttcccagattacgtggccccttttggaaattcccaggcccaggacatgctggactgggtgcccatccacttcatcacccagtcattcaacaggaagcattttgttttgcaggattcctgccagctcccaggggctttggttatagaagtgaagtggactaaatacggatccctgctgaatccacaggccaaaatagtcaatgtaactgcaaatctaatttcatcctcctttcctgaggccaactcaggaaatgaaaggacgattcttatttccactgcggttacttttgtggatgtgtctgcacctgcagaggcaggcttcagagctccaccagccatcaatgccaggctgccctttaacttcttcttcccgtttgtttgacaatgctcagatgcatcagttccttaatatacacgtgaaatttgaaaactgtacattcggtgagattaaattttatatacaactagc

SEQ ID NO: 37323 - DNA, 1779 bp, Artificial Sequence
  derived and/or modified sequence
atgcggccaaggggattaccacccctcctggtggtattactgggctgttgggcctccgtctctgcccagacagatgctactcctgctgtgaccaccgagggactaaatagcaccgaggctgccttggcaacctttggtacttttccctctacaagaccacccggaactcctcgcgctcctggtccttcttcggggcctcgcccaacccctgttaccgatgtggcagtactgtgcgtatgtgatctcagtccagcccaatgcgacataaactgttgctgtgatcctgattgctcttcggtggattttagtgtattctccgcctgcagcgtgcctgtcgttacaggcgattctcagttttgttcccagaaggccgtgatttattcgctaaactttacagcaaatccacctcagcgcgtgtttgagctggtagatcagatcaacccctctattttttgtatccacattaccaactataagccggcattgtctttcataaaccccgaagtccctgacgaaaacaacttcgatactctaatgaaaacctccgacgggttcaccctaaatgctgaaagctatgtgtctttcaccacaaaactcgacattcccactgccgctaaatacgagtatggcgtgcccctccagacctcggattcattcctgaggttcccttcaagtctgacgtcctcactctgtactgacaataaccccgcagcgttcctcgtaaaccaagccgtgaaatgcacacggaaaattaatcttgaacagtgcgaggagattgaagccctgtctatggcattctactctagcccggagattctaagagttccggactcgcgcaagaaagtgcccatcaccgtccaatcaatcgtcatccagtcactgaataaaacgctcaccaggcgtgaggacacagacgtcctccagccaactttagtgaatgctggacactttagtctatgcgtgaatgtcgtgctcgaggttaagtatagtctgacctacacggacgctggcgaggtgacaaaggccgacttatcatttgtgctgggtacggtgagcagcgtcgtggttcccctccaacagaagttcgaaatccactttctgcaggagaacactcagcccgttcctctgtccgggaaccccggttacgtggttggactgcccctcgccgctggcttccagcctcataagggctcgggaatcatccagactactaaccggtacggtcaacttacaatcctccattcaactaccgaacaggactgtctcgccctggagggagtgcggactcctgtgcttttcggctataccatgcagtcaggctgcaaattgagactgacaggggctctgccctgccagcttgtggcccaaaaggtgaaaagtctcctctggggccaggggtttcccgactacgtagccccattcggaaattctcaagcacaagacatgctggattgggtgcccatccattttatcacacagagcttcaatagaaagcattttgtgctacaggacagctgtcaactgcctggtgcattggtgatcgaggtaaaatggaccaaatacgggtccctcctgaaccctcaagccaagattgtaaacgtcaccgccaacctgatatccagtagtttccccgaggccaattctggcaacgaacgaaccatcttaatcagtaccgccgtgacgtttgtagacgtgtcagcccctgcagaagcgggtttccgtgccccacccgcaattaacgccaggctgccttttaatttcttttttccctttgtatag

SEQ ID NO: 37324 - DNA, 1779 bp, Artificial Sequence
  derived and/or modified sequence
atgaggcccagagggctgccgccgctcctggttgtattattgggctgctgggcaagcgtttctgcccaaacagatgcaactcctgccgtgacaactgagggcctgaactccacagaggctgcactcgcaacatttggaacattcccaagcacccggccccccggaacgccccgtgcccctggcccatcatctggacccaggcccactccagtcacagatgtggccgtattatgtgtttgtgacttgagcccagcccaatgcgatataaactgctgttgtgatcccgactgctcctccgtggatttttccgtgttctcggcctgcagcgtgcccgtcgtcaccggcgattcacagttttgtagtcagaaggcggttatttacagtcttaactttaccgcaaacccaccacagcgtgtgtttgagttagtagaccagatcaacccgtcaatcttttgtattcacattaccaactacaagcctgccttgagttttatcaacccagaggtacccgacgaaaataatttcgacaccctgatgaaaacgtccgacggcttcactctgaacgccgagtcctatgtgagcttcactacaaagctcgatatacccaccgcagctaaatatgagtatggagtgccgctccaaacttccgactcctttctgaggtttccctcttctcttaccagtagtctgtgtacagacaataaccccgccgcctttctagttaaccaggcggtgaagtgtacccgcaagataaacctcgagcagtgtgaagaaatcgaggctctgtcaatggccttctactcaagtcctgaaatactccgagtgccagactcacgtaaaaaagttcccatcacagtgcaatccattgtaatacagtcacttaacaaaactctgaccaggagggaagacaccgatgtgcttcagcctacccttgttaatgccggccatttctccctgtgtgtgaacgtcgtattggaagtgaaatattccctgacttacaccgacgccggagaagttactaaagccgatctgagcttcgtgctgggaaccgtgtctagtgtagtcgtgccactgcagcaaaaatttgagatacactttctgcaggagaatacccaaccggtccctctgtccggaaatccaggttacgtcgtcggactgcccctggctgccggcttccaaccccacaaaggtagcggtatcatccagactacaaatcggtatggacagctaacaatcctccactcaacaactgaacaagactgccttgctttggaaggagtgcgaacccctgtactgttcggctatacaatgcagtctggctgcaagctgcgattaacaggggcactgccttgtcagctcgtcgcgcagaaggtgaaatcacttctgtggggacagggctttcccgattatgtagcccctttcgggaactcacaggcccaggatatgctagattgggtaccaattcattttatcactcagtcctttaaccgaaagcacttcgtgttgcaagactcatgccagctgcccggggccctggtcatcgaggttaagtggaccaagtacgggagccttcttaatccgcaggctaaaattgtgaacgtgaccgctaatttgatctcaagtagtttcccagaggcaaacagcggcaacgagcgcacaatcttgatcagtaccgccgtaacatttgtcgatgtgtcagcccccgcggaggccggattccgggccccacccgccatcaacgctcggctgcccttcaactttttctttccatttgtgtag

SEQ ID NO: 37325 - DNA, 1779 bp, Artificial Sequence
  derived and/or modified sequence
atgcgtccccgcggactgccacccctgctggttgtccttttaggttgctgggcatctgtgtccgctcagacagatgcgaccccagccgtgacaaccgagggcctcaactctaccgaggcagccctagccacatttggtacattcccttcaacaaggccccctggcaccccccgcgctcctggacccagcagcggtccaaggcccacacccgttacagacgtagctgtcctttgtgtttgtgacctctcccccgctcagtgtgatatcaattgctgctgcgatcctgattgttcttctgtggacttctccgtgttttccgcgtgctccgtcccagttgtaaccggcgatagtcagttttgctcccagaaagcagttatatactcactcaactttaccgccaatcccccacagcgcgttttcgagttggtcgaccagataaacccatcaattttttgcatccacattacaaattacaagccagcactgtctttcatcaaccccgaggtcccggacgaaaataacttcgacactttaatgaaaaccagcgacggatttacgctgaacgccgaatcgtatgtctcctttacgacaaaactcgatataccgacagccgcaaaatatgaatacggagtgccccttcagacttccgacagttttctgagattcccctcctcacttacctcttcgctgtgcacagacaacaatccagctgcattcctggtgaaccaagctgtcaagtgcacacgtaagataaacttagagcagtgtgaagagattgaagctttatcaatggccttttattccagccccgagattttgcgggtgcccgacagcagaaaaaaagtccctatcacagtccaaagcatcgtcatccagagcctgaataaaacgttaactcgcagggaagacaccgatgtgcttcagcctacccttgttaatgccggccatttctccctgtgtgtgaacgtcgtattggaagtgaaatattccctgacttacaccgacgccggagaagttactaaagccgatctgagcttcgtgctgggaaccgtgtctagtgtagtcgtgccactgcagcaaaaatttgagatacactttctgcaggagaatacccaaccggtccctctgtccggaaatccaggttacgtcgtcggactgcccctggctgccggcttccaaccccacaaaggtagcggtatcatccaaaccactaaccgatacggccagttaactatcctccattcgactacagaacaagactgtcttgcactggaaggagtccgcaccccagttctctttggttacactatgcaaagtgggtgtaaattgcgccttactggtgctctgccttgccaactcgtagcccaaaaagtgaagtctctcttgtgggggcaagggttcccagactacgtcgcacccttcggaaactctcaggctcaggatatgctcgactgggtcccaattcactttattacccagtcatttaacagaaaacattttgtgctgcaagattcgtgccagcttcccggcgccctggtgattgaagttaaatggaccaagtacggatccctgctgaacccccaagccaagatcgttaatgttacagccaatctaatctcttcctcctttcctgaagctaatagcggcaatgaaagaactatcctgatttccactgccgtcactttcgtggacgtgagcgcccctgccgaagcgggattccgcgctccccctgcaattaacgcgagactgcccttcaacttcttctttcccttcgtctag

SEQ ID NO: 37326 - DNA, 1779 bp, Artificial Sequence
  derived and/or modified sequence
atgagacccagaggcctgccccccctgctggtggtgctgctgggctgctgggccagcgtgagcgcccagaccgacgccacccccgccgtgaccaccgagggcctgaacagcaccgaggccgccctggccaccttcggcaccttccccagcaccagaccccccggcacccccagagcccccggccccagcagcggccccagacccacccccgtgaccgacgtggccgtgctgtgcgtgtgcgacctgagccccgcccagtgcgacatcaactgctgctgcgaccccgactgcagcagcgtggacttcagcgtgttcagcgcctgcagcgtgcccgtggtgaccggcgacagccagttctgcagccagaaggccgtgatctacagcctgaacttcaccgccaaccccccccagagagtgttcgagctggtggaccagatcaaccccagcatcttctgcatccacatcaccaactacaagcccgccctgagcttcatcaaccccgaggtgcccgacgagaacaacttcgacaccctgatgaagaccagcgacggcttcaccctgaacgccgagagctacgtgagcttcaccaccaagctggacatccccaccgccgccaagtacgagtacggcgtgcccctgcagaccagcgacagcttcctgagattccccagcagcctgaccagcagcctgtgcaccgacaacaaccccgccgccttcctggtgaaccaggccgtgaagtgcaccagaaagatcaacctggagcagtgcgaggagatcgaggccctgagcatggccttctacagcagccccgagatcctgagagtgcccgacagcagaaagaaggtgcccatcaccgtgcagagcatcgtgatccagagcctgaacaagaccctgaccagaagagaggacaccgacgtgctgcagcccaccctggtgaacgccggccacttcagcctgtgcgtgaacgtggtgctggaggtgaagtacagcctgacctacaccgacgccggcgaggtgaccaaggccgacctgagcttcgtgctgggcaccgtgagcagcgtggtggtgcccctgcagcagaagttcgagatccacttcctgcaggagaacacccagcccgtgcccctgagcggcaaccccggctacgtggtgggcctgcccctggccgccggcttccagccccacaagggcagcggcatcatccagaccaccaacagatacggccagctgaccatcctgcacagcaccaccgagcaggactgcctggccctggagggcgtgagaacccccgtgctgttcggctacaccatgcagagcggctgcaagctgagactgaccggcgccctgccctgccagctggtggcccagaaggtgaagagcctgctgtggggccagggcttccccgactacgtggcccccttcggcaacagccaggcccaggacatgctggactgggtgcccatccacttcatcacccagagcttcaacagaaagcacttcgtgctgcaggacagctgccagctgcccggcgccctggtgatcgaggtgaagtggaccaagtacggcagcctgctgaacccccaggccaagatcgtgaacgtgaccgccaacctgatcagcagcagcttccccgaggccaacagcggcaacgagagaaccatcctgatcagcaccgccgtgaccttcgtggacgtgagcgcccccgccgaggccggcttcagagccccccccgccatcaacgccagactgcccttcaacttcttcttccccttcgtgtag

SEQ ID NO: 37327 - DNA, 1779 bp, Artificial Sequence
  derived and/or modified sequence
atgaggccaaggggactgccccctcttcttgttgtattgctcgggtgctgggcctcagtgtccgcccaaacagatgcaaccccggccgtcaccacagaggggctgaacagcacagaagccgcgctagctacatttggcacttttccatccaccaggcctccagggactccacgcgcacccggtccttcttctgggccgaggcccacaccagtaactgacgtggccgttttatgtgtctgcgacctaagccctgcccagtgtgacatcaactgctgttgcgatccagactgctcatccgttgattttagcgttttcagcgcatgcagtgtgccagtggtcacaggagacagccagttctgtagtcagaaagcagttatatacagtttgaacttcaccgcaaatccgcctcagcgtgtgttcgagctggttgaccaaattaacccttccatcttttgcatacatatcaccaactacaagcctgcactcagcttcatcaatccagaagtgcctgatgaaaataattttgatactctcatgaagacatctgacggatttacgctgaacgctgagagttacgtgagctttacaactaagttggacatacccacagcggcaaagtacgaatacggggtgcccctgcagacaagcgactccttcttgaggttcccatcaagcctcacaagctccctgtgcacagataacaatccggccgcatttctcgtcaatcaagctgtgaagtgcacgcgtaagattaatctagagcagtgtgaagagatcgaggctctgtcaatggccttttattcttcacccgaaatacttcgcgttcccgattcaaggaagaaagtccccatcacagtgcagagcatagttatacagtcgctgaataaaaccttaacacgcagagaagacaccgacgttttgcagcccaccctcgtcaatgccggtcattttagcctctgtgtgaatgtcgtgctagaggttaagtattctctgacttacaccgatgcgggagaggtgacaaaggccgacctgtctttcgtcctggggacagtatccagtgtggtggtgcccctgcagcaaaaatttgaaatacattttctgcaggagaacacccagccagtgccattgtccggtaatccggggtacgtagtggggttgcccctcgctgcagggttccagccacacaaaggctctggaattattcagacaacaaaccgttacggccaacttacaatactgcattccaccacagaacaagattgcttagccctggaaggtgtgcggacccccgtgttgttcggttacacaatgcagtcaggctgcaaattgagactgaccggtgcattaccatgtcagctggttgcgcagaaggttaagtccttgctgtgggggcagggattccctgattacgtagctccgtttgggaatagtcaggcccaggacatgcttgattgggtgcccatccactttattacccagtcttttaatcgtaagcactttgtgcttcaggatagctgccagcttcctggggctctggtgattgaagtaaaatggacgaaatacggatctctgctaaacccacaggctaagattgttaacgtgaccgccaatctgatcagtagctccttcccagaagcaaatagcggcaatgagcgaacaattctcattagcacggctgtaactttcgtggatgtgtcagctcctgcggaggcaggcttccgcgcgccgcccgccatcaatgctcgcctgccctttaacttcttcttcccattcgtctag

SEQ ID NO: 37328 - DNA, 1779 bp, Artificial Sequence
  derived and/or modified sequence
atgaggccccggggcctgccccccctgctggtggtgctgctgggctgctgggcctctgtgtctgcccagacagatgccaccccagctgtgaccacagagggcctgaacagcacagaggccgccctggccaccttcggcaccttccccagcaccaggcctcctggcaccccccgggcccctggccccagcagcggcccccggcccacccctgtgacagatgtggccgtgctgtgtgtgtgtgacctgagccctgcccagtgtgacatcaactgctgctgtgaccctgactgcagctctgtggacttctctgtgttcagcgcctgcagcgtgcctgtggtgactggagacagccagttctgcagccagaaggccgtcatctacagcctgaacttcaccgccaaccccccccagagggtgtttgagctggtggaccagatcaaccccagcatcttctgcatccacatcaccaactacaagccagccctgtccttcatcaaccctgaggtgcctgatgagaacaactttgacaccctgatgaagaccagtgatggcttcaccctgaatgctgagagctatgtgtccttcaccaccaagctggacatccccacagctgccaagtatgaatatggagtgcccctgcagaccagtgacagcttcctgcgcttccccagcagcctgaccagcagcctgtgcacagacaacaacccagctgccttcctggtgaaccaggccgtgaagtgcaccaggaagatcaacctggagcagtgtgaggagattgaggccctgtccatggccttctacagcagccctgagatcctgcgggtgcctgacagcaggaagaaggtgcccatcaccgtgcagagcatcgtcatccagagcctgaacaagaccctgacccggcgggaggacacagatgtgctgcagcccaccctggtgaatgccggccacttcagcctgtgtgtgaatgtggtgctggaggtgaagtacagcctgacctacacagatgctggggaggtgaccaaggctgacctgagctttgtgctgggcaccgtgtcctctgtggtggtgcccctgcagcagaagtttgagatccacttcctgcaggagaacacccagcctgtgcccctgagcggcaaccctggctacgtggtgggcctgcccctggccgccggcttccagccccacaagggcagcggcatcatccagaccaccaacagatatggccagctgaccatcctgcacagcaccacagagcaggactgcctggccctggagggcgtgaggacccctgtgctgtttggctacaccatgcagagcggctgcaagctgcggctgaccggggccctgccctgccagctggtggcccagaaggtgaagagcctgctgtggggccagggcttcccagactatgtggcccccttcggcaacagccaggcccaggacatgctggactgggtgcccatccacttcatcacccagagcttcaacaggaagcactttgtgctgcaggacagctgccagctgcccggggccctggtgattgaggtgaagtggaccaagtatggcagcctgctgaacccccaggccaagatcgtgaatgtgacagccaacctgatcagcagcagcttccctgaggccaacagcggaaatgaaagaaccatcctgatcagcacagctgtgacctttgtggatgtgtctgccccagctgaggccggcttccgggcccccccagccatcaatgcccggctgcccttcaacttcttcttcccctttgtgtag

SEQ ID NO: 37329 - DNA, 1779 bp, Artificial Sequence
  derived and/or modified sequence
atgcggccccggggcctgccccccctgctggtggtgctgctgggctgctgggcgtctgtgagtgctcagacagatgccactcccgccgtcacgactgaaggcctgaatagcacggaggcggcacttgccacattcggaacttttccctcgacccggccccccggaacccccagagctcctggcccctcatcgggcccacggcccacccctgtgacagatgtggccgtgctgtgcgtgtgcgacctgtctcccgcccagtgcgacattaattgctgctgcgatccagactgcagcagtgtcgacttctcagtgttctccgcttgctccgtcccagtggtcaccggagattcacagttttgcagccagaaagcagtgatatattctcttaatttcaccgcaaacccaccccaacgagtgttcgaattggttgaccagatcaatccatccatcttctgcatccacatcactaactataagccagcactctcgtttatcaatcccgaagtccccgatgaaaataacttcgatacattaatgaaaacatcagacgggttcaccttaaatgcagagtcctatgtgtcctttaccactaaacttgacatcccgacagcagccaagtatgagtacggcgtgcccctccagacctcagacagtttcctgcgctttccctcctctctgacaagttctctgtgtacagataataaccccgccgctttccttgtaaatcaggccgtgaagtgcacccgaaaaattaacctggagcaatgtgaggaaatcgaagccttgagtatggctttctactcttcacctgaaatcctcagagtgcctgacagcagaaaaaaggtccccataaccgttcagtctattgtgattcagtctctcaacaagacactaaccagaagagaggatacagacgtcttgcagccaacccttgtgaacgctggccatttcagcttgtgcgtcaatgtggtgctggaggtgaagtattctttgacctacaccgatgctggagaggtgacgaaagccgacttgagtttcgtactcgggactgtgtctagtgtggtggtgccattacagcagaaatttgaaatccatttcctgcaggaaaatacccagcctgtcccactctctggaaatcccggttacgtggtaggtctgcccctggctgctggcttccagcctcacaagggatctggaattatccaaaccacgaatagatacggtcagctgactatattgcatagcaccactgaacaggactgcctggccctcgaaggcgtgaggactcccgtactgtttggctataccatgcaatctggttgtaagcttaggctgaccggggccctcccctgccaactggtggcccagaaagtgaaaagcctcctgtggggtcagggatttccagactacgtggcccccttcggaaatagccaggcccaagacatgctagattgggtccctatacacttcatcacccagagttttaatcgcaaacactttgtgctgcaggattcctgtcagctaccaggtgcacttgttattgaggtgaagtggacgaagtacggcagtctgctgaatcctcaggccaagatagtgaacgttactgccaatctgattagtagctcttttcccgaggctaactccggtaacgaaaggaccatcctgatctccacagcggtgacgtttgtggacgtctctgcgccagccgaagcaggattccgcgctccgcctgccataaacgcccgcctcccatttaacttcttttttcccttcgtgtag

SEQ ID NO: 37330 - RNA, 1779 nt, Artificial Sequence
  derived and/or modified sequence
augaggcccagagggcugccgccgcuccugguuguauuauugggcugcugggcaagcguuucugcccaaacagaugcaacuccugccgugacaacugagggccugaacuccacagaggcugcacucgcaacauuuggaacauucccaagcacccggccccccggaacgccccgugccccuggcccaucaucuggacccaggcccacuccagucacagauguggccguauuauguguuugugacuugagcccagcccaaugcgauauaaacugcuguugugaucccgacugcuccuccguggauuuuuccguguucucggccugcagcgugcccgucgucaccggcgauucacaguuuuguagucagaaggcgguuauuuacagucuuaacuuuaccgcaaacccaccacagcguguguuugaguuaguagaccagaucaacccgucaaucuuuuguauucacauuaccaacuacaagccugccuugaguuuuaucaacccagagguacccgacgaaaauaauuucgacacccugaugaaaacguccgacggcuucacucugaacgccgaguccuaugugagcuucacuacaaagcucgauauacccaccgcagcuaaauaugaguauggagugccgcuccaaacuuccgacuccuuucugagguuucccucuucucuuaccaguagucuguguacagacaauaaccccgccgccuuucuaguuaaccaggcggugaaguguacccgcaagauaaaccucgagcagugugaagaaaucgaggcucugucaauggccuucuacucaaguccugaaauacuccgagugccagacucacguaaaaaaguucccaucacagugcaauccauuguaauacagucacuuaacaaaacucugaccaggagggaagacaccgaugugcuucagccuacccuuguuaaugccggccauuucucccugugugugaacgucguauuggaagugaaauauucccugacuuacaccgacgccggagaaguuacuaaagccgaucugagcuucgugcugggaaccgugucuaguguagucgugccacugcagcaaaaauuugagauacacuuucugcaggagaauacccaaccggucccucuguccggaaauccagguuacgucgucggacugccccuggcugccggcuuccaaccccacaaagguagcgguaucauccagacuacaaaucgguauggacagcuaacaauccuccacucaacaacugaacaagacugccuugcuuuggaaggagugcgaaccccuguacuguucggcuauacaaugcagucuggcugcaagcugcgauuaacaggggcacugccuugucagcucgucgcgcagaaggugaaaucacuucuguggggacagggcuuucccgauuauguagccccuuucgggaacucacaggcccaggauaugcuagauuggguaccaauucauuuuaucacucaguccuuuaaccgaaagcacuucguguugcaagacucaugccagcugcccggggcccuggucaucgagguuaaguggaccaaguacgggagccuucuuaauccgcaggcuaaaauugugaacgugaccgcuaauuugaucucaaguaguuucccagaggcaaacagcggcaacgagcgcacaaucuugaucaguaccgccguaacauuugucgaugugucagcccccgcggaggccggauuccgggccccacccgccaucaacgcucggcugcccuucaacuuuuucuuuccauuuguguag

SEQ ID NO: 37331 - RNA, 1779 nt, Artificial Sequence
  derived and/or modified sequence
augcguccccgcggacugccaccccugcugguuguccuuuuagguugcugggcaucuguguccgcucagacagaugcgaccccagccgugacaaccgagggccucaacucuaccgaggcagcccuagccacauuugguacauucccuucaacaaggcccccuggcaccccccgcgcuccuggacccagcagcgguccaaggcccacacccguuacagacguagcuguccuuuguguuugugaccucucccccgcucagugugauaucaauugcugcugcgauccugauuguucuucuguggacuucuccguguuuuccgcgugcuccgucccaguuguaaccggcgauagucaguuuugcucccagaaagcaguuauauacucacucaacuuuaccgccaaucccccacagcgcguuuucgaguuggucgaccagauaaacccaucaauuuuuugcauccacauuacaaauuacaagccagcacugucuuucaucaaccccgaggucccggacgaaaauaacuucgacacuuuaaugaaaaccagcgacggauuuacgcugaacgccgaaucguaugucuccuuuacgacaaaacucgauauaccgacagccgcaaaauaugaauacggagugccccuucagacuuccgacaguuuucugagauuccccuccucacuuaccucuucgcugugcacagacaacaauccagcugcauuccuggugaaccaagcugucaagugcacacguaagauaaacuuagagcagugugaagagauugaagcuuuaucaauggccuuuuauuccagccccgagauuuugcgggugcccgacagcagaaaaaaagucccuaucacaguccaaagcaucgucauccagagccugaauaaaacguuaacucgcagggaagacaccgaugugcuucagccuacccuuguuaaugccggccauuucucccugugugugaacgucguauuggaagugaaauauucccugacuuacaccgacgccggagaaguuacuaaagccgaucugagcuucgugcugggaaccgugucuaguguagucgugccacugcagcaaaaauuugagauacacuuucugcaggagaauacccaaccggucccucuguccggaaauccagguuacgucgucggacugccccuggcugccggcuuccaaccccacaaagguagcgguaucauccaaaccacuaaccgauacggccaguuaacuauccuccauucgacuacagaacaagacugucuugcacuggaaggaguccgcaccccaguucucuuugguuacacuaugcaaaguggguguaaauugcgccuuacuggugcucugccuugccaacucguagcccaaaaagugaagucucucuugugggggcaaggguucccagacuacgucgcacccuucggaaacucucaggcucaggauaugcucgacugggucccaauucacuuuauuacccagucauuuaacagaaaacauuuugugcugcaagauucgugccagcuucccggcgcccuggugauugaaguuaaauggaccaaguacggaucccugcugaacccccaagccaagaucguuaauguuacagccaaucuaaucucuuccuccuuuccugaagcuaauagcggcaaugaaagaacuauccugauuuccacugccgucacuuucguggacgugagcgccccugccgaagcgggauuccgcgcucccccugcaauuaacgcgagacugcccuucaacuucuucuuucccuucgucuag

SEQ ID NO: 37332 - protein, 312 aa, Artificial Sequence
  derived and/or modified sequence
MAQPYPPAQYPPPPQNGIPAEYAPPPPHPTQDYSGQTPVPTEHGMTLYTPAQTHPEQPGSEASTQPIAGTQTVPQTDEAAQTDSQPLHPSDPTEKQQPKRLHVSNIPFRFRDPDLRQMFGQFGKILDVEIIFNERGSKGFGFVTFETSSDADRAREKLNGTIVEGRKIEVNNATARVMTNKKTGNPYTNGWKLNPVVGAVYGPEFYAVTGFPYPTTGTAVAYRGAHLRGRGRAVYNTFRAAPPPPPIPTYGAVVYQDGFYGAEIYGGYAAYRYAQPAAAAAAYSDSYGRVYAAADPYHHTIGPAATYSIGTM

SEQ ID NO: 37333 - DNA, 2678 bp, Artificial Sequence
  derived and/or modified sequence
caaagcagacctcacctcccactaccagcttgaagtcacagcagccagaggaaattctgccaccattttcccaggtctgcagcccctccagctgggaacctgctcctggagccatccctctgcaaacagagagcccagagtgcctcggggaaaattggctgaataaaagagcgatcaggacgccacggctccgcctgaagcgatggcccagccctacccccccgcccagtacccccctccgccacagaacggcatccctgccgagtacgccccgcccccaccgcaccccacgcaggactactccggccagaccccggtccccacagagcatggcatgaccctgtacacaccagcacagacccaccccgagcagccaggctccgaggccagcacacagcccatcgccgggacccagacagtgccgcagacagacgaggcggcacagacggacagccagccgctccacccctccgaccctacagagaagcagcagcccaagcggctacacgtctccaacatccccttccggttcagggaccccgacttgcggcaaatgttcgggcaattcggaaaaattttagacgtggagatcatttttaacgagcggggctccaagggttttgggtttgtaacttttgaaactagctcagatgctgaccgagcccgggagaagctgaatgggacgatcgtagagggacggaaaattgaggtcaataatgccacggcccgagtgatgaccaacaagaagacggggaacccctacaccaacggctggaagctaaatccagtggtcggcgcagtctacgggcctgaattctatgcagtgacggggttcccctaccccaccaccggcacagccgttgcctaccggggcgcacatcttcggggccggggccgggccgtgtataatacatttcgggctgcgccacccccaccccccatcccgacttacggagcggtcgtgtatcaggatggattttatggtgctgagatttatggaggctacgcagcctacagatacgctcagcccgctgcagcggcggcagcctacagcgacagttacggcagagtctacgcagctgccgacccgtaccatcacaccatcgggcccgcggcgacctacagcattggaaccatgtgaaaccttccaccgtttccttctcggaccatgaagggcaaaaacaaaaaaacaaaaaaaatcacaaaacaaaaaaaacaaaaaaagatgttaagatccaagcaacaaaaaaaaaaccaaccaaaccaagaggcatccaaccaagtccaagtcccgcgtcctggccacacgcccgcaccgagggagcacgccggcaggggcgccgaggagcggccccaggacaggacggccccaccgcgtcctggctggcagcacagtgggaacacgcccctccgtctcaggcagtgggggagttggaggggaaggggcctcccttgtgggacccgtggggggctctgttttccatccagtcttcctttcccagcccccaactcccaagacagacagtgtggagcccagcggcggcggagcaggcccgggcctgagcaggcaggcgctgctagcaagacttgatctttgtggccagctgtgccagggggccggcggggctgaggggtgcgggcagctttcatcccaggggctccactgggccccgtcaccctcctgtcgcgtcccctgcgtcccacctccctcctgcccggcagtcccgcccgtgcccccagcctggcgaggaagccgtccaacagtagccccggggccagctcccaacagaaagggctgacgtggctccaggactcaggggcgctccatgggaggacgaaggaagcccagccagccaggagccactcctcacacctccaagtgtggccaagtgggccctgaggccaaggacttacttgctcttcctggccatctctccctttctggaggaggcccggggcctgtgtacaccaaggctgacctcgtgctgcctgctgggacccagccctccctgccgctcccctgtgagcccagtccaccgtgggcgcccagggccagggacgggccagcgcccggctgcatcgcgaggttgggagtcacagtggctgtgggcctggacgggcacagccagagcaggggcccatgggaagggcaagggatggggaagcctgggccggccccttccctgctcccaaggcaggtgtccaggtggcgggagcagcaccaaggacagccaggcttacccggtgggaggagcaggagcagagcaggtggcagggaggaacccctggcgaggcagggagcactgaagtagggaagcagcaaaaaatacaggctcccaacgtggctccactgtctcatgaagtgtcaaaaatttaaaaatacacctcactttctattcagcatcagctattgaaatggaattctccttttctattcccgttgtacatagccccacgccctgcctccggctttgtcctctgtacagagccccctgtcccctctgctgttccggacccttttcttgcagcagctcaaccccccgactcactcagatccccaggactgcagccgagccccgggcttcctttcttaccattctgtatgcttccaaggtgtgaccattcaaactaacagtattattaagattattaataaagatttctttcttcaaaccagg

SEQ ID NO: 37334 - DNA, 1519 bp, Artificial Sequence
  derived and/or modified sequence
gatacagcagcagctggtgctcctggccaggctgtgcgtgctctctctgcctctctctctcggactctctgctctctctctctgactctctcctctctctctgttggcctggtgaaatgttcttggctgtaggcacacagagccttggactcaaggctgttggagtcgaggacaccttgacttcggtcctggaggttgaaattctgcctctgagaagctaacagtcttcctgtggtcgccactcctccccagcagccccctccttgccaaggacggtccagaaggagccccactggggcctccccgctcagcaaagcagacctcacctcccactaccagcttgaagtcacagcagccagaggaaattctgccaccattttcccaggtctgcagcccctccagctgggaacctgctcctggagccatccctctgcaaacagagagcccagagtgcctcggggaaaattggctgaataaaagagcgatcaggacgccacggctccgcctgaagcgatggcccagccctacccccccgcccagtacccccctccgccacagaacggcatccctgccgagtacgccccgcccccaccgcaccccacgcaggactactccggccagaccccggtccccacagagcatggcatgaccctgtacacaccagcacagacccaccccgagcagccaggctccgaggccagcacacagcccatcgccgggacccagacagtgccgcagacagacgaggcggcacagacggacagccagccgctccacccctccgaccctacagagaagcagcagcccaagcggctacacgtctccaacatccccttccggttcagggaccccgacttgcggcaaatgttcgggcaattcggaaaaattttagacgtggagatcatttttaacgagcggggctccaagggttttgggtttgtaacttttgaaactagctcagatgctgaccgagcccgggagaagctgaatgggacgatcgtagagggacggaaaattgaggtcaataatgccacggcccgagtgatgaccaacaagaagacggggaacccctacaccaacggctggaagctaaatccagtggtcggcgcagtctacgggcctgaattctatgcagtgacggggttcccctaccccaccaccggcacagccgttgcctaccggggcgcacatcttcggggccggggccgggccgtgtataatacatttcgggctgcgccacccccaccccccatcccgacttacggagcggtcgtgtatcaggatggattttatggtgctgagatttatggaggctacgcagcctacagatacgctcagcccgctgcagcggcggcagcctacagcgacagttacggcagagtctacgcagctgccgacccgtaccatcacaccatcgggcccgcggcgacctacagcattggaaccatgtgaaaccttccaccgtttccttctcggaccatgaagggcaaaaacaaaaaaacaaaaaaaatcacaaaac

SEQ ID NO: 37335 - DNA, 939 bp, Artificial Sequence
  derived and/or modified sequence
atggcccagccctacccccccgcccagtaccccccccccccccagaacggcatccccgccgagtacgcccccccccccccccaccccacccaggactacagcggccagacccccgtgcccaccgagcacggcatgaccctgtacacccccgcccagacccaccccgagcagcccggcagcgaggccagcacccagcccatcgccggcacccagaccgtgccccagaccgacgaggccgcccagaccgacagccagcccctgcaccccagcgaccccaccgagaagcagcagcccaagagactgcacgtgagcaacatccccttcagattcagagaccccgacctgagacagatgttcggccagttcggcaagatcctggacgtggagatcatcttcaacgagagaggcagcaagggcttcggcttcgtgaccttcgagaccagcagcgacgccgacagagccagagagaagctgaacggcaccatcgtggagggcagaaagatcgaggtgaacaacgccaccgccagagtgatgaccaacaagaagaccggcaacccctacaccaacggctggaagctgaaccccgtggtgggcgccgtgtacggccccgagttctacgccgtgaccggcttcccctaccccaccaccggcaccgccgtggcctacagaggcgcccacctgagaggcagaggcagagccgtgtacaacaccttcagagccgcccccccccccccccccatccccacctacggcgccgtggtgtaccaggacggcttctacggcgccgagatctacggcggctacgccgcctacagatacgcccagcccgccgccgccgccgccgcctacagcgacagctacggcagagtgtacgccgccgccgacccctaccaccacaccatcggccccgccgccacctacagcatcggcaccatgtag

SEQ ID NO: 37336 - DNA, 939 bp, Artificial Sequence
  derived and/or modified sequence
atggcccagccctaccctcctgctcagtatccccctccaccacagaacggcatcccagctgagtacgctcctccccctcctcaccccacacaggattattcaggccagacccctgttcctaccgagcacggtatgacgctctacactcctgcccaaacacacccagagcagcctggctctgaggctagcactcaacctatagcaggtactcagaccgtaccccagacagacgaagctgctcaaacggattcccagccactacacccatctgacccaacagagaagcagcagcctaagcggttgcacgtgagtaacattccattcagattccgagacccagacctgcgtcagatgttcgggcaatttggaaagatacttgatgtggagattattttcaatgaacgaggctcgaaagggttcgggtttgtgacgtttgagacctccagtgatgctgatcgcgcaagggaaaagctgaatggcacaatcgtggaaggccgcaaaatagaagtgaataacgccacagccagagtgatgacgaacaaaaagactggcaatccttacactaacggttggaagctgaatcccgtggtcggcgccgtatacggtccagaattttacgccgtcacgggctttccttacccaacaacagggactgcagtcgcttatagaggtgctcatcttcggggccgcggaagagcagtatataatacgtttagggccgctccccccccgcccccgattcccacttatggcgccgttgtgtaccaggacggattctatggcgcggagatatacggcggctatgccgcgtacagatacgcccaacctgcggccgccgcagcagcttacagcgattcatatggccgggtctatgcggcggccgacccctaccatcatacaataggcccagctgccacttattctattggaacaatgtag

SEQ ID NO: 37337 - DNA, 939 bp, Artificial Sequence
  derived and/or modified sequence
atggcccaaccataccctccggcccagtaccccccccctccgcagaacgggattcccgctgagtatgcccctcctcctccccaccccacacaggattacagtgggcaaacccccgtccccactgagcacggcatgaccttatacacccctgctcaaacccacccagaacagccaggaagcgaagccagtacccagcccatcgctgggacccagactgtgcctcagaccgatgaggcagcccagactgattctcagcccctgcatccttctgaccctaccgaaaaacagcagccaaaacgactgcacgtctctaacatcccctttagattccgcgatcctgacctcagacagatgtttgggcagtttgggaaaattctagacgtggagataattttcaatgagcgtggttctaagggcttcggcttcgtgactttcgagacctcaagcgacgctgaccgtgccagagagaaactgaatggcacaatcgtcgagggtcgaaagatcgaggtgaacaacgccaccgctcgtgtcatgactaacaaaaagacgggcaatccatataccaacggctggaaactaaacccagttgttggcgcggtgtacgggccggaattttatgcagtgacaggcttcccctaccctacaactgggactgccgtcgcataccgtggggcccacctgagagggcggggccgagcagtctataatacctttcgtgccgcaccaccacctccaccgattcctacctacggtgcagtcgtttaccaggatggattttacggggctgagatctacggggggtacgcagcataccggtacgcacagcccgcggctgctgccgccgcgtattccgacagctatggccgcgtttacgcagccgctgacccctatcaccacactattggaccagccgcaacatattctataggcacgatgtag

SEQ ID NO: 37338 - DNA, 939 bp, Artificial Sequence
  derived and/or modified sequence
atggcccagccctaccccccagcccagtacccacctccaccccagaatggcatcccagcagaatatgcccctcctccaccccaccccacccaggactacagcggccagacccctgtgcccacagaacatggcatgaccctgtacaccccagcccagacccaccctgagcagcccggcagcgaggccagcacccagcccatcgccggcacccagacagtgccccagacagatgaagctgcccagacagacagccagcccctgcaccccagcgaccccacagagaagcagcagcccaagaggctgcacgtgagcaacatccccttccgcttccgggaccctgacctgcggcagatgtttggccagtttgggaagatcctggatgtggagatcatcttcaatgaaagaggcagcaagggcttcggctttgtgacctttgagaccagcagtgatgctgaccgggcccgggagaagctgaatggcaccatcgtggagggcaggaagattgaggtgaacaatgccacagcccgggtgatgaccaacaagaagacaggcaacccctacaccaacggctggaagctgaaccctgtggtgggcgctgtgtatggccctgagttctatgctgtgacaggcttcccctaccccaccaccggcacagctgtggcctacagaggagcccacctgcggggccggggccgggctgtgtacaacaccttccgggccgcccctcctcctccacccatccccacctacggggctgtggtgtaccaggacggcttctacggggctgagatctatggaggctatgctgcctaccgctatgcccagcctgctgctgctgctgctgcctacagcgacagctatggccgggtgtatgctgctgctgacccctaccaccacaccatcggccctgctgccacctacagcatcggcaccatgtag

SEQ ID NO: 37339 - DNA, 939 bp, Artificial Sequence
  derived and/or modified sequence
atggcccagccctacccccccgcccagtaccccccccccccccagaacgggattccagctgagtacgccccacccccccctcaccctacgcaggactattccggtcagactccagtgcctactgaacacggtatgacactctacacacctgcccagacccaccctgagcaaccaggttcagaggcctccacgcagcccattgccggaacccaaaccgtgccgcaaactgacgaagctgcccagaccgactcccaacccctgcacccttcagatcctactgaaaaacagcagcccaagagactccatgtgagtaacatccctttccgatttcgtgatccagatctgcgccagatgttcggtcagttcggcaagatcttggatgtcgagatcatattcaacgaacgaggaagcaaaggattcggctttgtgaccttcgaaacctcctccgacgcagatcgcgcccgggagaagctcaatggcaccattgtggagggacgcaagatagaagttaataatgctacagctagggtaatgaccaataaaaagaccggaaatccctacaccaacggatggaaactgaaccccgtcgtcggagcagtatacggacctgaattttacgccgtcactggattcccataccccacgactggcacggcagtagcttacagaggcgctcacctaagaggacgtggccgggcagtctataataccttcagggccgccccccccccccccccaattccaacctatggagcagttgtataccaggacggtttttatggagccgagatatacggcggatacgcggcctataggtacgcacagccagccgctgcagctgcggcatactccgattcttatgggagggtctacgccgcagccgatccctatcaccacacaatcggacctgccgccacctatagtatcggtactatgtag

SEQ ID NO: 37340 - DNA, 939 bp, Artificial Sequence
  derived and/or modified sequence
atggcccagccctacccccccgcccagtaccccccccccccccagaatgggataccagctgagtacgcaccgccaccgccacatcccactcaagactatagcggacagacgccagttcctacagagcacggaatgaccctctataccccagctcagacccacccagagcaacccggatctgaggcgagtacccagcctattgcaggaacacagactgtgccacagacggacgaagccgcccagactgatagccagcccttgcatccctctgatcctaccgagaagcagcagcctaagcggcttcacgtgtcgaacatcccatttcggttcagggatcccgatcttcgacagatgtttgggcagtttggcaaaatactagacgtggagatcatattcaacgaacgggggagtaaaggcttcggtttcgtgaccttcgagacgagttctgacgccgatcgcgcgcgcgagaagttgaacggaacaattgtggagggccggaagattgaggtgaacaacgctactgctcgcgtgatgactaacaagaagaccggtaacccctacacaaacgggtggaaactgaatcccgtggttggagccgtgtatgggcctgaattctacgccgtcacgggctttccctatcccaccactggaactgctgtggcctatcgcggtgcacatctcagaggtcggggaagagccgtgtacaacacattcagagccgctcctcctcctccgccaatcccaacttacggggctgttgtgtatcaggatggcttttacggagccgaaatttatggcggttatgccgcctaccgctacgcacaacccgccgctgccgcagccgcttatagtgacagctatggccgggtatatgcggctgccgatccatatcaccacacgataggccctgccgccacctattcgataggaacgatgtag

SEQ ID NO: 37341 - DNA, 939 bp, Artificial Sequence
  derived and/or modified sequence
atggcacagccttatcctccagctcagtatccgccacctccgcagaatggtatccccgcagagtatgctcctcctccacctcaccctacgcaggactacagcggacagactcccgtgcctacggaacatggaatgacattgtataccccagctcagacacatccagagcagcctggctctgaggcttctacccaacctattgccggtacacagactgtgccacaaacagacgaggctgctcagaccgactcccagcctctccatccatcagatcccacggagaaacagcagccaaaacgccttcacgtgagcaacataccttttcgatttagagacccagatttgcgccagatgttcggccagttcggcaaaatccttgacgtggaaattatctttaacgagcgcggatccaaggggtttggttttgtgacattcgagacttcatcagacgcagaccgcgcacgggagaagcttaacgggacgatcgtcgaagggaggaaaatcgaagttaacaatgcaaccgcacgtgtcatgacgaacaagaagacaggaaacccatatactaacggttggaagctgaaccccgttgtcggggctgtctacggcccagagttctacgcagtcacagggttcccgtaccctactaccgggaccgcggtggcttatcgcggtgcacatttgcgcggtcggggacgagcagtgtacaacacctttcgggcagccccacctccccctcctataccaacttatggcgctgtcgtgtatcaagacggcttctacggcgcagaaatttacgggggatacgctgcctaccgctacgcccagcctgcagctgccgctgcagcctattccgactcctatggcagggtgtatgcagcagccgacccctatcaccataccatcggtcccgcagccacttactccataggcacaatgtag

SEQ ID NO: 37342 - DNA, 939 bp, Artificial Sequence
  derived and/or modified sequence
atggcgcagccttatccgcctgcacagtatccccctccccctcaaaacggcattcccgctgagtacgctccccctccaccacatccaacgcaagactacagtgggcagacgccagtgccgactgagcacggaatgaccctgtacacacccgcacagacccacccagaacaaccaggctctgaggcgagcacccagccaatagccggtacacaaaccgtgccccagaccgacgaagccgctcagaccgactcgcagcctctgcacccttccgatcccacggaaaagcagcagcctaagaggctgcatgtcagtaacatcccgttcagatttagagaccccgatctgaggcaaatgtttggccagttcggcaaaattctggatgtcgaaataatcttcaatgaacgcggatcgaagggcttcgggtttgttaccttcgaaaccagttccgacgccgatcgggcacgcgagaagttaaatggcactatcgtggagggccgaaagatagaagttaacaatgcaacagctcgagtaatgacaaacaaaaaaactggcaacccctacaccaacggctggaagctcaatccagttgtcggcgctgtttacggcccagaattctacgcagtgacaggcttcccctatccaacgactgggaccgcagtggcttaccgcggagcccatctcagaggccgtgggcgagccgtgtacaacacgtttagggctgcacctccaccccctcccattccgacttatggggctgtggtctaccaggatggcttctacggggcagagatatacggtggatacgcagcctacaggtacgctcagcccgctgcagctgcagccgcatattcggattcatacggaagggtgtatgccgcagccgatccataccatcacacaattggaccggcagccacatactctattggcactatgtag

SEQ ID NO: 37343 - protein, 358 aa, Artificial Sequence
  derived and/or modified sequence
MEKKKMVTQGNQEPTTTPDAMVQPFTTIPFPPPPQNGIPTEYGVPHTQDYAGQTGEHNLTLYGSTQAHGEQSSNSPSTQNGSLTTEGGAQTDGQQSQTQSSENSESKSTPKRLHVSNIPFRFRDPDLRQMFGGFGFVTFENSADADRAREKLHGTVVEGRKIEVNNATARVMTNKKMVTPYANGWKLSPVVGAVYGPELYAASSFQADVSLGNDAAVPLSGRGGINTYIPLIIPGFPYPTAATTAAAFRGAHLRGRGRTVYGAVRAVPPTAIPAYPGVVYQDGFYGADLYGGYAAYRYAQPATATAATAAAAAAAAYSDGYGRVYTADPYHALAPAASYGVGAVASLYRGGYSRFAPY

SEQ ID NO: 37344 - protein, 376 aa, Artificial Sequence
  derived and/or modified sequence
MEKKKMVTQGNQEPTTTPDAMVQPFTTIPFPPPPQNGIPTEYGVPHTQDYAGQTGEHNLTLYGSTQAHGEQSSNSPSTQNGSLTTEGGAQTDGQQSQTQSSENSESKSTPKRLHVSNIPFRFRDPDLRQMFGQFGKILDVEIIFNERGSKGFGFVTFENSADADRAREKLHGTVVEGRKIEVNNATARVMTNKKMVTPYANGWKLSPVVGAVYGPELYAASSFQADVSLGNDAAVPLSGRGGINTYIPLIIPGFPYPTAATTAAAFRGAHLRGRGRTVYGAVRAVPPTAIPAYPGVVYQDGFYGADLYGGYAAYRYAQPATATAATAAAAAAAAYSDGYGRVYTADPYHALAPAASYGVGAVASLYRGGYSRFAPY

SEQ ID NO: 37345 - DNA, 1538 bp, Artificial Sequence
  derived and/or modified sequence
ctgccagagaggaagagaaaagaaaggaagaaacattagaaagaaaaaggaaggaaaacggtataaagagagatcaattacccacccttaaatagctagattggggggggaggggggtggaaaagaaagctgtggaggtgtgccccagcacggctgctttgaaaggtttatcatctatccgtttggtttatggagaaaaagaaaatggtaactcagggtaaccaggagccgacaacaactcctgacgcaatggttcagccttttactaccatcccatttccaccacctccgcagaatggaattcccacagagtatggggtgccacacactcaagactatgccggccagaccggtgagcataacctgacactctacggaagtacgcaagcccacggggagcagagcagcaactcacccagcacacaaaatggatctcttacgacagaaggtggagcacagacagacggccagcagtcacagacacaaagtagtgaaaattcagagagtaaatctaccccgaaacggctgcatgtctctaatattcctttccgcttccgggaccctgacctccggcagatgtttgggggattcgggttcgtaactttcgagaatagtgctgatgcagacagggccagggagaaattacacggcaccgtggtagagggccgtaaaatcgaggtgaataatgctacagcacgtgtaatgaccaataagaagatggtcacaccatatgcaaatggttggaaattaagcccagtagttggagctgtatatggtccggagttatatgcagcatccagctttcaagcagatgtgtccctaggcaatgatgcagcagtgcccctatcaggaagagggggtatcaacacttacattcctttaatcattcctggcttcccttaccctactgcagccaccacggcagccgctttcagaggagcccatttgaggggcagagggcggacagtatatggtgcagtccgagcggtacctccaacagccatccccgcctatccaggtgtggtttaccaggacggattttacggtgctgacctctatggtggatatgcagcctacagatatgcacagcctgctactgcaaccgcagccaccgctgctgcagccgctgcagccgcttacagtgacggttatggcagggtgtacacagccgacccctaccatgcccttgcccctgccgctagctatggagttggcgctgtggcgagtttataccgaggtggctacagccgatttgccccctactgaagtgacgtgagacccctgcaaatgggacagccccccagttcatgaggcctggctattgcaatatttactagtagaggaactctatagcaagatgaagaggaaaaacaaacaaacaaacaaaaaaaaacacaaaaaaagaaagaatacttttttatacctcactatgttctttgaatatgtatttttcctttaaatttctgcctttaattcttttgttccaaagattgtgcatttttttctttttttttttaaactgtggtaaaaaaaaaaaa

SEQ ID NO: 37346 - DNA, 1254 bp, Artificial Sequence
  derived and/or modified sequence
agaaagctgtggaggtgtgccccagcacggctgctttgaaaggtttatcatctatccgtttggtttatggagaaaaagaaaatggtaactcagggtaaccaggagccgacaacaactcctgacgcaatggttcagccttttactaccatcccatttccaccacctccgcagaatggaattcccacagagtatggggtgccacacactcaagactatgccggccagaccggtgagcataacctgacactctacggaagtacgcaagcccacggggagcagagcagcaactcacccagcacacaaaatggatctcttacgacagaaggtggagcacagacagacggccagcagtcacagacacaaagtagtgaaaattcagagagtaaatctaccccgaaacggctgcatgtctctaatattcctttccgcttccgggaccctgacctccggcagatgtttgggcagtttggcaaaatcctagatgtagaaataatctttaatgaacgtggctctaagggattcgggttcgtaactttcgagaatagtgctgatgcagacagggccagggagaaattacacggcaccgtggtagagggccgtaaaatcgaggtgaataatgctacagcacgtgtaatgaccaataagaagatggtcacaccatatgcaaatggttggaaattaagcccagtagttggagctgtatatggtccggagttatatgcagcatccagctttcaagcagatgtgtccctaggcaatgatgcagcagtgcccctatcaggaagagggggtatcaacacttacattcctttaatcattcctggcttcccttaccctactgcagccaccacggcagccgctttcagaggagcccatttgaggggcagagggcggacagtatatggtgcagtccgagcggtacctccaacagccatccccgcctatccaggtgtggtttaccaggacggattttacggtgctgacctctatggtggatatgcagcctacagatatgcacagcctgctactgcaaccgcagccaccgctgctgcagccgctgcagccgcttacagtgacggttatggcagggtgtacacagccgacccctaccatgcccttgcccctgccgctagctatggagttggcgctgtggcgagtttataccgaggtggctacagccgatttgccccctactgaagtgacgtgagacccctgcaaatgggacagccccccagttcatgaggcctggctatt

SEQ ID NO: 37347 - DNA, 1131 bp, Artificial Sequence
  derived and/or modified sequence
atggagaagaagaagatggtgacccagggcaaccaggagcccaccaccacccccgacgccatggtgcagcccttcaccaccatccccttccccccccccccccagaacggcatccccaccgagtacggcgtgccccacacccaggactacgccggccagaccggcgagcacaacctgaccctgtacggcagcacccaggcccacggcgagcagagcagcaacagccccagcacccagaacggcagcctgaccaccgagggcggcgcccagaccgacggccagcagagccagacccagagcagcgagaacagcgagagcaagagcacccccaagagactgcacgtgagcaacatccccttcagattcagagaccccgacctgagacagatgttcggccagttcggcaagatcctggacgtggagatcatcttcaacgagagaggcagcaagggcttcggcttcgtgaccttcgagaacagcgccgacgccgacagagccagagagaagctgcacggcaccgtggtggagggcagaaagatcgaggtgaacaacgccaccgccagagtgatgaccaacaagaagatggtgaccccctacgccaacggctggaagctgagccccgtggtgggcgccgtgtacggccccgagctgtacgccgccagcagcttccaggccgacgtgagcctgggcaacgacgccgccgtgcccctgagcggcagaggcggcatcaacacctacatccccctgatcatccccggcttcccctaccccaccgccgccaccaccgccgccgccttcagaggcgcccacctgagaggcagaggcagaaccgtgtacggcgccgtgagagccgtgccccccaccgccatccccgcctaccccggcgtggtgtaccaggacggcttctacggcgccgacctgtacggcggctacgccgcctacagatacgcccagcccgccaccgccaccgccgccaccgccgccgccgccgccgccgccgcctacagcgacggctacggcagagtgtacaccgccgacccctaccacgccctggcccccgccgccagctacggcgtgggcgccgtggccagcctgtacagaggcggctacagcagattcgccccctactag

SEQ ID NO: 37348 - DNA, 1077 bp, Artificial Sequence
  derived and/or modified sequence
atggagaaaaaaaaaatggtgacgcagggcaaccaggagcctaccaccacccccgatgcgatggtacaaccatttaccacaatcccattccctccccctcctcaaaacggaattcctaccgagtacggcgtgccccacacccaggactatgccggccaaactggagaacacaaccttactctatatgggagcacccaggcacatggcgagcagtctagcaacagtccgtccacccagaacggcagtctgaccactgaaggtggagcccaaaccgacggccagcaatcccagacccaaagttccgagaactccgagagtaaatccacccccaagcggcttcatgtcagcaacatcccgtttaggtttagagatcctgatcttcgccagatgttcggaggatttggctttgtcaccttcgaaaactctgccgacgccgaccgggcccgagagaaactccacggcactgtcgtggagggcaggaagattgaagtgaacaacgctaccgcccgggtcatgaccaacaagaaaatggtcaccccctacgctaatggctggaagctttctcccgttgtgggcgccgtctacggaccagaactgtacgctgcctcctcattccaagccgatgtcagtctcggcaacgatgcagctgtcccactgtccggaagggggggtataaacacttatatcccactgatcatacctggtttcccatatccgacggccgccaccaccgcggcggcattcagaggggcccatttacggggcaggggtcgaaccgtgtacggggctgtgcgagcagtcccccccacagccatcccggcttatcccggagtcgtgtaccaggacggtttctacggcgcagacttgtacgggggctacgccgcatacagatacgcacagccggcaacagcgaccgctgctactgcggctgccgctgctgccgctgcatacagtgacgggtatgggagggtttataccgctgacccctatcatgccctagcaccagccgctagttacggcgtgggcgcagtggcatccttgtacagggggggatactctcggttcgctccctattag

SEQ ID NO: 37349 - DNA, 1131 bp, Artificial Sequence
  derived and/or modified sequence
atggaaaagaaaaagatggtgactcaaggcaatcaggagcccaccacaacaccagatgccatggtccagccttttactaccattcccttccctcctccaccccagaacggtatcccgacggagtatggcgtgccccacacccaagactacgccgggcagacaggggagcacaatctgacactctacggctctactcaagcacatggtgagcaatccagcaactcccccagcactcaaaacggttcactaaccaccgagggaggtgcacagactgatggtcagcagtcacagacacagagttcagaaaattccgaatcaaagtccactcccaagcggctgcacgtgagtaacataccatttcgttttagagatccagatctcagacagatgttcggccagttcggcaaaatcctggatgtagagattatcttcaatgagagaggaagtaaaggctttggatttgtaacattcgagaattctgcggatgccgatagagctagagagaaactgcacggtactgtcgttgaaggtcggaagatagaggtaaataatgctaccgcccgggtgatgacgaataaaaagatggttacaccctacgccaatggctggaagctgagtcccgtggtgggtgcagtgtatggacccgagctctacgctgcctcaagttttcaggccgacgtgagcttaggcaatgatgcggccgtgcctctgtctgggcgcggcgggatcaacacttatatacctttgatcattcccgggttcccttaccccaccgctgccacgaccgctgccgctttccgcggggcccatttgagagggcgcggaaggactgtatatggagctgtgcgtgccgtgccacctactgcaattccagcgtaccccggtgtggtttatcaggatggattttacggagcagatttgtatgggggctatgccgcttatagatacgcccaacccgctaccgctaccgcagctactgccgctgctgctgctgccgctgcatatagtgacgggtatggacgggtctacacagcagacccctatcatgctctagcccctgcagcttcatatggcgtgggcgccgttgcctccttatacagagggggctactctaggttcgctccctactag

SEQ ID NO: 37350 - DNA, 1077 bp, Artificial Sequence
  derived and/or modified sequence
atggagaagaagaagatggtgacccagggcaaccaggagcccaccaccaccccagatgccatggtgcagcccttcaccaccatccccttccccccaccaccccagaatggcatccccacagaatatggagtgccccacacccaggactatgccggccagacaggagagcacaacctgaccctgtatggcagcacccaggcccacggggagcagagcagcaacagccccagcacccagaatggcagcctgaccacagaaggaggagcccagacagatggccagcagagccagacccagagcagcgagaacagcgagagcaagagcacccccaagaggctgcacgtgagcaacatccccttccgcttccgggaccctgacctgcggcagatgtttggaggcttcggctttgtgacctttgagaacagcgcagatgctgaccgggcccgggagaagctgcatggaacagtggtggagggcaggaagattgaggtgaacaatgccacagcccgggtgatgaccaacaagaagatggtgaccccctatgccaacggctggaagctgagccctgtggtgggcgctgtgtatggccctgagctgtatgctgccagcagcttccaggctgatgtgtccctgggcaatgatgctgctgtgcccctgagcggccggggcggcatcaacacctacatccccctcatcatccctggcttcccctaccccacagctgccaccacagctgctgccttccggggggcccacctgcggggccggggccgcacagtgtatggagctgtgcgggctgtgcccccaacagccatcccagcctacccaggagtggtgtaccaggacggcttctatggagctgacctgtatggaggctacgccgcctaccgctatgcccagcctgccacagccacagctgccacagctgctgctgctgctgctgctgcctacagtgatggctacggccgggtgtacacagctgacccctaccacgccctggccccagctgccagctatggagtgggcgctgtggccagcctgtaccggggcggctacagcagatttgccccctactag

SEQ ID NO: 37351 - DNA, 1131 bp, Artificial Sequence
  derived and/or modified sequence
atggagaagaagaagatggtgacccagggcaaccaggagcccaccaccaccccagatgccatggtgcagcccttcaccaccatccccttccccccaccaccccagaatggcatccccacagaatatggagtgccccacacccaggactatgccggccagacaggagagcacaacctgaccctgtatggcagcacccaggcccacggggagcagagcagcaacagccccagcacccagaatggcagcctgaccacagaaggaggagcccagacagatggccagcagagccagacccagagcagcgagaacagcgagagcaagagcacccccaagaggctgcacgtgagcaacatccccttccgcttccgggaccctgacctgcggcagatgtttggccagtttgggaagatcctggatgtggagatcatcttcaatgaaagaggcagcaagggcttcggctttgtgacctttgagaacagcgcagatgctgaccgggcccgggagaagctgcatggaacagtggtggagggcaggaagattgaggtgaacaatgccacagcccgggtgatgaccaacaagaagatggtgaccccctatgccaacggctggaagctgagccctgtggtgggcgctgtgtatggccctgagctgtatgctgccagcagcttccaggctgatgtgtccctgggcaatgatgctgctgtgcccctgagcggccggggcggcatcaacacctacatccccctcatcatccctggcttcccctaccccacagctgccaccacagctgctgccttccggggggcccacctgcggggccggggccgcacagtgtatggagctgtgcgggctgtgcccccaacagccatcccagcctacccaggagtggtgtaccaggacggcttctatggagctgacctgtatggaggctacgccgcctaccgctatgcccagcctgccacagccacagctgccacagctgctgctgctgctgctgctgcctacagtgatggctacggccgggtgtacacagctgacccctaccacgccctggccccagctgccagctatggagtgggcgctgtggccagcctgtaccggggcggctacagcagatttgccccctactag

SEQ ID NO: 37352 - DNA, 1077 bp, Artificial Sequence
  derived and/or modified sequence
atggagaagaagaagatggtgacccagggcaaccaggagcccaccacaacccccgatgcaatggtgcagccgtttaccaccatcccattccctccccccccacagaacgggattcccacggagtacggggtcccccacactcaagactacgcaggacagactggggagcacaatctaaccctttatgggtctacacaggcccatggtgaacagagcagcaacagcccgtcaacacagaatgggtccttgaccaccgaaggcggggcgcagactgacggacagcagtcccaaacccaaagctcagaaaactccgagagtaagtctactccgaagaggctgcatgtaagcaatatcccctttaggtttcgagatcctgatctgcgccagatgttcggaggatttggatttgtgaccttcgagaattctgccgacgctgaccgcgcccgggagaagttgcatgggaccgtggttgagggcaggaagattgaagtgaataatgccactgccagagtgatgactaataaaaagatggtcactccatacgctaatgggtggaaacttagtccggtcgtgggcgcggtgtatggacccgaactgtatgcagcgagctcctttcaggccgatgtctccctggggaatgacgctgcagtacccctttcagggaggggagggatcaacacatacattcctctaatcattccaggcttcccttacccaaccgccgccaccacagctgccgctttcaggggcgcccacctacgggggaggggccgaactgtctatggcgcagttagggcagtaccccctacagccatacccgcctaccccggcgtggtataccaggatggattctatggtgccgacctgtatggaggctacgccgcctaccgatacgcacagcctgccacggctactgctgctacggccgcagcggccgccgccgctgcatatagtgatgggtacggaagggtgtatactgctgacccatatcacgcattagcccctgcagcctcttatggcgtgggagctgttgcgtccctttaccggggggggtactcccgattcgccccttactag

SEQ ID NO: 37353 - DNA, 1131 bp, Artificial Sequence
  derived and/or modified sequence
atggagaagaagaagatggtgacccagggcaaccaggagcccaccaccactccagatgcaatggtccagccctttacaacgatccccttcccaccgccacctcagaacgggattcctacggaatatggtgtgccccatacacaagactacgctggtcaaaccggtgagcacaatctgaccctgtacggcagtactcaggctcacggggagcaaagcagcaactccccaagtacacaaaatggatccttgacgactgaggggggcgcccaaacggacggccaacaaagtcagacccagagctccgagaattcggaatctaaaagcacccccaagagactacatgtttccaacatacctttccgtttcagggatcccgatttgaggcagatgtttggccaattcgggaaaatattagatgtagagatcatcttcaacgagcgcggaagtaaagggttcgggttcgtcacatttgaaaacagtgccgacgcggacagggcgcgagagaagttacacggaaccgtggtcgagggtaggaaaatcgaagttaataacgctacggctcgcgtcatgaccaataagaagatggtaactccctatgctaacggatggaaattgtcgccggtggtcggcgccgtctacgggcccgaactgtacgctgccagttccttccaggctgatgttagcctgggcaacgacgcagcggtgccgctaagcgggagaggcggaattaacacatatattccccttataatccccggattcccctatcctacagccgccacaacagcggctgccttccgcggagcacacttaaggggtagagggaggactgtgtatggagcagtccgcgccgtaccacctactgcgattcccgcctaccctggtgtagtctaccaggacggcttttatggagcagatctctatggcggttatgcggcctaccggtatgcacagcccgccacggctacggccgcaacagcagccgcagctgcggctgccgcctattcagatggctacggcagggtgtacaccgccgatccttaccacgccttggcacctgctgcttcctacggcgtaggggcggttgcctcattgtacagggggggttatagtcgctttgctccctattag

SEQ ID NO: 37354 - DNA, 1077 bp, Artificial Sequence
  derived and/or modified sequence
atggaaaagaagaagatggtcacacaagggaaccaagagccaacaacgacaccagacgcaatggtgcagcccttcactaccatcccgttccccccacccccacagaatgggattcccaccgaatatggtgtcccccacacccaggattatgccggacagaccggagagcataacttgaccctatacggctctacccaggcgcacggcgagcagagtagtaacagccctagtacccaaaatggctctctcaccaccgaagggggagcccagactgacggacaacagtcgcaaacacagagcagcgagaactcggagtctaagtcaacacccaagcggctgcatgtctcaaacattcctttccgtttccgggacccagatctgcgccagatgtttgggggattcggctttgtcacgtttgaaaactctgcggatgctgacagggccagagagaagctgcatggcacagtggtggaagggaggaaaattgaggtgaataacgccaccgcccgtgtgatgactaataaaaagatggtgacgccctacgctaatggctggaagctgagtcccgtggtgggtgctgtatatggtccagaactgtacgctgcaagttcatttcaagccgatgtctcactagggaatgatgcagcggttcccctatcggggaggggaggcattaatacctatatccccttgataatcccgggatttccgtatccaactgcagccacgactgccgcagcgtttcggggtgcccaccttaggggtagaggacggacagtgtacggtgccgtgcgggctgtcccccctacagcaatccccgcatacccgggagtcgtgtaccaagatgggttctacggtgccgatctctatggaggctatgctgcatataggtacgcacagcctgccaccgccaccgccgctacagcagctgcagctgccgctgccgcttattcagacggctatgggagagtgtacacagctgatccttaccacgccttggcaccggctgcgtcatacggtgtaggggctgtggcatcactgtacaggggcggatatagcaggttcgctccctattag

SEQ ID NO: 37355 - DNA, 1131 bp, Artificial Sequence
  derived and/or modified sequence
atggagaaaaagaaaatggtgacgcagggcaaccaggaacctactaccacccctgatgccatggtccagccttttaccactattccctttccgcctccgccacagaacgggatcccaaccgagtacggagtcccccacacacaggattatgccggacaaaccggagaacataacctaactttgtacggttccactcaggcacatggagaacaatcgagcaattcgccgtccacccagaacggatcactcactacggaaggaggagcccagacggatggccagcagtcccagacacagtcctcagagaacagtgaatctaaatccacgccaaagcggttacacgtttccaatattccctttcgtttccgggatccagaccttaggcaaatgtttggacagttcggcaaaatcttagatgtagaaatcatcttcaacgagcgcggttctaaaggcttcggttttgtcacttttgaaaacagcgccgatgctgatagagcgagagaaaagctgcacggtaccgttgttgagggccgtaagattgaagtgaataatgcgaccgccagggtcatgaccaacaagaagatggtgaccccctacgcaaatggttggaagctttcacctgtggttggcgcagtctacggacccgagctttacgcagcctcatccttccaggctgatgttagcctgggtaatgatgcagcagtacctctgtctggacggggaggtatcaacacctatatcccgctgattatcccaggttttccctatccaacagccgctacaacagctgccgcatttcgaggggcacatctgagaggacggggtaggacagtgtacggcgctgttcgggcagtccctcctacagccataccagcatatccgggagtcgtttaccaggatgggttttatggcgctgacttgtacggtggctatgcagcatacagatatgcccagccagctaccgctaccgctgccaccgccgcagccgcagctgccgctgcttacagtgatggctacggccgtgtttacaccgccgacccttatcacgccctcgcccctgccgcatcctacggggtcggtgccgttgcctcactctaccggggtgggtattccagatttgccccatattag

SEQ ID NO: 37356 - DNA, 1077 bp, Artificial Sequence
  derived and/or modified sequence
atggagaagaagaagatggtgacccagggcaaccaggagcccaccaccacccccgacgccatggtgcagcccttcaccaccatccccttccccccccccccccagaacggcatccccaccgagtacggcgtgccccacacccaggactacgccggccagaccggcgagcacaacctgaccctgtacggcagcacccaggcccacggcgagcagagcagcaacagccccagcacccagaacggcagcctgaccaccgagggcggcgcccagaccgacggccagcagagccagacccagagcagcgagaacagcgagagcaagagcacccccaagagactgcacgtgagcaacatccccttcagattcagagaccccgacctgagacagatgttcggcggcttcggcttcgtgaccttcgagaacagcgccgacgccgacagagccagagagaagctgcacggcaccgtggtggagggcagaaagatcgaggtgaacaacgccaccgccagagtgatgaccaacaagaagatggtgaccccctacgccaacggctggaagctgagccccgtggtgggcgccgtgtacggccccgagctgtacgccgccagcagcttccaggccgacgtgagcctgggcaacgacgccgccgtgcccctgagcggcagaggcggcatcaacacctacatccccctgatcatccccggcttcccctaccccaccgccgccaccaccgccgccgccttcagaggcgcccacctgagaggcagaggcagaaccgtgtacggcgccgtgagagccgtgccccccaccgccatccccgcctaccccggcgtggtgtaccaggacggcttctacggcgccgacctgtacggcggctacgccgcctacagatacgcccagcccgccaccgccaccgccgccaccgccgccgccgccgccgccgccgcctacagcgacggctacggcagagtgtacaccgccgacccctaccacgccctggcccccgccgccagctacggcgtgggcgccgtggccagcctgtacagaggcggctacagcagattcgccccctactag

SEQ ID NO: 37357 - protein, 370 aa, Artificial Sequence
  derived and/or modified sequence
MEKKKMVTQGNQEPTTTPDAMVQPFTTIPFPPPPQNGIPTEYGVPHTQDYAGQTGEHNLTLYGSTQAHGEQSSNSPSTQNGSLTTEGGAQTDGQQSQTQSSENSESKSTPKRLHVSNIPFRFRDPDLRQMFGQFGKILDVEIIFNERGSKGFGFVTFENSADADRAREKLHGTVVEGRKIEVNNATARVMTNKKMVTPYANGWKLSPVVGAVYGPELYAASSFQADVSLGNDAAVPLSGRGGINTYIPLISLPLVPGFPYPTAATTAAAFRGAHLRGRGRTVYGAVRAVPPTAIPAYPGVDMQPTDMHSLLLQPQPPLLQPLQPLTVTVMAGCTQPTPTMPLPLPLAMELALWRVYTEVATADLPPTEVT

SEQ ID NO: 37358 - DNA, 759 bp, Artificial Sequence
  derived and/or modified sequence
gagagactgccagagaggaagagaaaagaaaggaagaaacattagaaagaaaaaggaaggaaaacggtataaagagagatcaattacccacccttaaatagctagattggggggggaggggggtggaaaagaaagctgtggaggtgtgccccagcacggctgctttgaaaggtttatcatctatccgtttggtttatggagaaaaagaaaatggtaactcagctggaaggctgaagtctttcacctgagctgctgccagttcgctcttctgttcctgggtggttgggagaagagaagagggagggtattttatgctttaattaaagacagataagagagcagggtaaccaggagccgacaacaactcctgacgcaatggttcagccttttactaccatcccatttccaccacctccgcagaatggaattcccacagagtatggggtgccacacactcaagactatgccggccagaccggtgagcataacctgacactctacggaagtacgcaagcccacggggagcagagcagcaactcacccagcacacaaaatggatctcttacgacagaaggtggagcacagacagacggccagcagtcacagacacaaagtagtgaaaattcagagagtaaatctaccccgaaacggctgcatgtctctaatattcctttccgcttccgggaccctgacctccggcagatgtttgggtttggcaaaatcctagatgtagaaataatctttaatgaacgtggctct

SEQ ID NO: 37359 - DNA, 1706 bp, Artificial Sequence
  derived and/or modified sequence
atggagaaaaagaaaatggtaactcagggtaaccaggagccgacaacaactcctgacgcaatggttcagccttttactaccatcccatttccaccacctccgcagaatggaattcccacagagtatggggtgccacacactcaagactatgccggccagaccggtgagcataacctgacactctacggaagtacgcaagcccacggggagcagagcagcaactcacccagcacacaaaatggatctcttacgacagaaggtggagcacagacagacggccagcagtcacagacacaaagtagtgaaaattcagagagtaaatctaccccgaaacggctgcatgtctctaatattcctttccgcttccgggaccctgacctccggcagatgtttgggcagtttggcaaaatcctagatgtagaaataatctttaatgaacgtggctctaagggattcgggttcgtaactttcgagaatagtgctgatgcagacagggccagggagaaattacacggcaccgtggtagagggccgtaaaatcgaggtgaataatgctacagcacgtgtaatgaccaataagaagatggtcacaccatatgcaaatggttggaaattaagcccagtagttggagctgtatatggtccggagttatatgcagcatccagctttcaagcagatgtgtccctaggcaatgatgcagcagtgcccctatcaggaagagggggtatcaacacttacattcctttaatcagtctccctttagttcctggcttcccttaccctactgcagccaccacggcagccgctttcagaggagcccatttgaggggcagagggcggacagtatatggtgcagtccgagcggtacctccaacagccatccccgcctatccaggggtggatatgcagcctacagatatgcacagcctgctactgcaaccgcagccaccgctgctgcagccgctgcagccgcttacagtgacggttatggcagggtgtacacagccgacccctaccatgcccttgcccctgccgctagctatggagttggcgctgtggcgagtttataccgaggtggctacagccgatttgccccctactgaagtgacgtgagacccctgcaaatgggacagccccccagttcatgaggcctggctattgcaatatttactagtagaggaactctatagcaagatgaagaggaaaaacaaacaaacaaacaaaaaaaaacacaaaaaaagaaagaatacttttttatacctcactatgttctttgaatatgtatttttcctttaaatttctgcctttaattcttttgttccaaagattgtgcatttttttctttttttttttaaactgtggtaaaaaaaaaaaaaataatgcatttccatgtctgtatgtccgtgcttagcttattctatcaatcacggaagaggcagtcaaggaggaaggagagacattaggagccgataaatgcatctgatcagaaatcagcagacagaattaccaaagtgtatctggtgctgaatgactgggggacaagcagaagtggaagagatctttctgcaacaggatattcttctagtcttctgagtttctggtctttgacaggcaattctggttggctgtggctggaatccacatgctgatagataggaatttgtgcttacaaagcaggagaattaaaaagacgctttcctctcctc

SEQ ID NO: 37360 - DNA, 387 bp, Artificial Sequence
  derived and/or modified sequence
atggtgcagcccttcaccaccatccccttccccccccccccccagaacggcatccccaccgagtacggcgtgccccacacccaggactacgccggccagaccggcgagcacaacctgaccctgtacggcagcacccaggcccacggcgagcagagcagcaacagccccagcacccagaacggcagcctgaccaccgagggcggcgcccagaccgacggccagcagagccagacccagagcagcgagaacagcgagagcaagagcacccccaagagactgcacgtgagcaacatccccttcagattcagagaccccgacctgagacagatgttcggcttcggcaagatcctggacgtggagatcatcttcaacgagagaggcagctag

SEQ ID NO: 37361 - DNA, 1113 bp, Artificial Sequence
  derived and/or modified sequence
atggagaagaagaagatggtgacccagggcaaccaggagcccaccaccacccccgacgccatggtgcagcccttcaccaccatccccttccccccccccccccagaacggcatccccaccgagtacggcgtgccccacacccaggactacgccggccagaccggcgagcacaacctgaccctgtacggcagcacccaggcccacggcgagcagagcagcaacagccccagcacccagaacggcagcctgaccaccgagggcggcgcccagaccgacggccagcagagccagacccagagcagcgagaacagcgagagcaagagcacccccaagagactgcacgtgagcaacatccccttcagattcagagaccccgacctgagacagatgttcggccagttcggcaagatcctggacgtggagatcatcttcaacgagagaggcagcaagggcttcggcttcgtgaccttcgagaacagcgccgacgccgacagagccagagagaagctgcacggcaccgtggtggagggcagaaagatcgaggtgaacaacgccaccgccagagtgatgaccaacaagaagatggtgaccccctacgccaacggctggaagctgagccccgtggtgggcgccgtgtacggccccgagctgtacgccgccagcagcttccaggccgacgtgagcctgggcaacgacgccgccgtgcccctgagcggcagaggcggcatcaacacctacatccccctgatcagcctgcccctggtgcccggcttcccctaccccaccgccgccaccaccgccgccgccttcagaggcgcccacctgagaggcagaggcagaaccgtgtacggcgccgtgagagccgtgccccccaccgccatccccgcctaccccggcgtggacatgcagcccaccgacatgcacagcctgctgctgcagccccagccccccctgctgcagcccctgcagcccctgaccgtgaccgtgatggccggctgcacccagcccacccccaccatgcccctgcccctgcccctggccatggagctggccctgtggagagtgtacaccgaggtggccaccgccgacctgccccccaccgaggtgacctag

SEQ ID NO: 37362 - DNA, 387 bp, Artificial Sequence
  derived and/or modified sequence
atggttcagccctttactacgattcctttccccccccccccgcaaaacggaatcccaaccgaatatggtgtgcctcatacacaggactacgccggacagacgggcgagcataatctgacattatacggttctacccaggcacacggcgagcagagttctaactcacccagcacgcagaacgggtcactgacaactgagggcggggcacagacagatggacaacagtcacagacccagtcatcggagaactctgaaagcaaatccacccctaaaagactccatgtctctaacatcccattccgattccgagaccccgacctgcgccagatgtttggattcgggaagatccttgatgtcgagataattttcaatgagcgcggcagttag

SEQ ID NO: 37363 - DNA, 1113 bp, Artificial Sequence
  derived and/or modified sequence
atggagaagaagaaaatggtgactcagggtaaccaggagcccactaccacacctgacgccatggttcagcccttcacgactattcccttccctcctccccctcaaaacggtattcccactgaatacggggtgccacacacccaggactacgccggccagacaggcgagcacaacctgaccctttacggcagcacccaggcgcacggcgaacagtcctccaacagtccatccacgcagaacgggagtctcaccaccgaggggggcgctcagaccgatgggcagcagagtcagacgcaatcttccgagaactcagaatctaagtccactcccaaaagactgcatgtctcaaatatcccttttcgctttcgggatcctgatctgagacagatgtttggacagtttgggaagatcctggatgtcgaaattatctttaacgagagagggagcaaaggattcggttttgttactttcgagaattccgctgacgcagacagggctagagagaagcttcatgggaccgtggtggagggtcgaaagatagaagtaaacaatgcgacagccagagtcatgaccaacaaaaagatggtgaccccctatgccaacgggtggaagctgtccccagtggtgggcgcagtgtacggacccgaactctacgccgccagttcttttcaggcagacgtgagtttaggcaacgatgcagcggtacctttgtccggacgagggggaattaacacatatatccccctgatttcgcttcctcttgtgccggggttcccttaccctaccgccgccaccacagctgccgcgttccgaggagcacatctgcggggtcggggccgcactgtgtacggggccgtgcgggccgtgccacccaccgcaatcccagcttatccaggggtggacatgcagcccacagacatgcactccctccttctccagcctcaacctccgctccttcagccactgcagcctcttactgtcactgtgatggcaggctgcacccagccaacccctaccatgcctcttcccctgccgctggcgatggagctggctttgtggagggtgtatacagaagtcgctaccgcggatctgccgcccacagaagtcacctag

SEQ ID NO: 37364 - DNA, 387 bp, Artificial Sequence
  derived and/or modified sequence
atggtgcagcccttcaccaccatccccttccccccaccaccccagaatggcatccccacagaatatggagtgccccacacccaggactatgccggccagacaggagagcacaacctgaccctgtatggcagcacccaggcccacggggagcagagcagcaacagccccagcacccagaatggcagcctgaccacagaaggaggagcccagacagatggccagcagagccagacccagagcagcgagaacagcgagagcaagagcacccccaagaggctgcacgtgagcaacatccccttccgcttccgggaccctgacctgcggcagatgtttggatttgggaagatcctggatgtggagatcatcttcaatgaaagaggcagctag

SEQ ID NO: 37365 - DNA, 1113 bp, Artificial Sequence
  derived and/or modified sequence
atggagaagaagaagatggtgacccagggcaaccaggagcccaccaccaccccagatgccatggtgcagcccttcaccaccatccccttccccccaccaccccagaatggcatccccacagaatatggagtgccccacacccaggactatgccggccagacaggagagcacaacctgaccctgtatggcagcacccaggcccacggggagcagagcagcaacagccccagcacccagaatggcagcctgaccacagaaggaggagcccagacagatggccagcagagccagacccagagcagcgagaacagcgagagcaagagcacccccaagaggctgcacgtgagcaacatccccttccgcttccgggaccctgacctgcggcagatgtttggccagtttgggaagatcctggatgtggagatcatcttcaatgaaagaggcagcaagggcttcggctttgtgacctttgagaacagcgcagatgctgaccgggcccgggagaagctgcatggaacagtggtggagggcaggaagattgaggtgaacaatgccacagcccgggtgatgaccaacaagaagatggtgaccccctatgccaacggctggaagctgagccctgtggtgggcgctgtgtatggccctgagctgtatgctgccagcagcttccaggctgatgtgtccctgggcaatgatgctgctgtgcccctgagcggccggggcggcatcaacacctacatccccctcatcagcctgcccctggtgcccggcttcccctaccccacagctgccaccacagctgctgccttccggggggcccacctgcggggccggggccgcacagtgtatggagctgtgcgggctgtgcccccaacagccatcccagcctacccaggagtggacatgcagcccacagacatgcacagcctgctgctgcagccccagccccccctgctgcagcccctgcagcccctgactgtgacagtgatggccggctgcacccagcccacccccaccatgcccctgcccctgcccctggccatggagctggccctgtggagggtgtacacagaggtggccacagctgacctgcccccaacagaggtgacctag

SEQ ID NO: 37366 - DNA, 387 bp, Artificial Sequence
  derived and/or modified sequence
atggtgcagcccttcaccaccatccccttccccccccccccccagaatggaatccctacagaatacggtgtccctcatacccaggactacgcaggccaaaccggtgagcataacctcacgctgtatggcagcacacaagctcatggggaacagagctctaactctccaagcacccagaatggatctctaacaactgaggggggggctcaaactgacggacagcagagtcaaacccagagtagcgagaactcagaatctaagtccacccctaaaaggttgcatgtatccaacatcccatttagattcagggaccccgaccttagacaaatgtttggatttggcaagattctggatgtggagattatctttaatgaaagaggtagctag

SEQ ID NO: 37367 - DNA, 1113 bp, Artificial Sequence
  derived and/or modified sequence
atggagaagaagaagatggtgacccagggcaaccaggagcccaccacaacacctgacgctatggtccaacccttcacaacgattccatttcctcccccaccacaaaatggcattccgaccgaatatggggtcccacacacgcaagattacgccggccaaacaggagagcataacctgaccctctatggtagtacccaagctcacggagaacagagtagcaattccccctctacccagaacgggtccttaactactgaaggaggtgctcagaccgatggtcagcaatctcagacacaaagctctgagaattcagagagcaaatccactcctaagagactccacgtttccaatatccccttcaggtttcgcgaccctgacttgcgccagatgtttggtcaatttggcaaaatactggacgtggaaataatttttaacgaacgtggctccaagggcttcggcttcgtcacctttgagaattctgctgatgccgatagggcaagggagaagctccatgggaccgtggtggaggggagaaagattgaggtaaacaacgcaacggctagagttatgacaaataaaaagatggtcactccttatgctaatggctggaaactgagtccggtagtgggcgccgtgtacggtccagagctttatgctgcttcctcatttcaggcagatgtcagtttaggaaacgacgccgctgtgcccctctctggacgcggcgggatcaatacttatatccccctaatctccctgccgctggtgcctggcttcccttaccctaccgccgccacgacagccgccgccttcaggggggctcatctcaggggccgaggccgaacggtatatggtgccgttcgggcagtcccgcccaccgccatcccagcctatccgggcgtggacatgcagcctaccgatatgcatagcctactgttgcagcctcagcctcctctgttgcagcccctacagcctttgacggtcactgtgatggccggttgcacacaacctacccctaccatgcctctgccactcccgttggcaatggagctggccctttggcgggtgtataccgaggtcgccacagcagatctccctccaacagaggtgacctag

SEQ ID NO: 37368 - DNA, 387 bp, Artificial Sequence
  derived and/or modified sequence
atggtgcagccattcaccactattccgttccccccaccgcctcagaacggaattccaacagagtatggagtgcctcacacccaggattatgcgggtcagacaggagaacacaatctgacgctgtacggctcgacccaggcacatggcgaacagagctcaaactctcccagtacccagaatggctcactcactacagaggggggtgcccagacagatggacagcaatcccagactcagagtagcgaaaatagcgagtctaaatcaacgccgaaacggctccacgtgagcaacataccctttaggttccgagatccagatctgaggcaaatgttcggctttggaaaaatcctggacgtggaaattatctttaacgagcgaggatcttag

SEQ ID NO: 37369 - DNA, 1113 bp, Artificial Sequence
  derived and/or modified sequence
atggagaagaagaaaatggtgacgcaaggcaatcaagaacctaccaccacccccgacgctatggtgcagccattcaccaccatccctttcccccctccccctcaaaatgggataccaaccgaatatggcgtgcctcacacccaggattacgccggacaaaccggagagcacaacctgactttgtatgggtccacacaagcccacggggaacagagctcaaattcccccagcacacagaatggatcccttactacagaaggtggagcacagaccgatgggcagcagtcacaaacgcaatccagtgaaaattctgaaagcaagagtactcccaaacggcttcacgtatctaacattccatttcggttcagggatcccgacctgcgccagatgttcgggcaattcgggaagatcctagatgttgaaattattttcaacgaacgagggtccaaagggtttggctttgtgacattcgagaacagtgccgatgccgatcgtgcacgcgagaagctgcacggtactgtcgtggaggggcgtaagatagaagtcaataacgccactgccagagtgatgactaacaagaagatggtcacgccatatgcgaatggatggaaactgagtccagtagtgggcgcagtgtatggacccgaattatatgcggcatctagtttccaggccgacgtttccttaggtaatgacgcagctgtgccgctatctggacggggtggtattaatacttacataccactgatcagccttcccttggtgccgggtttcccatacccaaccgcagctaccacagcagccgcattccgcggagctcacctccggggaagagggaggacagtgtatggagcagtgcgcgctgttcctcccaccgcaataccggcatacccgggagtggatatgcaacccactgacatgcattccttgctgctgcagcctcagccgcctcttttacagccgctgcagcccctgaccgtgactgtgatggccggatgtacccagcccacacctaccatgcccttacccctgccgctcgccatggaattggccctgtggcgagtctacactgaggttgccaccgccgatctcccacccacagaagtgacctag

SEQ ID NO: 37370 - protein, 451 aa, Artificial Sequence
  derived and/or modified sequence
MAEGAQPHQPPQLGPGAAARGMKRESELELPVPGAGGDGADPGLSKRPRTEEAAADGGGGMQNEPLTPGYHGFPARDSQGNQEPTTTPDAMVQPFTTIPFPPPPQNGIPTEYGVPHTQDYAGQTGEHNLTLYGSTQAHGEQSSNSPSTQNGSLTQTEGGAQTDGQQSQTQSSENSESKSTPKRLHVSNIPFRFRDPDLRQMFGQFGKILDVEIIFNERGSKGFGFVTFENSADADRAREKLHGTVVEGRKIEVNNATARVMTNKKMVTPYANGWKLSPVVGAVYGPELYAASSFQADVSLGNDAAVPLSGRGGINTYIPLISLPLVPGFPYPTAATTAAAFRGAHLRGRGRTVYGAVRAVPPTAIPAYPGVVYQDGFYGADLYGGYAAYRYAQPATATAATAAAAAAAAYSDGYGRVYTADPYHALAPAASYGVGAVASLYRGGYSRFAPY

SEQ ID NO: 37371 - DNA, 1356 bp, Artificial Sequence
  derived and/or modified sequence
atggcggagggcgcccagccgcatcagccgcctcagctcgggcccggcgccgccgcccggggcatgaagcgggagtcggagctggagctgccggtgcccggagcgggaggagacggagccgatcccggcctgagcaagcggccgcgcactgaggaggcggcggccgacggtggcggcgggatgcagaacgagcctctgactccaggttatcatggattcccagcgcgggacagccagggtaaccaggagccgacaacaactcctgacgcaatggttcagccttttactaccatcccatttccaccacctccgcagaatggaattcccacagagtatggggtgccacacactcaagactatgccggccagaccggtgagcataacctgacactctacggaagtacgcaagcccacggggagcagagcagcaactcacccagcacacaaaatggatctcttacgcagacagaaggtggagcacagacagacggccagcagtcacagacacaaagtagtgaaaattcagagagtaaatctaccccgaaacggctgcatgtctctaatattcctttccgcttccgggaccctgacctccggcagatgtttgggcagtttggcaaaatcctagatgtagaaataatctttaatgaacgtggctctaagggattcgggttcgtaactttcgagaatagtgctgatgcagacagggccagggagaaattacacggcaccgtggtagagggccgtaaaatcgaggtgaataatgctacagcacgtgtaatgaccaataagaagatggtcacaccatatgcaaatggttggaaattaagcccagtagttggagctgtatatggtccggagttatatgcagcatccagctttcaagcagatgtgtccctaggcaatgatgcagcagtgcccctatcaggaagagggggtatcaacacttacattcctttaatcagtctccctttagttcctggcttcccttaccctactgcagccaccacggcagccgctttcagaggagcccatttgaggggcagagggcggacagtatatggtgcagtccgagcggtacctccaacagccatccccgcctatccaggtgtggtttaccaggacggattttacggtgctgacctctatggtggatatgcagcctacagatatgcacagcctgctactgcaaccgcagccaccgctgctgcagccgctgcagccgcttacagtgacggttatggcagggtgtacacagccgacccctaccatgcccttgcccctgccgctagctatggagttggcgctgtggcgagtttataccgaggtggctacagccgatttgccccctactga

SEQ ID NO: 37372 - DNA, 1356 bp, Artificial Sequence
  derived and/or modified sequence
atggccgagggcgcccagccccaccagcccccccagctgggccccggcgccgccgccagaggcatgaagagagagagcgagctggagctgcccgtgcccggcgccggcggcgacggcgccgaccccggcctgagcaagagacccagaaccgaggaggccgccgccgacggcggcggcggcatgcagaacgagcccctgacccccggctaccacggcttccccgccagagacagccagggcaaccaggagcccaccaccacccccgacgccatggtgcagcccttcaccaccatccccttccccccccccccccagaacggcatccccaccgagtacggcgtgccccacacccaggactacgccggccagaccggcgagcacaacctgaccctgtacggcagcacccaggcccacggcgagcagagcagcaacagccccagcacccagaacggcagcctgacccagaccgagggcggcgcccagaccgacggccagcagagccagacccagagcagcgagaacagcgagagcaagagcacccccaagagactgcacgtgagcaacatccccttcagattcagagaccccgacctgagacagatgttcggccagttcggcaagatcctggacgtggagatcatcttcaacgagagaggcagcaagggcttcggcttcgtgaccttcgagaacagcgccgacgccgacagagccagagagaagctgcacggcaccgtggtggagggcagaaagatcgaggtgaacaacgccaccgccagagtgatgaccaacaagaagatggtgaccccctacgccaacggctggaagctgagccccgtggtgggcgccgtgtacggccccgagctgtacgccgccagcagcttccaggccgacgtgagcctgggcaacgacgccgccgtgcccctgagcggcagaggcggcatcaacacctacatccccctgatcagcctgcccctggtgcccggcttcccctaccccaccgccgccaccaccgccgccgccttcagaggcgcccacctgagaggcagaggcagaaccgtgtacggcgccgtgagagccgtgccccccaccgccatccccgcctaccccggcgtggtgtaccaggacggcttctacggcgccgacctgtacggcggctacgccgcctacagatacgcccagcccgccaccgccaccgccgccaccgccgccgccgccgccgccgccgcctacagcgacggctacggcagagtgtacaccgccgacccctaccacgccctggcccccgccgccagctacggcgtgggcgccgtggccagcctgtacagaggcggctacagcagattcgccccctactag

SEQ ID NO: 37373 - DNA, 1356 bp, Artificial Sequence
  derived and/or modified sequence
atggctgagggcgcccagccccaccagccaccccagcttgggcctggggccgcggccaggggaatgaaaagggagtctgaactcgaactccctgtgcccggtgctggaggtgacggcgctgatccgggactgagtaagcggcccagaactgaagaggccgctgccgacggcggaggtgggatgcagaacgaacccctcacacccggttatcacgggtttcccgcccgggatagccaagggaaccaggagccgaccactacccccgacgcaatggtgcaaccctttacgaccatcccattccctccgccacctcagaatgggattcccaccgagtacggagtccctcacacgcaggactacgcggggcagaccggagaacacaacctgaccctgtacgggtctactcaggcgcacggagagcagtcttccaactcacccagtactcagaatggttcgcttacacagactgaggggggtgcccagacggacggtcagcaatcacagacccagtcaagcgaaaattccgagagtaagtcaacccctaagaggctgcatgtgtcgaacatcccttttcgattccgggatccagatctccggcagatgtttggacagtttggtaagattctcgacgtggagatcattttcaacgagagaggctcaaagggattcggatttgtaacttttgagaacagcgccgatgccgacagggcacgcgagaagttgcacgggactgtggtggaaggccgaaagattgaggtgaataatgctacagcccgcgtgatgaccaataagaagatggtgacgccgtatgccaacggatggaagctctcaccagtagtcggcgccgtctacggccccgagctttatgccgccagcagttttcaggcagatgtgtccctaggaaacgatgcagcggttccattgagcggccgtggaggaattaatacctatattcccctgatttctctgccactcgtgcccggttttccgtaccccacagccgccacaacagccgcggcatttcggggtgctcacctgagggggaggggccgcacagtttacggtgccgttcgtgccgtgcccccaaccgcaatccccgcctatccgggagtcgtgtatcaggacgggttttatggcgctgacctttacggtggctatgccgcttacagatatgcccagcccgccacagcgacggcagcaacggccgccgctgccgccgctgcagcctactcagacggatatggacgggtctataccgccgatccttatcatgccctggcacctgctgcatcttatggagtaggcgctgtagcttctctctatcgtggaggatactctaggttcgcgccatactag

SEQ ID NO: 37374 - DNA, 1356 bp, Artificial Sequence
  derived and/or modified sequence
atggccgagggcgcccagccccaccagcccccccagctgggccctggagctgctgcccggggcatgaagcgggagagcgagctggagctgcctgtgcctggagctggaggagatggagctgaccccggcctgagcaagaggcccaggacagaggaggccgctgctgatggcggcggcggcatgcagaatgagcccctgaccccaggctaccacggcttccctgcccgggacagccagggcaaccaggagcccaccaccaccccagatgccatggtgcagcccttcaccaccatccccttccccccaccaccccagaatggcatccccacagaatatggagtgccccacacccaggactatgccggccagacaggagagcacaacctgaccctgtatggcagcacccaggcccacggggagcagagcagcaacagccccagcacccagaatggcagcctgacccagacagagggcggggcccagacagatggccagcagagccagacccagagcagtgaaaattctgagagcaagagcacccccaagaggctgcacgtgagcaacatccccttccgcttccgggaccctgacctgcggcagatgtttggccagtttgggaagatcctggatgtggagatcatcttcaatgaaagaggcagcaaaggatttggatttgtgacctttgaaaattctgcagatgctgaccgggcccgggagaagctgcacggcaccgtggtggagggcaggaagattgaggtgaacaatgccacagcccgggtgatgaccaacaagaagatggtgaccccctatgccaacggctggaagctgagccctgtggtgggcgctgtgtatggccctgagctgtatgctgccagcagcttccaggctgatgtgtccctgggcaatgatgctgctgtgcccctgagcggccggggcggcatcaacacctacatccccctcatcagcctgcccctggtgcccggcttcccctaccccacagctgccaccacagctgctgccttccggggggcccacctgcggggccggggccgcacagtgtatggagctgtgcgggctgtgcccccaacagccatcccagcctacccaggagtggtgtaccaggacggcttctacggggctgacctgtatggaggctatgctgcctaccgctatgcccagcctgccacagccacagctgccacagctgctgctgctgctgctgctgcctacagtgatggctacggccgggtgtacacagctgacccctaccacgccctggccccagctgccagctatggagtgggcgctgtggccagcctgtacagaggaggctacagcagatttgccccctactag

SEQ ID NO: 37375 - DNA, 1356 bp, Artificial Sequence
  derived and/or modified sequence
atggccgagggcgcccagccccaccagcccccccagctgggccccggggcagcagctcgaggcatgaagagagagagcgagctagagctgccagtgccaggcgccggcggagacggcgcagatccagggcttagtaagcgcccccgtacagaagaggctgccgctgacggagggggaggaatgcagaacgaacccctgacaccaggctaccacgggttcccagcccgggactcccaggggaaccaggagccaaccaccacgcccgatgcaatggtacaaccttttaccacaatccctttccccccacccccccaaaatggcattcccaccgaatacggggtacctcacacacaggattacgcaggccagaccggcgaacacaatctgacattgtatggcagtacacaagcgcacggagaacaatcgtctaacagcccttccacccaaaacggctcactcactcagaccgagggcggggcccaaactgatggccagcaatctcaaacgcagtcaagcgaaaattctgagtctaagagtacacctaagcgactacatgtgtccaacattccttttaggttccgagatccagacctgcgccagatgtttgggcagttcggtaaaattctagacgttgagataattttcaacgaaagaggttctaaagggttcggattcgtgactttcgaaaacagtgctgacgctgatcgggccagagagaagctgcacggcaccgtagtggaggggaggaagatcgaagtgaataacgctaccgcaagagtgatgactaacaagaaaatggttaccccatacgcgaacgggtggaaactgagtccagtggtcggtgccgtctatgggcccgagctctacgccgcaagctcctttcaggcagacgtgagcctggggaatgacgccgccgtacctctttcagggcgtggcggaataaatacatatatccccctcatcagcctccccttagtgcctggttttccataccctactgccgcgactaccgctgccgcatttagaggcgcccatctgagaggaagagggcggaccgtgtatggcgccgtgagggccgtcccccccacggcaatccccgcataccctggggtcgtatatcaagatggcttttatggtgcagacctttatggcggctacgccgcctatcgctatgctcaacctgcgaccgccacagcagctaccgcagcagccgcagctgccgcagcttactccgacggctacgggcgtgtgtacaccgccgacccctaccatgcactcgcaccggctgcctcctatggcgtgggagccgtcgctagcctctataggggtggctacagtagattcgctccatactag

SEQ ID NO: 37376 - DNA, 1356 bp, Artificial Sequence
  derived and/or modified sequence
atggccgagggcgctcagcctcaccagccgcctcagctcgggcctggagcagccgcacgagggatgaaacgcgagtctgagctggagttaccagtgccaggggcaggcggagacggcgctgatcccggactgtcaaaaagacccaggacggaggaggccgctgctgatggtggaggtggaatgcaaaacgagccacttaccccaggataccacgggtttcccgcaagggatagtcaagggaaccaagagccaacaaccaccccagacgccatggtccagcctttcaccactattccctttccccctccccctcagaacggcattccgactgagtacggcgtgccccacacacaggattacgccggacaaacaggagagcacaatctcacactgtacggctccacgcaggctcatggcgagcaatccagcaatagtccctcgacacagaatgggtctctgacgcagaccgaggggggagctcagacagacgggcagcaatcgcagacccagtctagtgagaatagtgagagtaagtctaccccaaagcggctacacgtctccaatatcccctttcggttccgcgacccggatctgagacagatgttcggtcagttcgggaagatattggatgttgagatcatatttaatgaaaggggctccaagggcttcggattcgtcacgttcgagaactctgctgatgcggacagagcacgcgagaagctgcacggaaccgtggtggaaggacggaaaattgaggtaaacaacgcaactgccagagttatgacaaataaaaaaatggttacaccatatgccaacggctggaaactgtcgcccgtcgtgggggctgtgtacgggccagaactctatgctgcttcctcgttccaggccgatgtgtctcttgggaatgacgccgcagtacctctgtcaggccgaggtggcattaatacctacatacccttgatttcccttcccttggttcccggtttcccctatcctactgctgccactactgcagcggcttttcgtggagcccacctacggggtcggggacggactgtgtacggcgctgtgagagctgttccccctacagccattcccgcataccctggcgtggtctatcaggacgggttctacggagcagacttatatgggggatatgccgcttataggtacgctcagcctgcaactgcgactgccgcaactgcggctgcggcagcagccgctgcatattccgacggttacgggagagtgtacaccgcagacccctatcacgcccttgcgccagccgctagctacggcgtgggagccgtcgcctccctctatagaggcggttacagtaggttcgccccttattag

SEQ ID NO: 37377 - protein, 237 aa, Artificial Sequence
  derived and/or modified sequence
MPLLLLLPLLWADLTHRPKILIPGTLEPGHSKNLTCSVSWACEQGTPPIFSWLSAAPTSLGPRTTHSSVLIITPRPQDHGTNLTCQVKFAGAGVTTERTIQLNVTYVPQNPTTGIFPGDGSGKQETRAGVVHGAIGGAGVTALLALCLCLIFFIVKTHRRKAARTAVGRNDTHPTTGSASPKHQKKSKLHGPTETSSCSGAAPTVEMDEELHYASLNFHGMNPSKDTSTEYSEVRTQ

SEQ ID NO: 37378 - DNA, 714 bp, Artificial Sequence
  derived and/or modified sequence
atgccactgctgctgcttctacctctgctctgggcagatctcacccatcggcctaaaatactgatccccggtaccctggaacccggacactccaaaaacctgacctgctctgtcagctgggcctgcgaacaggggacccctccaatcttttcatggctaagcgcagcacccacaagtctgggtccaaggacgactcattcttccgtcttaattattaccccccgcccccaggaccatggtactaatctcacttgtcaggtcaagttcgcgggagccggagtgaccaccgagagaactatccagttaaatgtgacatacgtgcctcagaaccccacaacaggcatctttcctggtgatggcagtgggaagcaggaaacgcgcgccggtgttgtccatggggccataggtggcgccggcgtcacagcactgctcgcgctatgtctttgtttaatcttcttcatcgtgaagactcatagacggaaggctgcccgtacagccgtagggcggaatgatacccaccccaccactggaagcgccagccccaagcaccaaaagaagtccaagctgcacggacctaccgagacttcctcctgctccggtgcggctcctactgttgaaatggatgaggagcttcattacgcaagtctaaactttcatggaatgaacccaagcaaggatacctcaacagagtatagcgaagttaggacacaatag

SEQ ID NO: 37379 - DNA, 639 bp, Artificial Sequence
  derived and/or modified sequence
atgcctttgctactgcttcttcccctgctctgggccgacttaactcaccggcccaagattctgatacccgggaccctcgagccaggacattccaagaacctcacatgttccgtctcttgggcttgcgaacagggcacaccgccaatctttagttggttgtctgccgcacctacaagtctgggcccccgcactacacacagctcagtgctgatcattacacctcgaccccaggaccacgggactaatctgacatgccaggtgaagttcgccggcgcgggcgttacaactgaaagaactatccagttgaacgtgacctacgtccctcagaacccgacgaccggaatctttccgggtgacgggagcggtaaacaggagacaagagccggtgtcgtccacggagctataggcggcgcgggcgtgactgctcttctggccttatgtttgtgtttgatattcttcatcgtgaagactcatagaaggaaagcagcgcgaactgctgtcggacggaacgacacccacccaaccactggatctgccagccccgtgagtgatggcgcaagctggcaccccgtatgtcctgcagacactagttcccagtgcgggcccccaagttgcccaattcaacacttccagaactag

SEQ ID NO: 37380 - DNA, 714 bp, Artificial Sequence
  derived and/or modified sequence
atgcccctgctgctgctgctgcccctgctgtgggccgacctgacccaccggcccaagatcctgatccctggcaccctggagcccggccacagcaagaacctgacctgcagcgtgtcctgggcctgtgagcagggcaccccacccatcttctcctggctgtctgctgcccccaccagcctgggccccaggaccacccacagctctgtgctgatcatcaccccccggccccaggaccacggcaccaacctgacctgccaggtgaagtttgctggggccggcgtgaccacagagaggaccatccagctgaatgtgacctacgtgccccagaaccccaccaccggcatcttccctggagatggcagcggcaagcaggagacccgggccggcgtggtgcacggggccatcggcggggccggcgtgacagccctgctggccctgtgcctgtgcctgatcttcttcatcgtgaagacccacaggaggaaggccgccaggacagctgtgggcagaaatgacacccaccccaccaccggcagcgccagccccaagcaccagaagaagagcaagctgcacggccccacagagaccagcagctgcagcggggccgcccccaccgtggagatggatgaggagctgcactacgccagcctgaacttccacggcatgaaccccagcaaggacaccagcacagagtacagcgaggtgaggacccagtag

SEQ ID NO: 37381 - DNA, 639 bp, Artificial Sequence
  derived and/or modified sequence
atgcccctgctgctgctgctgcccctgctgtgggccgacctgacccaccggcccaagatcctgatccctggcaccctggagcccggccacagcaagaacctgacctgcagcgtgtcctgggcctgtgagcagggcaccccacccatcttctcctggctgtctgctgcccccaccagcctgggccccaggaccacccacagctctgtgctgatcatcaccccccggccccaggaccacggcaccaacctgacctgccaggtgaagtttgctggggccggcgtgaccacagagaggaccatccagctgaatgtgacctacgtgccccagaaccccaccaccggcatcttccctggagatggcagcggcaagcaggagacccgggccggcgtggtgcacggggccatcggcggggccggcgtgacagccctgctggccctgtgcctgtgcctgatcttcttcatcgtgaagacccacaggaggaaggccgccaggacagctgtgggcagaaatgacacccaccccaccaccggcagcgccagccctgtgtctgatggagcctcctggcaccctgtgtgcccagctgacaccagcagccagtgtggcccccccagctgccccatccagcacttccagaactag

SEQ ID NO: 37382 - DNA, 714 bp, Artificial Sequence
  derived and/or modified sequence
atgcccctgctgctgctgctgcccctgctgtgggccgacctgacccataggccgaagatcttgatccccggtaccctggaacccggccactctaagaacctcacatgcagtgtgtcctgggcatgtgagcaaggcacccctcccatattttcatggctgtctgccgcgcctacctccctgggcccacgcacaacacactcaagtgtcctcatcatcacgcctcggccacaagaccatgggaccaacctgacctgtcaggtgaaattcgcgggcgcgggcgtaacaacggaaaggacgattcagctcaatgtaacctacgtgccacaaaatcccaccacgggaatcttcccaggcgacgggtctggcaaacaggagaccagagctggcgtcgtgcacggagccatcggaggagcgggggtcaccgcactcctcgccttgtgtctctgcctgatattcttcatcgtgaaaacccaccgccgtaaagccgcaaggactgccgtgggtaggaatgatacccaccccaccactggctcagcctccccaaaacatcaaaagaaatctaagttgcacggacctactgaaacctcctcctgtagcggcgctgctcccacggtggagatggacgaggagctccactatgcatcactgaattttcatggaatgaatccgtccaaggatactagcaccgagtatagcgaggtccgaacccagtag

SEQ ID NO: 37383 - DNA, 639 bp, Artificial Sequence
  derived and/or modified sequence
atgcccctgctgctgctgctgcccctgctgtgggccgacctgacccatcggccaaaaatcctgatccccggaactctggagcccggccattcaaagaatctgacatgctctgtttcttgggcgtgtgagcaggggaccccaccaatcttcagctggttgtctgctgcacctacctcgctggggccccgtacaacccactcatcagtcttgataattacacctcgccctcaggaccacggcaccaacctgacctgtcaggttaagttcgccggcgccggtgtcacaactgagagaaccattcagttaaatgtcacttacgtgccccagaacccgacaacaggcatcttccctggtgacggctcaggcaagcaggagaccagggcaggcgtggttcacggggccattggcggtgcgggtgtaactgccctgctcgccctgtgcctctgcctgatcttcttcatcgttaagactcacaggcgaaaggccgcccgaactgccgtgggaagaaacgacactcatcctacgactgggtctgcatctcctgtctcagatggtgcaagctggcacccagtgtgccccgctgatacgagctcgcagtgcggcccgcctagttgcccaatccagcattttcaaaactag

SEQ ID NO: 37384 - DNA, 714 bp, Artificial Sequence
  derived and/or modified sequence
atgcctctcttgctgctgctccccctgctctgggctgatttaactcatcgcccaaaaatcctgatccccggtaccctggaacctgggcactcaaaaaatctgacctgttcagtgagctgggcttgcgaacaggggacgcctcctatcttttcctggctctcggccgcacccacctctctgggccctcgtaccacccactcctcagtgttgatcattaccccaaggccacaggatcatggaacaaacctgacttgccaggtgaagtttgccggagccggtgtaacaaccgagaggaccatacaactgaatgtaacctatgtccctcagaatcccaccacaggtatctttccgggtgacgggagcggcaagcaggaaaccagagctggggttgtgcatggagccattggcggagccggagtgacagcactgctggccttgtgcctgtgcctgattttcttcattgtcaagacccaccgcaggaaggcagctcggaccgccgtcggtcggaatgatactcaccccaccaccggtagcgccagtcctaagcaccagaagaaatcaaaactccacgggccaacagaaacgagtagttgcagtggcgctgctcctacagtggagatggatgaagagcttcattacgcaagtcttaatttccacggcatgaaccccagtaaggataccagtacagagtattctgaagtgaggacccagtag

SEQ ID NO: 37385 - DNA, 639 bp, Artificial Sequence
  derived and/or modified sequence
atgccactgttacttctgctccctctgctttgggcggatctgacccataggcccaagatcctgattccgggaacattggagcctggacacagcaagaatttgacttgttctgtttcctgggcttgcgagcagggtacccctcctatatttagctggttgagcgccgctcccaccagcctggggccaagaactacgcattcctcagtccttataattaccccaaggcctcaagaccatgggaccaatttgacctgtcaggtgaagttcgccggtgcaggggtgaccaccgagcgcaccatccaactcaatgttacttacgttccacaaaatcctaccacaggtatctttccgggtgacggttcaggaaaacaggagaccagggccggtgtcgttcacggagccattggcggagctggcgtcactgctctcctggccttatgcctgtgtctgatcttcttcatcgtgaaaacgcaccgtcgtaaagcagctcgcaccgccgtgggcaggaatgacacccacccaacaaccggaagtgcgtcaccagtgtcagacggggcttcgtggcatccagtttgcccagcagatacctcttctcagtgcggccctccttcctgccccatacagcatttccaaaattag

SEQ ID NO: 37386 - DNA, 1085 bp, Artificial Sequence
  derived and/or modified sequence
tctgctcacacaggaagccctggaagctgcttcctcagacatgccgctgctgctactgctgcccctgctgtgggcagacttgacccacaggcccaaaatcctcatccctggcactctagaacccggccactccaaaaacctgacctgctctgtgtcctgggcctgtgagcagggaacacccccgatcttctcctggttgtcagctgcccccacctccctgggccccaggactactcactcctcggtgctcataatcaccccacggccccaggaccacggcaccaacctgacctgtcaggtgaagttcgctggagctggtgtgactacggagagaaccatccagctcaacgtcacctatgttccacagaacccaacaactggtatctttccaggagatggctcagggaaacaagagaccagagcaggagtggttcatggggccattggaggagctggtgttacagccctgctcgctctttgtctctgcctcatcttcttcatagtgaagacccacaggaggaaagcagccaggacagcagtgggcaggaatgacacccaccctaccacagggtcagcctccccgaaacaccagaagaagtccaagttacatggccccactgaaacctcaagctgttcaggtgccgcccctactgtggagatggatgaggagctgcattatgcttccctcaactttcatgggatgaatccttccaaggacacctccaccgaatactcagaggtcaggacccagtgaggaacccacaagagcatcaggctcagctagaagatccacatcctctacaggtcggggaccaaaggctgattcttggagatttaacaccccacaggcaatgggtttatagacattatgtgagtttcctgctatattaacatcatcttagactttgcaagcagagagtcgtggaatcaaatctgtgctctttcatttgctaagtgtatgatgtcacacaagctccttaaccttccatgtctccattttcttctctgtgaagtaggtataagaagtcctatctcatagggatgctgtgagcattaaataaaggtacacatggaaaacaccagtc

SEQ ID NO: 37387 - DNA, 1494 bp, Artificial Sequence
  derived and/or modified sequence
actcccttcctcttttctgctcacacaggaagccctggaagctgcttcctcagacatgccgctgctgctactgctgcccctgctgtgggcagacttgacccacaggcccaaaatcctcatccctggcactctagaacccggccactccaaaaacctgacctgctctgtgtcctgggcctgtgagcagggaacacccccgatcttctcctggttgtcagctgcccccacctccctgggccccaggactactcactcctcggtgctcataatcaccccacggccccaggaccacggcaccaacctgacctgtcaggtgaagttcgctggagctggtgtgactacggagagaaccatccagctcaacgtcacctatgttccacagaacccaacaactggtatctttccaggagatggctcagggaaacaagagaccagagcaggagtggttcatggggccattggaggagctggtgttacagccctgctcgctctttgtctctgcctcatcttcttcatagtgaagacccacaggaggaaagcagccaggacagcagtgggcaggaatgacacccaccctaccacagggtcagcctccccggtgagtgatggggcatcctggcatccagtctgtcctgcagacacctcctcccaatgtggcccaccgtcatgccccattcagcatttccagaactgagcttattgtctttcctcctgtttaacagtgtaggttttaatatttttcaggtacgttgaggccaacagatcaggagatgatggccattgaaaagatagtttcttggccgggcacagtgtttcacacctgcaatcccagcacctttggaggccaaggcgggcggatcacgaggtcaggagattgagactatcctggctaacatggtgaaaccccgtctctactaaaaatacaaaaaattagccagatgtggtggctggcgcctgtagtcccagctacttgggaggctgaggcaggagaatggtatgaacccgggaggcagagcttgtagtgagccgacatagcaccactgcactccagcctgggtgacagagagagactctgtcccaaaaagaaaaaaaaaatagtttcttattcaccgttcccgagagggcacaccacaccatgcaaggccatatggagaagcaccagggtcagtcaggaagcagagggagcaaggagaaaatgggacaagagccttcactgtggctttcatggaaaagaatgggcaagacagggtaagcaagctaggcaggtttaggattggctacttagaacaatttcagcagactctggggtataggagttgtctctagttgtctggtacatggccctgggtttattaaggaggattgtggtctggagtgtaagagctcaataaaggatccagctggtagtgtgggctttagattgactggtttgcacatgaaaggtgcacttgtatgcaagtcctttattagctctagaaatctactatccttggg

SEQ ID NO: 37388 - DNA, 714 bp, Artificial Sequence
  derived and/or modified sequence
atgcccctgctgctgctgctgcccctgctgtgggccgacctgacccacagacccaagatcctgatccccggcaccctggagcccggccacagcaagaacctgacctgcagcgtgagctgggcctgcgagcagggcaccccccccatcttcagctggctgagcgccgcccccaccagcctgggccccagaaccacccacagcagcgtgctgatcatcacccccagaccccaggaccacggcaccaacctgacctgccaggtgaagttcgccggcgccggcgtgaccaccgagagaaccatccagctgaacgtgacctacgtgccccagaaccccaccaccggcatcttccccggcgacggcagcggcaagcaggagaccagagccggcgtggtgcacggcgccatcggcggcgccggcgtgaccgccctgctggccctgtgcctgtgcctgatcttcttcatcgtgaagacccacagaagaaaggccgccagaaccgccgtgggcagaaacgacacccaccccaccaccggcagcgccagccccaagcaccagaagaagagcaagctgcacggccccaccgagaccagcagctgcagcggcgccgcccccaccgtggagatggacgaggagctgcactacgccagcctgaacttccacggcatgaaccccagcaaggacaccagcaccgagtacagcgaggtgagaacccagtag

SEQ ID NO: 37389 - DNA, 639 bp, Artificial Sequence
  derived and/or modified sequence
atgcccctgctgctgctgctgcccctgctgtgggccgacctgacccacagacccaagatcctgatccccggcaccctggagcccggccacagcaagaacctgacctgcagcgtgagctgggcctgcgagcagggcaccccccccatcttcagctggctgagcgccgcccccaccagcctgggccccagaaccacccacagcagcgtgctgatcatcacccccagaccccaggaccacggcaccaacctgacctgccaggtgaagttcgccggcgccggcgtgaccaccgagagaaccatccagctgaacgtgacctacgtgccccagaaccccaccaccggcatcttccccggcgacggcagcggcaagcaggagaccagagccggcgtggtgcacggcgccatcggcggcgccggcgtgaccgccctgctggccctgtgcctgtgcctgatcttcttcatcgtgaagacccacagaagaaaggccgccagaaccgccgtgggcagaaacgacacccaccccaccaccggcagcgccagccccgtgagcgacggcgccagctggcaccccgtgtgccccgccgacaccagcagccagtgcggcccccccagctgccccatccagcacttccagaactag

SEQ ID NO: 37390 - protein, 506 aa, Artificial Sequence
  derived and/or modified sequence
MGCSAKARWAAGALGVAGLLCAVLGAVMIVMVPSLIKQQVLKNVRIDPSSLSFNMWKEIPIPFYLSVYFFDVMNPSEILKGEKPQVRERGPYVYREFRHKSNITFNNNDTVSFLEYRTFQFQPSKSHGSESDYIVMPNILVLGAAVMMENKPMTLKLIMTLAFTTLGERAFMNRTVGEIMWGYKDPLVNLINKYFPGMFPFKDKFGLFAELNNSDSGLFTVFTGVQNISRIHLVDKWNGLSKVDFWHSDQCNMINGTSGQMWPPFMTPESSLEFYSPEACRSMKLMYKESGVFEGIPTYRFVAPKTLFANGSIYPPNEGFCPCLESGIQNVSTCRFSAPLFLSHPHFLNADPVLAEAVTGLHPNQEAHSLFLDIHPVTGIPMNCSVKLQLSLYMKSVAGIGQTGKIEPVVLPLLWFAESGAMEGETLHTFYTQLVLMPKVMHYAQYVLLALGCVLLLVPVICQIRSQGPEDTVSQPGLAAGPDRPPSPYTPLLPDSPSGQPPSPTA

SEQ ID NO: 37391 - DNA, 1521 bp, Artificial Sequence
  derived and/or modified sequence
atggggtgctctgctaaggcacgctgggctgctggggccctgggggtggccggtctcctttgcgctgtgcttggcgccgtaatgatcgtgatggtaccttccctgatcaaacagcaggtcctgaaaaacgtgaggattgacccatcgtctctctcattcaacatgtggaaggagatacctattcccttctatctgagcgtctatttttttgacgtgatgaatccatcggaaattctgaaaggagagaagcctcaggtgcgggagcggggcccttatgtgtatagggaatttcgtcataaatctaatattaccttcaataataatgatacagtctcctttctggagtatagaaccttccagttccaaccatcaaagagccacggatccgagagtgactacattgtgatgccaaatatcctggtgctgggggccgcagtaatgatggagaataagcccatgactttaaaactgatcatgaccctggcatttacaacactgggcgagcgtgcgtttatgaacaggacagtgggggaaatcatgtggggttataaggaccctctggtaaatctgattaataaatattttcctggaatgttccccttcaaagataagttcggtctctttgccgagctgaataactctgatagcggcctgtttaccgtgtttactggagttcagaatatcagccgcattcatttggtcgacaagtggaacggcttatctaaagttgatttctggcactctgatcagtgcaatatgatcaacgggacctccggacagatgtggccgcctttcatgacacctgaatcgagcctggaattctactctcctgaggcttgtagaagcatgaagcttatgtataaggaatcaggtgtgtttgaagggatccccacgtatcggtttgtggctccaaaaaccctgttcgctaatggatccatctatccgccaaacgaaggattctgcccatgcttggaatctggaattcagaatgttagcacttgtcgttttagtgcccctctgtttctctcccatccccatttcctaaacgccgatcccgtgcttgcagaagcagtcaccgggcttcacccaaaccaggaagcccattctttgtttctggatattcacccagtaacaggaataccgatgaattgttccgtgaagcttcaactctccctttatatgaaaagcgtggccgggattggacagaccggtaaaattgagcctgttgtgctccctctgttgtggtttgccgaaagcggtgcgatggagggtgagactctgcacactttttacactcagctggtgctcatgccaaaggtgatgcattacgcgcagtatgtgctgctggctctcggctgcgtgctcttgctggtgccagtgatttgtcagatccggagccagggccccgaggatactgtcagccagccaggacttgccgccggcccggatagaccgccctctccgtatacccctctcctgcccgacagcccatccgggcagccaccttcacccacagcttag

SEQ ID NO: 37392 - DNA, 1659 bp, Artificial Sequence
  derived and/or modified sequence
atggggtgctctgcaaaggctcggtgggctgccggggctctgggggtcgcagggctcctgtgcgccgtgttgggagccgtcatgatcgtaatggtgccttcccttatcaaacagcaggttctcaaaaacgttcgcattgacccttctagtctgtcatttaacatgtggaaagagattccaatccccttttatctgagcgtttacttcttcgacgttatgaatccttctgaaattctgaagggcgaaaaaccccaagttcgcgaacgaggtccatacgtataccgagagtttcgtcataagtccaacatcactttcaacaacaatgatactgtatcgtttctggaatatcgaactttccagttccagccatctaaatctcacgggagtgagtctgactatatcgtgatgccaaacatcctggtgctcggtgccgccgttatgatggagaataagcctatgactctgaagctgatcatgacactcgccttcactacccttggagagcgagcgtttatgaaccgcacggtgggagaaatcatgtggggatataaggatcctttagttaatcttatcaataagtattttcccggcatgttccccttcaaagataagtttggactctttgctgagctgaacaattcagattctggactgttcacggttttcactggggtacagaatattagccgcattcacttggttgacaagtggaatggtctaagtaaggtcgatttctggcactcagatcagtgcaatatgattaacgggaccagtggccagatgtggccgcctttcatgacgccagagagctccctcgagttttattctcctgaagcttgtcgatccatgaaattaatgtacaaagaaagtggagtgttcgaaggaatcccaacatatcggttcgtcgccccaaagaccctgttcgcgaacggttctatatacccacccaatgaagggttttgtccttgtctggaatcgggcatccagaatgtttccacatgtcggttcagcgcacctctgtttctcagccacccgcacttcctaaatgccgacccggtactggcagaggcggtcacgggcctccatcccaaccaggaagcccatagtctgttcctcgatatccatcctgttaccgggattccaatgaattgtagtgtgaagcttcagctttcactatacatgaaaagtgtggccggtatcggccagacaggcaaaatcgagcctgtcgtactgcccctgctgtggtttgctgagtctggagcgatggaaggagaaaccctccataccttctatacccagctggtgctgatgcctaaggtgatgcactacgcacagtacgtgctacttgcactaggttgcgttttgctgctggttccggttatttgtcagattagatcgcaagtcggggctggccagagggcagctcgcgcagacagtcattcacttgcttgttggggaaagggggcgagtgatcgtaccctctggccaaccgctgcctggtcaccccctccggccgctgtcctcaggctttgcagatccggaagcggccactgttggggcctacggtcaaccttggcctccttcgcctgtcgcgtcgcaaccactttgcccgtgttggaggggttgggacctagtctgggaggcggtacaggcagctag

SEQ ID NO: 37393 - DNA, 1551 bp, Artificial Sequence
  derived and/or modified sequence
atgtgtgccgttggaaacgtgcgcattgacccttcctccttgtcttttaacatgtggaaagagattcccatccccttttacctgagtgtgtacttcttcgacgtcatgaatccttctgagatactaaagggggagaagcctcaggtaagggagaggggcccgtatgtgtatcgcgaattcaggcataagtcaaatataacttttaacaacaatgatacagtcagtttcctggagtatagaactttccagtttcagccaagcaaatcccacggcagtgagtcagattacatcgtcatgcctaacatcctggtgcttggtgcagcagtcatgatggaaaataaacccatgacactgaaactgattatgacactggcctttaccaccctgggggagcgcgcatttatgaacaggactgtgggcgaaataatgtgggggtacaaagatccccttgttaaccttatcaacaagtatttcccgggcatgtttccgttcaaagataagttcgggctctttgcagaactcaacaactccgatagcggtctgttcaccgtatttacgggtgttcagaatatctctcggattcacctggttgacaagtggaatggcctttcaaaagtggacttttggcacagtgaccaatgcaacatgattaatggaacgagcggccagatgtggcctccttttatgactcctgagagctccttggaattctattcccccgaggcatgtcgcagcatgaaactcatgtacaaagaatcgggtgtgttcgagggtatcccgacttatcgattcgtggctcctaaaaccctgttcgccaatggcagcatctaccccccaaacgaagggttctgtccctgcctagagagtggcatccaaaacgttagcacctgcaggttctccgcgcccctgttccttagccacccccacttcctgaacgcagacccggtgctcgctgaggccgtaaccggattacaccctaatcaggaagctcactctctttttctggatatccacccggttacggggataccaatgaactgttccgtgaagctgcagctctcattgtatatgaaatccgtggctgggattggacagaccggcaagattgagccagtggtactgccactcctgtggttcgccgaaagtggtgctatggaaggggagaccctccatactttctacactcagctggtcttgatgcctaaggtgatgcactacgcgcaatatgtcctgctcgcactcggatgcgttcttcttttggtaccagtcatctgccaaattaggagtcaggttggggctggccagagagctgcgcgcgctgactcccattcactggcttgttggggaaagggagccagtgaccgcacactgtggccaaccgcagcttggagccctcctccggcagcagtgcttaggctgtgcagatccggttcaggtcactgctggggcctgaggagcaccctcgcctcatttgcctgtcgtgtggctacgacccttccagtgttagaaggactcggtccttctttggggggtggtaccggaggtttatag

SEQ ID NO: 37394 - DNA, 1539 bp, Artificial Sequence
  derived and/or modified sequence
atgaacgttcgtattgatccgagcagcctgagttttaacatgtggaaggagataccaatcccattctacctatccgtctactttttcgacgttatgaatccctccgagatactcaaaggggagaagccgcaggtgcgggaacgcggcccctacgtgtacagggagttcaggcataagtcaaacatcaccttcaacaataatgatactgtgtccttcttggagtatagaactttccagtttcagccaagcaagagccatgggagtgagtccgactacatcgtgatgccaaatatcctagtgctcggtgcagcggtgatgatggagaataaacctatgactctaaagttaatcatgacgctcgccttcacaaccctgggggagcgtgcctttatgaaccgtaccgtgggagaaatcatgtgggggtacaaagatcctctggtcaacctgatcaacaagtacttcccaggcatgttcccttttaaggacaaattcggcctttttgctgagcttaacaactctgactcaggcctgtttacggtcttcaccggcgttcagaatatctcaaggattcatctcgtggacaaatggaatggcttatcaaaggtggacttttggcactctgatcaatgcaacatgatcaatgggacaagcggtcaaatgtggcccccgttcatgactcctgagagctcgctcgagttttattcccccgaagcttgccggtctatgaagcttatgtacaaggaatccggagtctttgaagggatcccgacatataggtttgtggctccgaaaacactctttgcaaacgggtccatctacccccctaatgaggggttttgtccgtgcctcgaatccggtatccagaatgtgtctacttgtcgattctctgcgcctctgttcttgtcacatccccacttcctgaacgctgatcccgtacttgcggaagcggttaccggattgcatcccaaccaagaagcccacagtctttttctggacatccaccctgtgaccggaatcccgatgaactgtagcgttaagctgcagctgagcctgtacatgaaaagtgtggccgggatcggacagactgggaagatcgaaccggtggttctacctctgctgtggttcgccgaatccggtgcgatggaaggagagacactgcacacgttttacacccaactcgtgctgatgcctaaggttatgcattacgcccagtatgtcctccttgctctgggatgcgtattgctgctggtgccagtgatctgccagattagatcgcaggtgggggctggccagcgtgctgcccgggctgacagccactctctggcttgttggggaaagggcgcctcagacagaaccttatggcccactgcagcttggtcacctccaccggcagccgtgttgcgactgtgccggagcggatcggggcactgctggggcctccgctctacactggcctcctttgcatgccgagtggctactacactgccagtcctggaagggctcggccccagcctgggaggcgggactgggggcttgtag

SEQ ID NO: 37395 - DNA, 441 bp, Artificial Sequence
  derived and/or modified sequence
atggggtgttctgcaaaggccagatgggcagccggggctcttggtgtggccggactcctttgcgctgtacttggagcggtgatgatagtcatggtgccaagtctcattaagcagcaggtgctgaagaacgtgcgaattgatccctcttctctcagcttcaatatgtggaaagaaatccctatccccttctacctgtccgtgtatttcttcgatgtgatgaatccatcagaaattcttaaaggcgaaaagccccaggtcagagaacgcggcccatacgtgtatagggaatttaggcacaagagtaacataacgttcaataataacgatacagtgtcattcctagaataccgtactttccagtttcagccgagcaagtctcatggctctgaatccgactacatcgtcatgcccaatatcctcgtcctagtgcgactcccttag

SEQ ID NO: 37396 - DNA, 1521 bp, Artificial Sequence
  derived and/or modified sequence
atgggctgcagcgccaaggcccgctgggccgccggggccctgggcgtggccggcctgctgtgtgctgtgctgggcgctgtgatgattgtgatggtgcccagcctcatcaagcagcaggtgctgaagaatgtgagaattgaccccagcagcctgtccttcaacatgtggaaggagatccccatccccttctacctgtctgtgtacttctttgatgtgatgaaccccagcgagatcctgaagggggagaagccccaggtgcgggagcggggcccctacgtgtaccgggagttccgccacaagagcaacatcaccttcaacaacaatgacacagtgtccttcctggagtaccgcaccttccagttccagcccagcaagagccacggcagcgagagtgactacatcgtgatgcccaacatcctggtgctgggcgctgctgtgatgatggagaacaagcccatgaccctgaagctgatcatgaccctggccttcaccaccctgggggagcgggccttcatgaacagaacagtgggggagatcatgtggggctacaaggaccccctggtgaacctgatcaacaagtacttccctggcatgttccccttcaaggacaagtttggcctgtttgctgagctgaacaacagcgacagcggcctcttcaccgtcttcaccggggtgcagaacatcagccgcatccacctggtggacaagtggaatggcctgagcaaggtggacttctggcacagcgaccagtgcaacatgatcaatggcaccagcggccagatgtggccacccttcatgaccccagagagcagcctggagttctacagccctgaggcctgccgctccatgaagctgatgtacaaggagagcggcgtgtttgagggcatccccacctacagatttgtggcccccaagaccctgtttgccaacggcagcatctaccccccaaatgaaggcttctgcccctgcctggagagcggcatccagaatgtgtccacctgccgcttcagcgcccccctcttcctgagccacccccacttcctgaatgctgaccctgtgctggccgaggccgtgacaggcctgcaccccaaccaggaggcccacagcctcttcctggacatccaccctgtgacaggcatccccatgaactgcagcgtgaagctgcagctgagcctgtacatgaagtctgtggccggcatcggccagacaggcaagattgagcctgtggtgctgcccctgctgtggtttgctgagagcggggccatggagggggagaccctgcacaccttctacacccagctggtgctgatgcccaaggtgatgcactacgcccagtatgtgctgctggccctgggctgtgtgctgctgctggtgcctgtgatctgccagatccgcagccagggccctgaggacacagtgtcccagcccggcctggccgccggccctgacaggcctcccagcccctacacccccctgctgcctgacagccccagcggccagccccccagccccacagcctag

SEQ ID NO: 37397 - DNA, 1659 bp, Artificial Sequence
  derived and/or modified sequence
atgggctgcagcgccaaggcccgctgggccgccggggccctgggcgtggccggcctgctgtgtgctgtgctgggcgctgtgatgattgtgatggtgcccagcctcatcaagcagcaggtgctgaagaatgtgagaattgaccccagcagcctgtccttcaacatgtggaaggagatccccatccccttctacctgtctgtgtacttctttgatgtgatgaaccccagcgagatcctgaagggggagaagccccaggtgcgggagcggggcccctacgtgtaccgggagttccgccacaagagcaacatcaccttcaacaacaatgacacagtgtccttcctggagtaccgcaccttccagttccagcccagcaagagccacggcagcgagagtgactacatcgtgatgcccaacatcctggtgctgggcgctgctgtgatgatggagaacaagcccatgaccctgaagctgatcatgaccctggccttcaccaccctgggggagcgggccttcatgaacagaacagtgggggagatcatgtggggctacaaggaccccctggtgaacctgatcaacaagtacttccctggcatgttccccttcaaggacaagtttggcctgtttgctgagctgaacaacagcgacagcggcctcttcaccgtcttcaccggggtgcagaacatcagccgcatccacctggtggacaagtggaatggcctgagcaaggtggacttctggcacagcgaccagtgcaacatgatcaatggcaccagcggccagatgtggccacccttcatgaccccagagagcagcctggagttctacagccctgaggcctgccgctccatgaagctgatgtacaaggagagcggcgtgtttgagggcatccccacctacagatttgtggcccccaagaccctgtttgccaacggcagcatctaccccccaaatgaaggcttctgcccctgcctggagagcggcatccagaatgtgtccacctgccgcttcagcgcccccctcttcctgagccacccccacttcctgaatgctgaccctgtgctggccgaggccgtgacaggcctgcaccccaaccaggaggcccacagcctcttcctggacatccaccctgtgacaggcatccccatgaactgcagcgtgaagctgcagctgagcctgtacatgaagtctgtggccggcatcggccagacaggcaagattgagcctgtggtgctgcccctgctgtggtttgctgagagcggggccatggagggggagaccctgcacaccttctacacccagctggtgctgatgcccaaggtgatgcactacgcccagtatgtgctgctggccctgggctgtgtgctgctgctggtgcctgtgatctgccagatccgcagccaggtgggcgccggccagagagctgcccgggctgacagccacagcctggcctgctggggcaaaggagccagtgacaggaccctgtggcccacagctgcctggagccccccacctgctgctgtgctgcggctgtgccgcagcggcagcggccactgctggggcctgcggagcaccctggccagctttgcctgccgggtggccaccaccctgcctgtgctggagggcctgggccccagcctgggcggcggcaccggcagctag

SEQ ID NO: 37398 - DNA, 1551 bp, Artificial Sequence
  derived and/or modified sequence
atgtgtgctgtgggcaatgtgagaattgaccccagcagcctgtccttcaacatgtggaaggagatccccatccccttctacctgtctgtgtacttctttgatgtgatgaaccccagcgagatcctgaagggggagaagccccaggtgcgggagcggggcccctacgtgtaccgggagttccgccacaagagcaacatcaccttcaacaacaatgacacagtgtccttcctggagtaccgcaccttccagttccagcccagcaagagccacggcagcgagagtgactacatcgtgatgcccaacatcctggtgctgggcgctgctgtgatgatggagaacaagcccatgaccctgaagctgatcatgaccctggccttcaccaccctgggggagcgggccttcatgaacagaacagtgggggagatcatgtggggctacaaggaccccctggtgaacctgatcaacaagtacttccctggcatgttccccttcaaggacaagtttggcctgtttgctgagctgaacaacagcgacagcggcctcttcaccgtcttcaccggggtgcagaacatcagccgcatccacctggtggacaagtggaatggcctgagcaaggtggacttctggcacagcgaccagtgcaacatgatcaatggcaccagcggccagatgtggccacccttcatgaccccagagagcagcctggagttctacagccctgaggcctgccgctccatgaagctgatgtacaaggagagcggcgtgtttgagggcatccccacctacagatttgtggcccccaagaccctgtttgccaacggcagcatctaccccccaaatgaaggcttctgcccctgcctggagagcggcatccagaatgtgtccacctgccgcttcagcgcccccctcttcctgagccacccccacttcctgaatgctgaccctgtgctggccgaggccgtgacaggcctgcaccccaaccaggaggcccacagcctcttcctggacatccaccctgtgacaggcatccccatgaactgcagcgtgaagctgcagctgagcctgtacatgaagtctgtggccggcatcggccagacaggcaagattgagcctgtggtgctgcccctgctgtggtttgctgagagcggggccatggagggggagaccctgcacaccttctacacccagctggtgctgatgcccaaggtgatgcactacgcccagtatgtgctgctggccctgggctgtgtgctgctgctggtgcctgtgatctgccagatccgcagccaggtgggcgccggccagagagctgcccgggctgacagccacagcctggcctgctggggcaagggggccagtgacaggaccctgtggcccacagctgcctggagccccccacctgctgctgtgctgcggctgtgccgcagcggcagcggccactgctggggcctgcggagcaccctggccagctttgcctgccgggtggccaccaccctgcctgtgctggagggcctgggccccagcctgggcggcggcactggaggcctgtag

SEQ ID NO: 37399 - DNA, 1539 bp, Artificial Sequence
  derived and/or modified sequence
atgaatgtgagaattgaccccagcagcctgtccttcaacatgtggaaggagatccccatccccttctacctgtctgtgtacttctttgatgtgatgaaccccagcgagatcctgaagggggagaagccccaggtgcgggagcggggcccctacgtgtaccgggagttccgccacaagagcaacatcaccttcaacaacaatgacacagtgtccttcctggagtaccgcaccttccagttccagcccagcaagagccacggcagcgagagtgactacatcgtgatgcccaacatcctggtgctgggcgctgctgtgatgatggagaacaagcccatgaccctgaagctgatcatgaccctggccttcaccaccctgggggagcgggccttcatgaacagaacagtgggggagatcatgtggggctacaaggaccccctggtgaacctgatcaacaagtacttccctggcatgttccccttcaaggacaagtttggcctgtttgctgagctgaacaacagcgacagcggcctcttcaccgtcttcaccggggtgcagaacatcagccgcatccacctggtggacaagtggaatggcctgagcaaggtggacttctggcacagcgaccagtgcaacatgatcaatggcaccagcggccagatgtggccacccttcatgaccccagagagcagcctggagttctacagccctgaggcctgccgctccatgaagctgatgtacaaggagagcggcgtgtttgagggcatccccacctacagatttgtggcccccaagaccctgtttgccaacggcagcatctaccccccaaatgaaggcttctgcccctgcctggagagcggcatccagaatgtgtccacctgccgcttcagcgcccccctcttcctgagccacccccacttcctgaatgctgaccctgtgctggccgaggccgtgacaggcctgcaccccaaccaggaggcccacagcctcttcctggacatccaccctgtgacaggcatccccatgaactgcagcgtgaagctgcagctgagcctgtacatgaagtctgtggccggcatcggccagacaggcaagattgagcctgtggtgctgcccctgctgtggtttgctgagagcggggccatggagggggagaccctgcacaccttctacacccagctggtgctgatgcccaaggtgatgcactacgcccagtatgtgctgctggccctgggctgtgtgctgctgctggtgcctgtgatctgccagatccgcagccaggtgggcgccggccagagagctgcccgggctgacagccacagcctggcctgctggggcaagggggccagtgacaggaccctgtggcccacagctgcctggagccccccacctgctgctgtgctgcggctgtgccgcagcggcagcggccactgctggggcctgcggagcaccctggccagctttgcctgccgggtggccaccaccctgcctgtgctggagggcctgggccccagcctgggcggcggcactggaggcctgtag

SEQ ID NO: 37400 - DNA, 441 bp, Artificial Sequence
  derived and/or modified sequence
atgggctgcagcgccaaggcccgctgggccgccggggccctgggcgtggccggcctgctgtgtgctgtgctgggcgctgtgatgattgtgatggtgcccagcctcatcaagcagcaggtgctgaagaatgtgagaattgaccccagcagcctgtccttcaacatgtggaaggagatccccatccccttctacctgtctgtgtacttctttgatgtgatgaaccccagcgagatcctgaagggggagaagccccaggtgcgggagcggggcccctacgtgtaccgggagttccgccacaagagcaacatcaccttcaacaacaatgacacagtgtccttcctggagtaccgcaccttccagttccagcccagcaagagccacggcagcgagagtgactacatcgtgatgcccaacatcctggtgctggtgcggctgccctag

SEQ ID NO: 37401 - DNA, 1521 bp, Artificial Sequence
  derived and/or modified sequence
atgggctgcagcgccaaggcccggtgggccgccggcgccctgggcgtggccggccttctctgcgccgttctgggcgccgttatgatcgtgatggtgccgtctctgattaaacagcaggtcctcaagaacgtccggatcgatccatccagcctcagctttaacatgtggaaggagatccccatccccttttatctgtccgtgtatttcttcgacgtgatgaatccctccgagatcttgaaaggcgaaaaaccccaagtgcgtgaacgggggccatatgtctaccgagagtttcggcataagtccaacatcacttttaacaataatgatacggtgtcattcctggagtacaggacattccagttccagcctagtaagagccacgggagcgaatctgactatattgttatgccgaatatactcgttcttggcgctgctgtaatgatggaaaacaaaccaatgacgcttaaattgataatgacacttgctttcactaccctcggagagagggccttcatgaaccgcacggtcggcgaaataatgtggggttacaaggaccccctggtcaaccttattaataaatattttccaggaatgtttcctttcaaggacaagttcggcctttttgctgagctgaacaattctgatagcgggctcttcacagtgttcactggagtccagaatatttcaaggatccatctggttgataagtggaatggactgtctaaggtcgatttttggcattcagaccaatgtaatatgataaatgggacctccgggcagatgtggccgccattcatgaccccagagagctccctggagttttattccccagaggcctgtaggtcaatgaagttaatgtataaggagtctggggtctttgaaggtatccccacgtacaggtttgttgcccccaaaacgctgtttgcaaatgggagcatctaccctccaaatgaggggttttgtccttgtctggaaagtggcatccagaacgtgagcacctgcaggttctccgctcctctgttcctatcgcatccgcattttctcaatgcggatccagtcttggccgaggccgttactggcctgcacccaaatcaggaggcgcatagcctgttcctggatattcatccagtaaccggaatacctatgaactgcagcgtgaagctccagctctctctttatatgaagagcgtggcaggcatcggacagacaggaaagattgagcccgtggtgctccctctgctttggtttgcagagtcaggcgcaatggaaggtgagaccttacacactttctacacgcagctggtgctcatgcccaaggtgatgcattatgctcagtacgtcctattagccttaggttgtgtgctgctcctggtccccgtaatttgtcagattcgctcgcaggggccagaggacacggtgtctcagccaggtctggccgcaggaccggaccggccgccatctccctatactccactgctgccagacagtccgagcggccagccaccctcccccacagcctag

SEQ ID NO: 37402 - DNA, 1659 bp, Artificial Sequence
  derived and/or modified sequence
atgggctgcagcgccaaggcccggtgggccgccggcgccctgggcgtggctggcctcctttgcgctgtccttggagcagttatgatcgtgatggtgccaagcctgattaagcagcaggtattgaagaatgttcggattgatccctcaagcctctcctttaacatgtggaaagaaatccccataccgttctatctgtcagtgtatttctttgatgtcatgaatccaagtgagatcttaaagggagagaaaccccaggtccgcgaacgtgggccttacgtgtacagagagttcagacacaaaagcaacattacattcaataacaatgacacagtgagctttctggaatatcggacctttcaatttcaacccagcaagtcccacggcagcgagagcgattacattgtcatgcccaatatccttgttctaggcgcagcagtcatgatggaaaacaaaccaatgaccctgaagctgattatgaccctggccttcacaacccttggagagcgcgcattcatgaacaggactgtcggagagatcatgtggggatacaaggaccccctggtaaaccttattaacaaatacttccccgggatgtttcccttcaaggataagttcggtctgtttgccgagcttaataattccgatagcgggttgttcacagtatttaccggggtacagaatatctcaagaatccacctggtcgacaaatggaacggcttaagtaaggtagacttttggcacagcgaccaatgcaacatgatcaacgggaccagcgggcagatgtggccacctttcatgacccccgagtcttccttggaattctactccccggaggcctgtagatccatgaagctgatgtataaagagtccggagtgtttgaaggcatcccaacatacagatttgtggccccaaaaacactattcgccaacggctcgatttatccgccaaatgagggcttttgcccatgccttgagtcaggaatccagaacgtctctacctgccgcttttccgcccctctcttcttatctcatccgcactttttgaatgccgaccccgtgctggccgaagcagtcactggcctgcatcctaatcaggaagcccattctctcttccttgacatccatcccgtaacgggtatccccatgaactgttccgtcaagctgcagctgtctttatacatgaaaagcgttgcgggcattggtcagactggcaaaatagagccagtggtgctgccactgctttggtttgcggagtcgggcgccatggagggtgagacgctgcataccttttacacccaacttgtgctaatgccaaaggtaatgcactatgcccagtacgtgctgctcgcactgggctgcgtgctcctgttggttcccgtgatttgccaaattcggtctcaagttggcgccggacagcgagccgccagagcagactctcactcgctcgcctgctggggaaaaggggccagcgacagaaccctgtggccaacagccgcttggtctccgccacccgctgctgtgctgaggttgtgcagatcaggtagcggtcactgctggggcttaaggagcacactggcatccttcgcttgccgcgtggcgaccacgttacctgtcctcgaagggctgggtccatccctgggcggaggaacggggtcctag

SEQ ID NO: 37403 - DNA, 1551 bp, Artificial Sequence
  derived and/or modified sequence
atgtgcgccgtgggcaacgtgcggatcgaccccagcagcctgagcttcaacatgtggaaagaaattcccatacctttctacctttctgtgtactttttcgacgtgatgaatccgagtgaaatcctaaagggggagaagcctcaggtaagagaacggggcccctacgtgtatagagaattcagacacaaatccaatatcacctttaacaacaacgacacagtgagtttcttggagtatcggacttttcaattccaacccagcaaaagtcatgggagtgaatcggactacatcgtcatgccaaatatactcgtgctgggggccgccgtcatgatggagaataaacccatgactctgaagctaatcatgacgttggccttcacaacgctgggtgaaagagccttcatgaaccgaacagtcggcgagatcatgtggggatacaaagacccacttgtgaatttaatcaataaatatttccccggtatgttcccgtttaaggataaatttgggctctttgccgaattgaataattctgatagcggactgttcacagtcttcacgggcgtccagaacatctcccggatccaccttgtggataagtggaatggcttgtccaaagtcgatttttggcattcagatcagtgtaacatgattaatggcacctcagggcaaatgtggcctccatttatgacccctgagtcctctctggaattctattcgcccgaagcctgtcgaagcatgaagctaatgtataaggaaagcggagttttcgaagggatccctacgtaccggttcgtcgctccaaaaacactcttcgcgaatggttcaatctatcctccaaatgagggattttgtccatgcttggaatccggcattcagaacgtatctacctgccgcttctcagcaccgctctttctttcacatccccattttctcaacgcagaccctgtcctcgctgaagccgtgaccggcttacatccgaaccaggaggctcactcactattcctcgacattcatcccgttaccggcatccctatgaactgctccgtgaagctgcagttgagcctctacatgaagtctgtagcaggaattgggcaaaccggaaagatcgaacccgtagtgctgcccctgctatggttcgctgagtccggagcaatggaaggagaaacattacatactttctacactcagctcgtacttatgcctaaggtgatgcactatgcacagtacgtactgctcgccctcgggtgtgtgctactgctagttcccgtgatttgccagattcgatcccaggttggggcaggacagcgtgccgcccgcgcagatagccattctctagcttgttggggcaaaggggcgtccgatagaacactttggcccaccgccgcatggagtccgccgcccgctgccgtgctcaggttatgccggtctgggtctgggcattgctggggtctcaggagtactctggcttcctttgcttgtcgggtggccacgactctgcctgttctcgagggcttggggccctctctcgggggtgggacgggtggcctgtag

SEQ ID NO: 37404 - DNA, 1539 bp, Artificial Sequence
  derived and/or modified sequence
atgaacgtgcggatcgaccccagcagcctgagcttcaacatgtggaaggagatccccattccgttctatctaagcgtgtacttctttgacgttatgaaccccagcgaaatcctgaagggggaaaaaccacaggtgcgggagagaggaccttacgtatatcgggagttccggcataaaagcaatatcacgtttaacaacaatgacaccgtctcgttcctggaatacagaacgttccagttccagccctcaaaatctcacggaagtgaaagtgactacatcgttatgcctaatatcctggtgctgggagccgccgtgatgatggagaataaacctatgaccctcaagcttattatgacactagcttttactacgctgggcgaaagagcttttatgaaccgtacagtgggggaaataatgtgggggtacaaggatccactggtcaaccttattaataaatacttcccgggtatgttcccttttaaagataaattcggacttttcgccgaactcaataattcagacagtgggctgttcacggtgtttactggagttcagaatatttctagaatccacctcgtggacaagtggaacggcctctccaaagtggacttttggcactcggaccaatgtaacatgatcaatgggacttccggacagatgtggcccccctttatgacgcccgagagctctttggagttctattctccggaggcgtgccgaagtatgaagttaatgtataaagaaagtggagtgtttgaagggattccaacctacagattcgtggcacctaagactctttttgctaacggttctatctatcctcctaacgaagggttctgtccttgtttggagagtgggatacagaatgtttcgacatgtagattctcggctccgctgtttctgtctcacccccacttcctgaatgccgatccagtgctggcagaagctgtcacaggactccatcccaatcaggaggcgcactctctcttcctcgatatccacccagtgacaggtatccccatgaattgctctgtaaaactccagctgtccctatatatgaagtccgtcgccgggattggtcaaaccggcaagattgaacctgtggttctcccactgctatggtttgcggaaagcggagccatggaaggcgagactttacatacattctacacacagttggtgctcatgcccaaggtgatgcactatgctcagtatgtgctgcttgccttagggtgcgttcttttgctggtacctgtaatctgccagattaggtcccaggttggggccggccagagagctgctcgggccgactcccattccctagcctgctggggcaaaggcgcttccgacaggaccctctggccaaccgccgcctggtccccgccgcctgccgccgtgctgcgcctgtgcagatccggttccggccactgttggggcctgagaagcaccctggccagcttcgcgtgtcgggttgccaccaccctgccagtactggaagggctgggtccgagccttggaggaggcacaggtggcctgtag

SEQ ID NO: 37405 - DNA, 441 bp, Artificial Sequence
  derived and/or modified sequence
atgggctgcagcgccaaggcccggtgggccgccggcgccctgggcgtggccggtctgctgtgtgctgtgttaggagccgttatgatcgttatggtcccatcgctgatcaagcagcaagtgttgaaaaacgtccgaattgacccctcaagtttgagcttcaatatgtggaaggagatcccaataccgttttacctgtcagtctacttcttcgatgtgatgaatccctccgagatcctgaaaggggaaaagccgcaggtgagagaaagggggccctacgtgtacagggagttccgacacaaatctaacatcacatttaacaacaacgacaccgtgtcatttttggagtaccggactttccagttccaaccttccaagtcccacgggtcagaaagtgactacatagtcatgcccaacatattggtccttgttaggctcccttag

SEQ ID NO: 37406 - DNA, 1521 bp, Artificial Sequence
  derived and/or modified sequence
atggggtgctctgcaaaggcgaggtgggctgcaggtgctctgggcgtcgctgggttattatgtgctgtgctgggtgcggtgatgatcgtgatggtgcctagtttgatcaagcagcaggtgcttaaaaacgttaggatcgatccgagctccctgagcttcaacatgtggaaggagattcctattcctttctatctaagcgtatatttctttgacgtcatgaacccttctgaaatactgaagggagagaaacctcaagttcgcgaaaggggaccctacgtttaccgggagtttcgccacaagtctaacataacattcaataacaacgatacagtctcatttttggagtaccgaaccttccagttccagccaagcaaaagccacggatcggagagcgactatattgtgatgcctaacattctggttttgggcgctgccgtaatgatggagaacaagcccatgactctaaagctcattatgaccctcgcattcacaacattaggggaaagagcatttatgaaccggaccgtcggggagatcatgtggggatacaaggatcccctggttaatctcattaataaatatttccccggaatgttcccttttaaagataaatttgggctattcgctgagttgaacaattcagacagtggactgttcacagtcttcacaggagtgcagaacattagcaggatacatctggtggataagtggaatggtctctctaaggtcgatttctggcacagcgatcaatgtaacatgatcaacgggacgtccggacagatgtggcccccttttatgactccagagtccagcctcgagttttatagcccggaggcatgtaggtctatgaaactcatgtacaaagagtccggcgtattcgaggggatccccacatacaggttcgtggcacccaagacgctgtttgccaacgggtcaatttatccaccgaacgagggcttttgtccttgtttggagagtggcatccagaacgtgtccacatgtaggtttagtgctcccttgttcctgagccacccacactttctaaacgcagatcctgttttggccgaggccgtgactgggctgcatcctaatcaggaggcccactccctgtttctggacatccaccccgtgactgggattccgatgaactgcagcgtgaaactgcagctgtctctttacatgaaatccgtggcgggaattgggcagactgggaagattgagccagtggtgttaccattgttatggttcgctgagagcggggcaatggagggagagaccctccacacgttttacacccagctggtgctcatgcctaaagtgatgcactatgctcagtatgtcctgctggccctcggctgtgttctgctgctggtgcctgttatctgtcagattagatcacaaggtcccgaagacaccgtttcgcagcccggtctcgctgctggaccggaccgtcccccttctccctataccccgttactgcccgattctccctccgggcagcccccatctcccaccgcttag

SEQ ID NO: 37407 - DNA, 1659 bp, Artificial Sequence
  derived and/or modified sequence
atgggatgttctgctaaggcccgatgggccgcaggtgcactaggtgtggccggactgctctgtgccgtcctgggggctgtgatgattgtcatggtgccgtccttgattaaacagcaagtcctgaagaatgtgaggatcgaccccagctccttatctttcaacatgtggaaggagattcccattccattttacttgagcgtctactttttcgacgtaatgaacccctcagagatccttaagggcgagaagccgcaagttcgggaaagagggccatatgtgtatagggaattccgtcataaatcaaacatcacctttaataacaatgatactgtaagttttctggaatacagaaccttccagtttcaaccctcaaagtcacacggatctgaatcagattatattgtgatgccaaacattctggtcctgggggctgccgtgatgatggaaaacaaaccaatgactctgaagttgattatgactctggctttcacaacactcggagagcgggcatttatgaatcggactgtgggcgagataatgtggggttacaaggacccccttgtgaatttgattaacaagtatttccccggaatgtttccattcaaagacaaattcgggctgttcgctgaattgaacaactccgatagtggccttttcaccgtgttcacaggggtgcaaaatattagcaggatccatctggtcgataagtggaacgggctgtccaaagttgacttctggcacagcgatcagtgcaatatgataaatgggacatccggccagatgtggccccctttcatgacaccagaatccagcctggagttttacagcccggaagcatgcagaagcatgaaactcatgtacaaggagagcggagtgttcgagggcatacccacgtatcgtttcgtcgctccaaaaacgctgtttgccaacggatctatctatccacccaatgaggggttttgtccttgcttggaaagtgggattcagaatgtttcgacctgccggtttagcgccccactcttcttgtctcatccacactttctgaacgcggatccagtccttgccgaggccgtcaccggattgcatcccaatcaggaggctcactcactgttcctagatatccatccagtgaccggtatccctatgaactgctcagtcaagctgcagctaagcctgtacatgaaatctgtcgccggtatcggccagactggcaagatagaacccgtggtactgcctctcctgtggttcgcggaatctggcgcaatggagggcgaaacccttcacactttctatacacagttggtgttgatgccaaaggtcatgcattatgcccagtatgtgctgctggcacttggctgtgtactgctcttggtaccggtaatttgccagatccgcagtcaggtgggtgccggtcagcgggctgcgcgagccgacagccatagcctggcctgctggggaaagggcgcatccgacaggacgctgtggccgacagccgcttggtcaccaccgcctgccgcagtccttcgtctctgccggagtggctccggacactgttggggtctcaggtctacgctggcatcttttgcttgccgggtggcaactacgttacctgtcctggaagggctgggacccagccttggcggaggaaccggcagctag

SEQ ID NO: 37408 - DNA, 1551 bp, Artificial Sequence
  derived and/or modified sequence
atgtgcgcagtaggaaacgtcagaattgatccgtcgtccctgtcttttaatatgtggaaggagatccctattcccttctacctcagcgtgtactttttcgacgtcatgaacccctccgaaatcctcaaaggggagaagccacaggtcagagaacggggtccctacgtttaccgagaatttcgtcataagagcaatattacatttaacaataacgacaccgtttcattcctggagtaccgcacctttcagttccagccgagtaagtctcacgggtccgaaagcgattatatcgtgatgcccaatattctcgttctcggcgcagcggtgatgatggagaataaaccaatgactctaaaactgataatgacacttgcattcaccacccttggtgaacgcgctttcatgaatcgtactgtgggtgagatcatgtggggctataaggatccactggtgaatctcatcaataagtatttccctggtatgttcccattcaaggataagttcggcctgtttgctgaactgaataatagcgattcagggctctttacagtgttcactggggtacagaacatttccagaatccatttggtagacaagtggaacggtctgtcaaaagtggacttttggcactcagatcaatgcaacatgattaatggcacaagtgggcaaatgtggcccccattcatgactcctgaaagctcactcgaattttattccccagaagcgtgccggagcatgaagctcatgtataaggaaagcggcgtcttcgagggaatcccaacctaccgttttgttgcaccaaaaacgttgtttgcaaatggctcgatttatccccctaacgagggattttgtccttgcttggaaagtggcattcagaatgtgtctacttgccgcttttctgcccctctcttcctgtcccacccacacttcctgaatgcagaccccgtactggccgaagcagtcacgggtctgcaccccaatcaggaagcccatagcctctttttggacattcaccctgtgacgggcattccaatgaactgctccgtcaagcttcagctctcgctttacatgaagtccgtggctggtattggccagaccggcaagattgagcctgtggtgctcccacttctctggttcgcagagagcggtgctatggaaggcgagaccctgcataccttctacactcagttagtactgatgcctaaagtcatgcactatgcccagtatgtcctgctggctctgggctgcgtgctgctgctggtgccagtcatttgccagatcaggagtcaggtgggggcagggcagcgtgccgctagggccgactcccattctttagcttgctggggtaagggagccagcgatcgtacattatggccaaccgctgcatggtccccaccccctgccgcagtccttaggctgtgtcggtcaggttctggacactgttggggtctgagaagtacgcttgcttccttcgcctgcagggtggccaccacactgccagtgctcgaggggctgggcccttcgcttggtggcggtaccggcggactatag

SEQ ID NO: 37409 - DNA, 1539 bp, Artificial Sequence
  derived and/or modified sequence
atgaacgtgcggattgatccatcttcactatcttttaacatgtggaaggaaattcccatcccattttacctgtctgtctactttttcgatgtgatgaacccgagtgagattctaaagggcgagaagccacaagtgagagagcgcggtccatacgtgtacagagaatttagacataagtcaaacatcacattcaataacaacgacaccgttagtttcctagaataccgtactttccagtttcagccgagtaaaagccacggatccgagagtgactatatcgtcatgcctaacatattggtccttggtgcagccgtgatgatggagaacaaacccatgacactaaaactcattatgacattggccttcacaacactgggcgagcgggcttttatgaatcggacggtcggggaaatcatgtggggttacaaggaccccctcgtcaatctgatcaataaatacttccccggaatgtttccttttaaagataaattcgggttattcgcagaactcaataatagtgactccggcttattcacggtttttaccggcgttcaaaacatctcaaggattcatctggtggacaaatggaacggactgtctaaggtggacttctggcatagcgaccaatgcaacatgataaatgggactagcggacagatgtggcctcctttcatgacacctgaaagcagtttggagttctattcaccggaggcctgcaggtcaatgaaactgatgtacaaggagagtggagtttttgaggggattcctacctacagattcgtggccccaaagactctcttcgcaaatgggtcaatttaccctcctaacgagggcttttgtccttgtttggagtctggcatccaaaacgtaagtacgtgccgtttttctgcgcctctttttctgagccatccgcatttcctgaatgccgaccctgttctggccgaagccgtgactggcttacaccctaaccaggaggcccacagcctcttcctcgacattcaccccgtgacgggaatccctatgaactgcagtgtaaagctacaactgtccttgtatatgaaatccgtagcaggaattggacagacgggtaagattgagcccgtggtgcttcctttgctttggtttgccgaaagcggtgctatggaaggtgaaacattgcacacattttacacccagttggtactaatgcctaaggtcatgcactacgcccagtacgtcctcttggccttaggctgcgtcctgctgctggtcccagtcatctgccaaattcgatctcaggttggcgctggccagcgtgcggctcgcgctgactcccactcactggcatgttggggcaaaggagcatctgataggaccctctggccaaccgctgcatggtcccccccacccgcagctgtgttgaggctgtgccggtccggtagcggtcattgctgggggctgcggtcaaccctggcatcctttgcttgcagagtcgccaccactctcccggtgctcgaaggcctgggcccatcactgggcggtggtacaggtggcctgtag

SEQ ID NO: 37410 - DNA, 441 bp, Artificial Sequence
  derived and/or modified sequence
atgggttgttcggccaaagcccgatgggcggctggtgcccttggggtggcgggactgctttgtgctgtactgggggcagtgatgatcgttatggtgccctcgctaattaaacaacaagttttaaagaatgttcgcatcgatccaagctctctcagtttcaatatgtggaaagagatccccattccgttctatctcagcgtgtacttttttgacgtgatgaaccctagcgaaattctaaagggggagaagccccaagtgagagaaagaggcccatacgtgtacagagagtttcggcacaaatcaaacatcacttttaacaacaatgacacggtgtcattcttggaatataggaccttccaattccaaccatcaaaatcccacggcagtgaaagtgactatattgtgatgccaaacattcttgttctggttcgcctcccttag

SEQ ID NO: 37411 - DNA, 3125 bp, Artificial Sequence
  derived and/or modified sequence
tccggcggcgccggcgatggggcataaaaccactggccacctgccgggctgctcctgcgtgcgctgccgtcccggatccaccgtgcctctgcggcctgcgtgcccggagtccccgcctgtgtcgtctctgtcgccgtccccgtctcctgccaggcgcggagccctgcgagccgcgggtgggccccaggcgcgcagacatgggctgctccgccaaagcgcgctgggctgccggggcgctgggcgtcgcggggctactgtgcgctgtgctgggcgctgtcatgatcgtgatggtgccgtcgctcatcaagcagcaggtccttaagaacgtgcgcatcgaccccagtagcctgtccttcaacatgtggaaggagatccctatccccttctatctctccgtctacttctttgacgtcatgaaccccagcgagatcctgaagggcgagaagccgcaggtgcgggagcgcgggccctacgtgtacagggagttcaggcacaaaagcaacatcaccttcaacaacaacgacaccgtgtccttcctcgagtaccgcaccttccagttccagccctccaagtcccacggctcggagagcgactacatcgtcatgcccaacatcctggtcttgggtgcggcggtgatgatggagaataagcccatgaccctgaagctcatcatgaccttggcattcaccaccctcggcgaacgtgccttcatgaaccgcactgtgggtgagatcatgtggggctacaaggacccccttgtgaatctcatcaacaagtactttccaggcatgttccccttcaaggacaagttcggattatttgctgagctcaacaactccgactctgggctcttcacggtgttcacgggggtccagaacatcagcaggatccacctcgtggacaagtggaacgggctgagcaaggttgacttctggcattccgatcagtgcaacatgatcaatggaacttctgggcaaatgtggccgcccttcatgactcctgagtcctcgctggagttctacagcccggaggcctgccgatccatgaagctaatgtacaaggagtcaggggtgtttgaaggcatccccacctatcgcttcgtggctcccaaaaccctgtttgccaacgggtccatctacccacccaacgaaggcttctgcccgtgcctggagtctggaattcagaacgtcagcacctgcaggttcagtgcccccttgtttctctcccatcctcacttcctcaacgctgacccggttctggcagaagcggtgactggcctgcaccctaaccaggaggcacactccttgttcctggacatccacccggtcacgggaatccccatgaactgctctgtgaaactgcagctgagcctctacatgaaatctgtcgcaggcattggacaaactgggaagattgagcctgtggtcctgccgctgctctggtttgcagagagcggggccatggagggggagactcttcacacattctacactcagctggtgttgatgcccaaggtgatgcactatgcccagtacgtcctcctggcgctgggctgcgtcctgctgctggtccctgtcatctgccaaatccggagccaaggtcctgaggacaccgtgagccagccaggcctggccgctgggcctgaccggccccccagcccctacaccccgcttctcccggactctcccagcggacagccccccagccccacagcctgagcctcccagctgccatgtgcctgttgcacacctgcacacacgccctggcacacatacacacatgcgtgcaggcttgtgcagacactcagggatggagctgctgctgaagggacttgtagggagaggctcgtcaacaagcactgttctggaaccttctctccacgtggcccacaggcctgaccacaggggctgtgggtcctgcgtccccttcctcgggtgagcctggcctgtcccgttcagccgttgggcccaggcttcctcccctccaaggtgaaacactgcagtcccggtgtggtggctccccatgcaggacgggccaggctgggagtgccgccttcctgtgccaaattcagtggggactcagtgcccaggccctggccacgagctttggccttggtctacctgccaggccaggcaaagcgcctttacacaggcctcggaaaacaatggagtgagcacaagatgccctgtgcagctgcccgagggtctccgcccaccccggccggactttgatccccccgaagtcttcacaggcactgcatcgggttgtctggcgcccttttcctccagcctaaactgacatcatcctatggactgagccggccactctctggccgaagtggccgcaggctgtgcccccgagctgcccccaccccctcacagggtccctcagattataggtgcccaggctgaggtgaagaggcctgggggccctgccttccgggcgctcctggaccctggggcaaacctgtgacccttttctactggaatagaaatgagttttatcatctttgaaaaataattcactcttgaagtaataaacgtttaaaaaaatgggatgcctgcctctgtgacagccttgtttgctgaggtcgtgggggtgggggcctctgggaagttccgggctcctcttctcttggtcaatagctcctttctggtggctgccaagagcgtctctcccagggccgggctgctggcttaccttcctgttgttttcaaatttcaaccttgtgcaatgttgagtttcatagaaatactgcatgagtacgcccttgtttagaagcagcagggtctgagtcccatcccacagcccccagtgcagacgcttttgccacttttgcatggggccccctggatgtgtttctgtgcatttatctacaaatcctggtgcccataggacatgccccgtgttgttctaggcctttgctttctgctcgttacataaatggtgaagaagagaagcgggtaagagaacagattggagccatctaaaagttctcatcttaagtgtagatcattgcaaaggatggaattttctccgattgtcatcatcgttgatgtttgaatatgagaccatttcatcagtatttaagtgtgcccgctgggatctaactaggagaggagagg

SEQ ID NO: 37412 - DNA, 2731 bp, Artificial Sequence
  derived and/or modified sequence
ccggatccaccgtgcctctgcggcctgcgtgcccggagtccccgcctgtgtcgtctctgtcgccgtccccgtctcctgccaggcgcggagccctgcgagccgcgggtgggccccaggcgcgcagacatgggctgctccgccaaagcgcgctgggctgccggggcgctgggcgtcgcggggctactgtgcgctgtgctgggcgctgtcatgatcgtgatggtgccgtcgctcatcaagcagcaggtccttaagaacgtgcgcatcgaccccagtagcctgtccttcaacatgtggaaggagatccctatccccttctatctctccgtctacttctttgacgtcatgaaccccagcgagatcctgaagggcgagaagccgcaggtgcgggagcgcgggccctacgtgtacagggagttcaggcacaaaagcaacatcaccttcaacaacaacgacaccgtgtccttcctcgagtaccgcaccttccagttccagccctccaagtcccacggctcggagagcgactacatcgtcatgcccaacatcctggtcttgggtgcggcggtgatgatggagaataagcccatgaccctgaagctcatcatgaccttggcattcaccaccctcggcgaacgtgccttcatgaaccgcactgtgggtgagatcatgtggggctacaaggacccccttgtgaatctcatcaacaagtactttccaggcatgttccccttcaaggacaagttcggattatttgctgagctcaacaactccgactctgggctcttcacggtgttcacgggggtccagaacatcagcaggatccacctcgtggacaagtggaacgggctgagcaaggttgacttctggcattccgatcagtgcaacatgatcaatggaacttctgggcaaatgtggccgcccttcatgactcctgagtcctcgctggagttctacagcccggaggcctgccgatccatgaagctaatgtacaaggagtcaggggtgtttgaaggcatccccacctatcgcttcgtggctcccaaaaccctgtttgccaacgggtccatctacccacccaacgaaggcttctgcccgtgcctggagtctggaattcagaacgtcagcacctgcaggttcagtgcccccttgtttctctcccatcctcacttcctcaacgctgacccggttctggcagaagcggtgactggcctgcaccctaaccaggaggcacactccttgttcctggacatccacccggtcacgggaatccccatgaactgctctgtgaaactgcagctgagcctctacatgaaatctgtcgcaggcattggacaaactgggaagattgagcctgtggtcctgccgctgctctggtttgcagagagcggggccatggagggggagactcttcacacattctacactcagctggtgttgatgcccaaggtgatgcactatgcccagtacgtcctcctggcgctgggctgcgtcctgctgctggtccctgtcatctgccaaatccggagccaagtaggtgctggccagagggcagcccgggctgacagccattcgcttgcctgctgggggaaaggggcctcagatcggaccctctggccaaccgcagcctggagcccacctccagcagcagtcctgcgtctctgccggagtgggagcggtcactgctgggggctgcgcagcacgcttgcgtcttttgcatgccgcgttgccactactctgcctgttctggaaggcctgggaccctcccttggagggggcacagggtcctgaggacaccgtgagccagccaggcctggccgctgggcctgaccggccccccagcccctacaccccgcttctcccggactctcccagcggacagccccccagccccacagcctgagcctcccagctgccatgtgcctgttgcacacctgcacacacgccctggcacacatacacacatgcgtgcaggcttgtgcagacactcagggatggagctgctgctgaagggacttgtagggagaggctcgtcaacaagcactgttctggaaccttctctccacgtggcccacaggcctgaccacaggggctgtgggtcctgcgtccccttcctcgggtgagcctggcctgtcccgttcagccgttgggcccaggcttcctcccctccaaggtgaaacactgcagtcccggtgtggtggctccccatgcaggacgggccaggctgggagtgccgccttcctgtgccaaattcagtggggactcagtgcccaggccctggccacgagctttggccttggtctacctgccaggccaggcaaagcgcctttacacaggcctcggaaaacaatggagtgagcacaagatgccctgtgcagctgcccgagggtctccgcccaccccggccggactttgatccccccgaagtcttcacaggcactgcatcgggttgtctggcgcccttttcctccagcctaaactgacatcatcctatggactgagccggccactctctggccgaagtggccgcaggctgtgcccccgagctgcccccaccccctcacagggtccctcagattataggtgcccaggctgaggtgaagaggcctgggggccctgccttccgggcgctcctggaccctggggcaaacctgtgacccttttctactggaatagaaatgagttttatcatctttgaaaaataattcactcttgaagtaataaacgtttaaaaaaa

SEQ ID NO: 37413 - DNA, 1883 bp, Artificial Sequence
  derived and/or modified sequence
gagaaatcggggcccatgtgtgccgttggggtgagggtgcggagaaatcggggcccatgtgtgccgttgggaacgtgcgcatcgaccccagtagcctgtccttcaacatgtggaaggagatccctatccccttctatctctccgtctacttctttgacgtcatgaaccccagcgagatcctgaagggcgagaagccgcaggtgcgggagcgcgggccctacgtgtacagggagttcaggcacaaaagcaacatcaccttcaacaacaacgacaccgtgtccttcctcgagtaccgcaccttccagttccagccctccaagtcccacggctcggagagcgactacatcgtcatgcccaacatcctggtcttgggtgcggcggtgatgatggagaataagcccatgaccctgaagctcatcatgaccttggcattcaccaccctcggcgaacgtgccttcatgaaccgcactgtgggtgagatcatgtggggctacaaggacccccttgtgaatctcatcaacaagtactttccaggcatgttccccttcaaggacaagttcggattatttgctgagctcaacaactccgactctgggctcttcacggtgttcacgggggtccagaacatcagcaggatccacctcgtggacaagtggaacgggctgagcaaggttgacttctggcattccgatcagtgcaacatgatcaatggaacttctgggcaaatgtggccgcccttcatgactcctgagtcctcgctggagttctacagcccggaggcctgccgatccatgaagctaatgtacaaggagtcaggggtgtttgaaggcatccccacctatcgcttcgtggctcccaaaaccctgtttgccaacgggtccatctacccacccaacgaaggcttctgcccgtgcctggagtctggaattcagaacgtcagcacctgcaggttcagtgcccccttgtttctctcccatcctcacttcctcaacgctgacccggttctggcagaagcggtgactggcctgcaccctaaccaggaggcacactccttgttcctggacatccacccggtcacgggaatccccatgaactgctctgtgaaactgcagctgagcctctacatgaaatctgtcgcaggcattggacaaactgggaagattgagcctgtggtcctgccgctgctctggtttgcagagagcggggccatggagggggagactcttcacacattctacactcagctggtgttgatgcccaaggtgatgcactatgcccagtacgtcctcctggcgctgggctgcgtcctgctgctggtccctgtcatctgccaaatccggagccaagtaggtgctggccagagggcagcccgggctgacagccattcgcttgcctgctgggggaaaggggcctcagatcggaccctctggccaaccgcagcctggagcccacctccagcagcagtcctgcgtctctgccggagtgggagcggtcactgctgggggctgcgcagcacgcttgcgtcttttgcatgccgcgttgccactactctgcctgttctggaaggcctgggaccctcccttggagggggcacaggtgggctttgagtaatgagacctggtacttgcatcatccattcatcaagtcagcacccggggatgccaggttctgttaggggcgaggggacgtacagcagtagaggagacagctgagatccctgctcagggggattgaggggggctggcatcccagccggggagacagatgaaaaccaagtaaatcagcagaaaagataatttcactcatgataggagctgtgaggggttagagccaaatagaaatacagcgtgagccacgtgtgaggttttcagtttaaattttct

SEQ ID NO: 37414 - DNA, 2347 bp, Artificial Sequence
  derived and/or modified sequence
aaatcggggcccatgtgtgccgttgggaatgtaggatggtgcagctgctgtgtggaggcccccccaaaatttaacatagaattaccatatggtggggcaaccccacttctgggtatcaaagaaatggaagtgggaacttgaagaggaatctggccaccgcgttcattgcagcgctgttcacgatggcccaacggtgggagcaacccgagtgtccgctgatgggtggtgggtaagaagctggggcccatccacacgttggaataggattcagcctggaaaaggaaggacgtttggacgcacgctgcgacatgcacgggccttgaggaagttatgcgagtgaaataagccacaacaggacaaataccgtacgattccatttgcatgagctccctagagtagccagatccacagagacagaaaagagaatgaacgtgcgcatcgaccccagtagcctgtccttcaacatgtggaaggagatccctatccccttctatctctccgtctacttctttgacgtcatgaaccccagcgagatcctgaagggcgagaagccgcaggtgcgggagcgcgggccctacgtgtacagggagttcaggcacaaaagcaacatcaccttcaacaacaacgacaccgtgtccttcctcgagtaccgcaccttccagttccagccctccaagtcccacggctcggagagcgactacatcgtcatgcccaacatcctggtcttgggtgcggcggtgatgatggagaataagcccatgaccctgaagctcatcatgaccttggcattcaccaccctcggcgaacgtgccttcatgaaccgcactgtgggtgagatcatgtggggctacaaggacccccttgtgaatctcatcaacaagtactttccaggcatgttccccttcaaggacaagttcggattatttgctgagctcaacaactccgactctgggctcttcacggtgttcacgggggtccagaacatcagcaggatccacctcgtggacaagtggaacgggctgagcaaggttgacttctggcattccgatcagtgcaacatgatcaatggaacttctgggcaaatgtggccgcccttcatgactcctgagtcctcgctggagttctacagcccggaggcctgccgatccatgaagctaatgtacaaggagtcaggggtgtttgaaggcatccccacctatcgcttcgtggctcccaaaaccctgtttgccaacgggtccatctacccacccaacgaaggcttctgcccgtgcctggagtctggaattcagaacgtcagcacctgcaggttcagtgcccccttgtttctctcccatcctcacttcctcaacgctgacccggttctggcagaagcggtgactggcctgcaccctaaccaggaggcacactccttgttcctggacatccacccggtcacgggaatccccatgaactgctctgtgaaactgcagctgagcctctacatgaaatctgtcgcaggcattggacaaactgggaagattgagcctgtggtcctgccgctgctctggtttgcagagagcggggccatggagggggagactcttcacacattctacactcagctggtgttgatgcccaaggtgatgcactatgcccagtacgtcctcctggcgctgggctgcgtcctgctgctggtccctgtcatctgccaaatccggagccaagtaggtgctggccagagggcagcccgggctgacagccattcgcttgcctgctgggggaaaggggcctcagatcggaccctctggccaaccgcagcctggagcccacctccagcagcagtcctgcgtctctgccggagtgggagcggtcactgctgggggctgcgcagcacgcttgcgtcttttgcatgccgcgttgccactactctgcctgttctggaaggcctgggaccctcccttggagggggcacaggtgggctttgagtaatgagacctggtacttgcatcatccattcatcaagtcagcacccggggatgccaggttctgttaggggcgaggggacgtacagcagtagaggagacagctgagatccctgctcagggggattgaggggggctggcatcccagccggggagacagatgaaaaccaagtaaatcagcagaaaagataatttcactcatgataggagctgtgaggggttagagccaaatagaaatacagcgtgagccacgtgtgaggttttcagtttaaattttctaatagccacttaacagtcaaaggaaacaggtggaattaattttaatcttatttaacccaaatatatgcaaagtattatcacttcaacatgtaatcagtataaacggc

SEQ ID NO: 37415 - DNA, 581 bp, Artificial Sequence
  derived and/or modified sequence
ctgcgtgcgctgccgtcccggatccaccgtgcctctgcggcctgcgtgcccggagtccccgcctgtgtcgtctctgtcgccgtccccgtctcctgccaggcgcggagccctgcgagccgcgggtgggccccaggcgcgcagacatgggctgctccgccaaagcgcgctgggctgccggggcgctgggcgtcgcggggctactgtgcgctgtgctgggcgctgtcatgatcgtgatggtgccgtcgctcatcaagcagcaggtccttaagaacgtgcgcatcgaccccagtagcctgtccttcaacatgtggaaggagatccctatccccttctatctctccgtctacttctttgacgtcatgaaccccagcgagatcctgaagggcgagaagccgcaggtgcgggagcgcgggccctacgtgtacagggagttcaggcacaaaagcaacatcaccttcaacaacaacgacaccgtgtccttcctcgagtaccgcaccttccagttccagccctccaagtcccacggctcggagagcgactacatcgtcatgcccaacatcctggtcttggtgaggctgccc

SEQ ID NO: 37416 - DNA, 1521 bp, Artificial Sequence
  derived and/or modified sequence
atgggctgcagcgccaaggccagatgggccgccggcgccctgggcgtggccggcctgctgtgcgccgtgctgggcgccgtgatgatcgtgatggtgcccagcctgatcaagcagcaggtgctgaagaacgtgagaatcgaccccagcagcctgagcttcaacatgtggaaggagatccccatccccttctacctgagcgtgtacttcttcgacgtgatgaaccccagcgagatcctgaagggcgagaagccccaggtgagagagagaggcccctacgtgtacagagagttcagacacaagagcaacatcaccttcaacaacaacgacaccgtgagcttcctggagtacagaaccttccagttccagcccagcaagagccacggcagcgagagcgactacatcgtgatgcccaacatcctggtgctgggcgccgccgtgatgatggagaacaagcccatgaccctgaagctgatcatgaccctggccttcaccaccctgggcgagagagccttcatgaacagaaccgtgggcgagatcatgtggggctacaaggaccccctggtgaacctgatcaacaagtacttccccggcatgttccccttcaaggacaagttcggcctgttcgccgagctgaacaacagcgacagcggcctgttcaccgtgttcaccggcgtgcagaacatcagcagaatccacctggtggacaagtggaacggcctgagcaaggtggacttctggcacagcgaccagtgcaacatgatcaacggcaccagcggccagatgtggccccccttcatgacccccgagagcagcctggagttctacagccccgaggcctgcagaagcatgaagctgatgtacaaggagagcggcgtgttcgagggcatccccacctacagattcgtggcccccaagaccctgttcgccaacggcagcatctacccccccaacgagggcttctgcccctgcctggagagcggcatccagaacgtgagcacctgcagattcagcgcccccctgttcctgagccacccccacttcctgaacgccgaccccgtgctggccgaggccgtgaccggcctgcaccccaaccaggaggcccacagcctgttcctggacatccaccccgtgaccggcatccccatgaactgcagcgtgaagctgcagctgagcctgtacatgaagagcgtggccggcatcggccagaccggcaagatcgagcccgtggtgctgcccctgctgtggttcgccgagagcggcgccatggagggcgagaccctgcacaccttctacacccagctggtgctgatgcccaaggtgatgcactacgcccagtacgtgctgctggccctgggctgcgtgctgctgctggtgcccgtgatctgccagatcagaagccagggccccgaggacaccgtgagccagcccggcctggccgccggccccgacagaccccccagcccctacacccccctgctgcccgacagccccagcggccagccccccagccccaccgcctag

SEQ ID NO: 37417 - DNA, 1659 bp, Artificial Sequence
  derived and/or modified sequence
atgggctgcagcgccaaggccagatgggccgccggcgccctgggcgtggccggcctgctgtgcgccgtgctgggcgccgtgatgatcgtgatggtgcccagcctgatcaagcagcaggtgctgaagaacgtgagaatcgaccccagcagcctgagcttcaacatgtggaaggagatccccatccccttctacctgagcgtgtacttcttcgacgtgatgaaccccagcgagatcctgaagggcgagaagccccaggtgagagagagaggcccctacgtgtacagagagttcagacacaagagcaacatcaccttcaacaacaacgacaccgtgagcttcctggagtacagaaccttccagttccagcccagcaagagccacggcagcgagagcgactacatcgtgatgcccaacatcctggtgctgggcgccgccgtgatgatggagaacaagcccatgaccctgaagctgatcatgaccctggccttcaccaccctgggcgagagagccttcatgaacagaaccgtgggcgagatcatgtggggctacaaggaccccctggtgaacctgatcaacaagtacttccccggcatgttccccttcaaggacaagttcggcctgttcgccgagctgaacaacagcgacagcggcctgttcaccgtgttcaccggcgtgcagaacatcagcagaatccacctggtggacaagtggaacggcctgagcaaggtggacttctggcacagcgaccagtgcaacatgatcaacggcaccagcggccagatgtggccccccttcatgacccccgagagcagcctggagttctacagccccgaggcctgcagaagcatgaagctgatgtacaaggagagcggcgtgttcgagggcatccccacctacagattcgtggcccccaagaccctgttcgccaacggcagcatctacccccccaacgagggcttctgcccctgcctggagagcggcatccagaacgtgagcacctgcagattcagcgcccccctgttcctgagccacccccacttcctgaacgccgaccccgtgctggccgaggccgtgaccggcctgcaccccaaccaggaggcccacagcctgttcctggacatccaccccgtgaccggcatccccatgaactgcagcgtgaagctgcagctgagcctgtacatgaagagcgtggccggcatcggccagaccggcaagatcgagcccgtggtgctgcccctgctgtggttcgccgagagcggcgccatggagggcgagaccctgcacaccttctacacccagctggtgctgatgcccaaggtgatgcactacgcccagtacgtgctgctggccctgggctgcgtgctgctgctggtgcccgtgatctgccagatcagaagccaggtgggcgccggccagagagccgccagagccgacagccacagcctggcctgctggggcaagggcgccagcgacagaaccctgtggcccaccgccgcctggagccccccccccgccgccgtgctgagactgtgcagaagcggcagcggccactgctggggcctgagaagcaccctggccagcttcgcctgcagagtggccaccaccctgcccgtgctggagggcctgggccccagcctgggcggcggcaccggcagctag

SEQ ID NO: 37418 - DNA, 1551 bp, Artificial Sequence
  derived and/or modified sequence
atgtgcgccgtgggcaacgtgagaatcgaccccagcagcctgagcttcaacatgtggaaggagatccccatccccttctacctgagcgtgtacttcttcgacgtgatgaaccccagcgagatcctgaagggcgagaagccccaggtgagagagagaggcccctacgtgtacagagagttcagacacaagagcaacatcaccttcaacaacaacgacaccgtgagcttcctggagtacagaaccttccagttccagcccagcaagagccacggcagcgagagcgactacatcgtgatgcccaacatcctggtgctgggcgccgccgtgatgatggagaacaagcccatgaccctgaagctgatcatgaccctggccttcaccaccctgggcgagagagccttcatgaacagaaccgtgggcgagatcatgtggggctacaaggaccccctggtgaacctgatcaacaagtacttccccggcatgttccccttcaaggacaagttcggcctgttcgccgagctgaacaacagcgacagcggcctgttcaccgtgttcaccggcgtgcagaacatcagcagaatccacctggtggacaagtggaacggcctgagcaaggtggacttctggcacagcgaccagtgcaacatgatcaacggcaccagcggccagatgtggccccccttcatgacccccgagagcagcctggagttctacagccccgaggcctgcagaagcatgaagctgatgtacaaggagagcggcgtgttcgagggcatccccacctacagattcgtggcccccaagaccctgttcgccaacggcagcatctacccccccaacgagggcttctgcccctgcctggagagcggcatccagaacgtgagcacctgcagattcagcgcccccctgttcctgagccacccccacttcctgaacgccgaccccgtgctggccgaggccgtgaccggcctgcaccccaaccaggaggcccacagcctgttcctggacatccaccccgtgaccggcatccccatgaactgcagcgtgaagctgcagctgagcctgtacatgaagagcgtggccggcatcggccagaccggcaagatcgagcccgtggtgctgcccctgctgtggttcgccgagagcggcgccatggagggcgagaccctgcacaccttctacacccagctggtgctgatgcccaaggtgatgcactacgcccagtacgtgctgctggccctgggctgcgtgctgctgctggtgcccgtgatctgccagatcagaagccaggtgggcgccggccagagagccgccagagccgacagccacagcctggcctgctggggcaagggcgccagcgacagaaccctgtggcccaccgccgcctggagccccccccccgccgccgtgctgagactgtgcagaagcggcagcggccactgctggggcctgagaagcaccctggccagcttcgcctgcagagtggccaccaccctgcccgtgctggagggcctgggccccagcctgggcggcggcaccggcggcctgtag

SEQ ID NO: 37419 - DNA, 1539 bp, Artificial Sequence
  derived and/or modified sequence
atgaacgtgagaatcgaccccagcagcctgagcttcaacatgtggaaggagatccccatccccttctacctgagcgtgtacttcttcgacgtgatgaaccccagcgagatcctgaagggcgagaagccccaggtgagagagagaggcccctacgtgtacagagagttcagacacaagagcaacatcaccttcaacaacaacgacaccgtgagcttcctggagtacagaaccttccagttccagcccagcaagagccacggcagcgagagcgactacatcgtgatgcccaacatcctggtgctgggcgccgccgtgatgatggagaacaagcccatgaccctgaagctgatcatgaccctggccttcaccaccctgggcgagagagccttcatgaacagaaccgtgggcgagatcatgtggggctacaaggaccccctggtgaacctgatcaacaagtacttccccggcatgttccccttcaaggacaagttcggcctgttcgccgagctgaacaacagcgacagcggcctgttcaccgtgttcaccggcgtgcagaacatcagcagaatccacctggtggacaagtggaacggcctgagcaaggtggacttctggcacagcgaccagtgcaacatgatcaacggcaccagcggccagatgtggccccccttcatgacccccgagagcagcctggagttctacagccccgaggcctgcagaagcatgaagctgatgtacaaggagagcggcgtgttcgagggcatccccacctacagattcgtggcccccaagaccctgttcgccaacggcagcatctacccccccaacgagggcttctgcccctgcctggagagcggcatccagaacgtgagcacctgcagattcagcgcccccctgttcctgagccacccccacttcctgaacgccgaccccgtgctggccgaggccgtgaccggcctgcaccccaaccaggaggcccacagcctgttcctggacatccaccccgtgaccggcatccccatgaactgcagcgtgaagctgcagctgagcctgtacatgaagagcgtggccggcatcggccagaccggcaagatcgagcccgtggtgctgcccctgctgtggttcgccgagagcggcgccatggagggcgagaccctgcacaccttctacacccagctggtgctgatgcccaaggtgatgcactacgcccagtacgtgctgctggccctgggctgcgtgctgctgctggtgcccgtgatctgccagatcagaagccaggtgggcgccggccagagagccgccagagccgacagccacagcctggcctgctggggcaagggcgccagcgacagaaccctgtggcccaccgccgcctggagccccccccccgccgccgtgctgagactgtgcagaagcggcagcggccactgctggggcctgagaagcaccctggccagcttcgcctgcagagtggccaccaccctgcccgtgctggagggcctgggccccagcctgggcggcggcaccggcggcctgtag

SEQ ID NO: 37420 - DNA, 441 bp, Artificial Sequence
  derived and/or modified sequence
atgggctgcagcgccaaggccagatgggccgccggcgccctgggcgtggccggcctgctgtgcgccgtgctgggcgccgtgatgatcgtgatggtgcccagcctgatcaagcagcaggtgctgaagaacgtgagaatcgaccccagcagcctgagcttcaacatgtggaaggagatccccatccccttctacctgagcgtgtacttcttcgacgtgatgaaccccagcgagatcctgaagggcgagaagccccaggtgagagagagaggcccctacgtgtacagagagttcagacacaagagcaacatcaccttcaacaacaacgacaccgtgagcttcctggagtacagaaccttccagttccagcccagcaagagccacggcagcgagagcgactacatcgtgatgcccaacatcctggtgctggtgagactgccctag

SEQ ID NO: 37421 - protein, 132 aa, Artificial Sequence
  derived and/or modified sequence
MAPSPRTGSRQDATALPSMSSTFWAFMILASLLIAYCSQLAAGTCEIVTLDRDSSQPRRTIARQTARCACRKGQIAGTTRARPACVDARIIKTKQWCDMLPCLEGEGCDLLINRSGWTCTQPGGRIKTTTVS

SEQ ID NO: 37422 - DNA, 1508 bp, Artificial Sequence
  derived and/or modified sequence
gggcccgggcgcggcggcggcggcggcggaggatggcgcgcgcggggcccgcacgtggaggccggcgcgggggcgcgggcagggccggctgctgagacgcgctgctgccccccgcgcgggcgccgcggcttcaatggcgccatcgcccaggaccggcagccggcaagatgcgaccgccctgcccagcatgtcctcaactttctgggcgttcatgatcctggccagcctgctcatcgcctactgcagtcagctggccgccggcacctgtgagattgtgaccttggaccgggacagcagccagcctcggaggacgatcgcccggcagaccgcccgctgtgcgtgtagaaaggggcagatcgccggcaccacgagagcccggcccgcctgtgtggacgcaagaatcatcaagaccaagcagtggtgtgacatgcttccgtgtctggagggggaaggctgcgacttgttaatcaaccggtcaggctggacgtgcacgcagcccggcgggaggataaagaccaccacggtctcctgacaaacacagcccctgaggggccccgggagtggccttggctccctggagagcccacgtctcagccacagttctccactcgcctcggacttcacccgttctctgccgcccgcccactccgtttccctgtggtccgtgaaggacggcctcaggccttggcatcctgagcttcggtctgtccagccgacccgaggaggccggactcagacacataggcggggggcggcacctggcatcagcaatacgcagtctgtgggagcccggccgcgcccagcccccgccgaccgtggcgttggccctgctgtcctcagaggaggaggaggaggaggcagctccggcagccacagaaggctgcagcccagcccgcctgagacacgacgcctgccccaggggactgtcaggcacagaagcggcctcctcccgtgccccagactgtccgaattgcttttattttcttatactttcagtatactccatagaccaaagagcaaaatctatctgaacctggacgcaccctcactgtcagggtccctggggtcgcttgtgcgggcgggagggcaatggtggcagagacatgctggtggccccggcggagcggagagggcggccgtggtggaggcctccaccccaggagcaccccgcgcaccctcggaggacgggcttcggctgcgcggaggccgtggcacacctgcgggaggcagcgacggcccccacgcagacgccgggaacgcaggccgctttattcctctgtacttagatcaacttgaccgtactaaaatccctttctgttttaaccagttaaacatgcctcttctacagctccatttttgatagttggataatccagtatctgccaagagcatgttgggtctcccgtgactgctgcctcatcgataccccatttagctccagaaagcaaagaaaactcgagtaacacttgtttgaaagagatcattaaatgtattttgcaaagcctaaa

SEQ ID NO: 37423 - DNA, 399 bp, Artificial Sequence
  derived and/or modified sequence
atggccccaagtcctcgcacaggcagtagacaggatgcaaccgctctcccgtctatgtctagcacgttctgggcatttatgatcctcgcttccttgctgattgcgtattgtagtcagctggctgctggcacgtgtgagatcgtgactctggaccgagatagctcccaaccacggcgaacaatcgccagacaaactgccagatgtgcgtgccgcaaaggacagatagctggcacaacaagggccaggccggcatgcgtggatgcgagaataattaagaccaagcagtggtgcgacatgcttccatgcctggaaggtgaaggctgcgatttactgatcaacaggtctggctggacatgcacccagcctgggggacgcattaagactaccaccgtcagctag

SEQ ID NO: 37424 - DNA, 399 bp, Artificial Sequence
  derived and/or modified sequence
atggcccccagtccaagaacgggttcgcgacaggatgccaccgcattgcctagtatgtcatccaccttctgggccttcatgatcctcgcctccttactcatagcatattgttcacaattagctgccggcacctgcgaaattgtgacgttagaccgtgatagctcccagccccgcaggacaatcgcacgccagacggccaggtgcgcctgtaggaagggccagattgctggtacgacccgcgcccgccccgcctgcgttgatgctcgcatcatcaagactaaacagtggtgcgacatgctgccatgtctagaaggagaaggatgtgatctgcttatcaatagatcaggttggacatgtacccagcccggaggaagaatcaaaacaacaaccgtgtcttag

SEQ ID NO: 37425 - DNA, 399 bp, Artificial Sequence
  derived and/or modified sequence
atggcaccctctccacgcaccggctcgaggcaagatgcaacagcacttccctctatgagttctacgttctgggcatttatgattctcgcctctcttctaatcgcctactgttcacagcttgcagctggaacctgcgaaatcgtcactctcgatcgggattcctcacaacctagaaggacgatcgccagacagactgcacggtgcgcttgtagaaagggccagatcgcaggaacaacaagggcccgccccgcttgtgttgacgccaggatcattaaaacaaagcaatggtgtgatatgttgccatgtctagaaggagaaggatgtgatctgcttatcaatagatcaggttggacatgtacccagcccggaggaagaatcaaaacaacaaccgtgtcttag

SEQ ID NO: 37426 - DNA, 399 bp, Artificial Sequence
  derived and/or modified sequence
atggcccccagccccagaaccggcagcagacaggacgccaccgccctgcccagcatgagcagcaccttctgggccttcatgatcctggccagcctgctgatcgcctactgcagccagctggccgccggcacctgcgagatcgtgaccctggacagagacagcagccagcccagaagaaccatcgccagacagaccgccagatgcgcctgcagaaagggccagatcgccggcaccaccagagccagacccgcctgcgtggacgccagaatcatcaagaccaagcagtggtgcgacatgctgccctgcctggagggcgagggctgcgacctgctgatcaacagaagcggctggacctgcacccagcccggcggcagaatcaagaccaccaccgtgagctag

SEQ ID NO: 37427 - DNA, 399 bp, Artificial Sequence
  derived and/or modified sequence
atggcaccctcaccgcggactggctcccgacaggacgcgaccgcccttcccagcatgagctctacgttctgggcctttatgattctcgcttccctgttgattgcgtactgctcacagctggccgcaggaacttgcgaaattgtgacgctggatagagactcatcccagccacggaggactattgctagacagacagctaggtgtgcatgccgaaagggccagatcgccggaaccactagagcccggcccgcttgcgtcgacgcaagaataattaagacaaaacagtggtgcgacatgcttccatgcctcgaaggcgaaggttgcgacctcctgatcaaccgaagcgggtggacctgtacgcagccaggtggcagaatcaagaccacgacagtctcctag

SEQ ID NO: 37428 - DNA, 399 bp, Artificial Sequence
  derived and/or modified sequence
atggcccccagccccaggacaggcagccggcaggatgccacagccctgcccagcatgagcagcaccttctgggccttcatgatcctggccagcctgctgattgcctactgcagccagctggccgccggcacctgtgaaattgtgaccctggaccgggacagcagccagcccaggaggaccatcgcccggcagacagcccgctgtgcctgcaggaagggccagattgctggcaccacccgggcccggcctgcctgtgtggatgcccgcatcatcaagaccaagcagtggtgtgacatgctgccctgcctggagggggagggctgtgacctgctgatcaacagaagtggctggacctgcacccagcccggcggccgcatcaagaccaccaccgtgtcctag

SEQ ID NO: 37429 - DNA, 399 bp, Artificial Sequence
  derived and/or modified sequence
atggcccccagcccccggaccggcagccggcaggacgccaccgccttgcctagcatgtctagtaccttctgggcctttatgatccttgcctcactgctgatcgcctactgcagtcagctggcggctggcacgtgcgaaatcgtcacgcttgaccgcgactcttcccaaccccggaggactattgcgcgccagacagcccgctgcgcatgcagaaagggacagattgcaggtaccactcgtgcaagacccgcttgcgtggatgcaaggatcatcaaaacgaagcagtggtgtgatatgctaccgtgcctggaaggagaggggtgtgatttactaattaatcggtctggatggacctgcacacagccgggcggaagaattaaaactacgacagtgtcttag

SEQ ID NO: 37430 - RNA, 399 nt, Artificial Sequence
  derived and/or modified sequence
auggcccccaguccaagaacggguucgcgacaggaugccaccgcauugccuaguaugucauccaccuucugggccuucaugauccucgccuccuuacucauagcauauuguucacaauuagcugccggcaccugcgaaauugugacguuagaccgugauagcucccagccccgcaggacaaucgcacgccagacggccaggugcgccuguaggaagggccagauugcugguacgacccgcgcccgccccgccugcguugaugcucgcaucaucaagacuaaacaguggugcgacaugcugccaugucuagaaggagaaggaugugaucugcuuaucaauagaucagguuggacauguacccagcccggaggaagaaucaaaacaacaaccgugucuuag

SEQ ID NO: 37431 - RNA, 399 nt, Artificial Sequence
  derived and/or modified sequence
auggcacccucuccacgcaccggcucgaggcaagaugcaacagcacuucccucuaugaguucuacguucugggcauuuaugauucucgccucucuucuaaucgccuacuguucacagcuugcagcuggaaccugcgaaaucgucacucucgaucgggauuccucacaaccuagaaggacgaucgccagacagacugcacggugcgcuuguagaaagggccagaucgcaggaacaacaagggcccgccccgcuuguguugacgccaggaucauuaaaacaaagcaauggugugauauguugccaugucuagaaggagaaggaugugaucugcuuaucaauagaucagguuggacauguacccagcccggaggaagaaucaaaacaacaaccgugucuuag

SEQ ID NO: 37432 - protein, 690 aa, Artificial Sequence
  derived and/or modified sequence
MRQTGGGATTDSASPVLNNVIKSQSYFTAKRVGLGNNSYLGVGRPSSQQWLSLPGPGGQGPKAKKSGSKKKKVTKAERLKLLQEEEERRLKEEEEARLKYEKEEMERLEIQRIEKEKWHRLEAKDLERRNEELEELYLLERCFPEAEKLKQETKLLSQWKHYIQCDGSPDPSVAQEMNTFISLWKEKTNETFEEVIEKSKVVLNLIEKLKFILLETPPCDLQDKNIIQYQESILQLQELLHLKFGVATEILLKQASTLADLDSGNMEKVIKDENVTLYVWANLKKNPRHRSVRFSETQIGFEIPRILATSDIAVRLLHTHYDHVSALHPVSTPSKEYTSAVTELVKDDVKNVEKAISKEVEEESKQQERGSHLIQEEEIKVEEEQGDIEVKMSSAEEESEAIKCEREMKVLSETVSAAQLLLVENSSEKPDFFEDNVVDLCQFTTLGGVYHLDILELPPQCKPVKGWMIVEILKEGLQKYTYPPETTEEFETENAFPPIEVTLEVHENVIFFEDPVVVRWDAEGKHWRTDGISNVSYKPKERLVTFSLDTFGPVTLIQDAHINMPYQSWELRPLDVNKVLLTVTTVFTEIQIQIKENLCMLSSIKLKDKKHISILEGTWMTPIPFIIALKEAGLNIFPTRHSHFYVIINNKVPLVEVKAYRQMALLSSAFAFGWSKWNLLCNSTKVVFKW

SEQ ID NO: 37433 - protein, 514 aa, Artificial Sequence
  derived and/or modified sequence
MNTFISLWKEKTNETFEEVIEKSKVVLNLIEKLKFILLETPPCDLQDKNIIQYQESILQLQELLHLKFGVATEILLKQASTLADLDSGNMEKVIKDENVTLYVWANLKKNPRHRSVRFSETQIGFEIPRILATSDIAVRLLHTHYDHVSALHPVSTPSKEYTSAVTELVKDDVKNVEKAISKEVEEESKQQERGSHLIQEEEIKVEEEQGDIEVKMSSAEEESEAIKCEREMKVLSETVSAAQLLLVENSSEKPDFFEDNVVDLCQFTTLGGVYHLDILELPPQCKPVKGWMIVEILKEGLQKYTYPPETTEEFETENAFPPIEVTLEVHENVIFFEDPVVVRWDAEGKHWRTDGISNVSYKPKERLVTFSLDTFGPVTLIQDAHINMPYQSWELRPLDVNKVLLTVTTVFTEIQIQIKENLCMLSSIKLKDKKHISILEGTWMTPIPFIIALKEAGLNIFPTRHSHFYVIINNKVPLVEVKAYRQMALLSSAFAFGWSKWNLLCNSTKVVFKW

SEQ ID NO: 37434 - DNA, 2073 bp, Artificial Sequence
  derived and/or modified sequence
atgagacagaccggcggcggcgccaccaccgacagcgccagccccgtgctgaacaacgtgatcaagagccagagctacttcaccgccaagagagtgggcctgggcaacaacagctacctgggcgtgggcagacccagcagccagcagtggctgagcctgcccggccccggcggccagggccccaaggccaagaagagcggcagcaagaagaagaaggtgaccaaggccgagagactgaagctgctgcaggaggaggaggagagaagactgaaggaggaggaggaggccagactgaagtacgagaaggaggagatggagagactggagatccagagaatcgagaaggagaagtggcacagactggaggccaaggacctggagagaagaaacgaggagctggaggagctgtacctgctggagagatgcttccccgaggccgagaagctgaagcaggagaccaagctgctgagccagtggaagcactacatccagtgcgacggcagccccgaccccagcgtggcccaggagatgaacaccttcatcagcctgtggaaggagaagaccaacgagaccttcgaggaggtgatcgagaagagcaaggtggtgctgaacctgatcgagaagctgaagttcatcctgctggagacccccccctgcgacctgcaggacaagaacatcatccagtaccaggagagcatcctgcagctgcaggagctgctgcacctgaagttcggcgtggccaccgagatcctgctgaagcaggccagcaccctggccgacctggacagcggcaacatggagaaggtgatcaaggacgagaacgtgaccctgtacgtgtgggccaacctgaagaagaaccccagacacagaagcgtgagattcagcgagacccagatcggcttcgagatccccagaatcctggccaccagcgacatcgccgtgagactgctgcacacccactacgaccacgtgagcgccctgcaccccgtgagcacccccagcaaggagtacaccagcgccgtgaccgagctggtgaaggacgacgtgaagaacgtggagaaggccatcagcaaggaggtggaggaggagagcaagcagcaggagagaggcagccacctgatccaggaggaggagatcaaggtggaggaggagcagggcgacatcgaggtgaagatgagcagcgccgaggaggagagcgaggccatcaagtgcgagagagagatgaaggtgctgagcgagaccgtgagcgccgcccagctgctgctggtggagaacagcagcgagaagcccgacttcttcgaggacaacgtggtggacctgtgccagttcaccaccctgggcggcgtgtaccacctggacatcctggagctgcccccccagtgcaagcccgtgaagggctggatgatcgtggagatcctgaaggagggcctgcagaagtacacctacccccccgagaccaccgaggagttcgagaccgagaacgccttcccccccatcgaggtgaccctggaggtgcacgagaacgtgatcttcttcgaggaccccgtggtggtgagatgggacgccgagggcaagcactggagaaccgacggcatcagcaacgtgagctacaagcccaaggagagactggtgaccttcagcctggacaccttcggccccgtgaccctgatccaggacgcccacatcaacatgccctaccagagctgggagctgagacccctggacgtgaacaaggtgctgctgaccgtgaccaccgtgttcaccgagatccagatccagatcaaggagaacctgtgcatgctgagcagcatcaagctgaaggacaagaagcacatcagcatcctggagggcacctggatgacccccatccccttcatcatcgccctgaaggaggccggcctgaacatcttccccaccagacacagccacttctacgtgatcatcaacaacaaggtgcccctggtggaggtgaaggcctacagacagatggccctgctgagcagcgccttcgccttcggctggagcaagtggaacctgctgtgcaacagcaccaaggtggtgttcaagtggtag

SEQ ID NO: 37435 - DNA, 1311 bp, Artificial Sequence
  derived and/or modified sequence
atggagagactggagatccagagaatcgagaaggagaagtggcacagactggaggccaaggacctggagagaagaaacgaggagctggaggagctgtacctgctggagagatgcttccccgaggccgagaagctgaagcaggagaccaagctgctgagccagtggaagcactacatccagtgcgacggcagccccgaccccagcgtggcccaggagatgaacaccttcatcagcctgtggaaggagtacaccagcgccgtgaccgagctggtgaaggacgacgtgaagaacgtggagaaggccatcagcaaggaggtggaggaggagagcaagcagcaggagagaggcagccacctgatccaggaggaggagatcaaggtggaggaggagcagggcgacatcgaggtgaagatgagcagcgccgaggaggagagcgaggccatcaagtgcgagagagagatgaaggtgctgagcgagaccgtgagcgccgcccagctgctgctggtggagaacagcagcgagaagcccgacttcttcgaggacaacgtggtggacctgtgccagttcaccaccctgggcggcgtgtaccacctggacatcctggagctgcccccccagtgcaagcccgtgaagggctggatgatcgtggagatcctgaaggagggcctgcagaagtacacctacccccccgagaccaccgaggagttcgagaccgagaacgccttcccccccatcgaggtgaccctggaggtgcacgagaacgtgatcttcttcgaggaccccgtggtggtgagatgggacgccgagggcaagcactggagaaccgacggcatcagcaacgtgagctacaagcccaaggagagactggtgaccttcagcctggacaccttcggccccgtgaccctgatccaggacgcccacatcaacatgccctaccagagctgggagctgagacccctggacgtgaacaaggtgctgctgaccgtgaccaccgtgttcaccgagatccagatccagatcaaggagaacctgtgcatgctgagcagcatcaagctgaaggacaagaagcacatcagcatcctggagggcacctggatgacccccatccccttcatcatcgccctgaaggaggccggcctgaacatcttccccaccagacacagccacttctacgtgatcatcaacaacaaggtgcccctggtggaggtgaaggcctacagacagatggccctgctgagcagcgccttcgccttcggctggagcaagtggaacctgctgtgcaacagcaccaaggtggtgttcaagtggtag

SEQ ID NO: 37436 - DNA, 1545 bp, Artificial Sequence
  derived and/or modified sequence
atgaacaccttcatcagcctgtggaaggagaagaccaacgagaccttcgaggaggtgatcgagaagagcaaggtggtgctgaacctgatcgagaagctgaagttcatcctgctggagacccccccctgcgacctgcaggacaagaacatcatccagtaccaggagagcatcctgcagctgcaggagctgctgcacctgaagttcggcgtggccaccgagatcctgctgaagcaggccagcaccctggccgacctggacagcggcaacatggagaaggtgatcaaggacgagaacgtgaccctgtacgtgtgggccaacctgaagaagaaccccagacacagaagcgtgagattcagcgagacccagatcggcttcgagatccccagaatcctggccaccagcgacatcgccgtgagactgctgcacacccactacgaccacgtgagcgccctgcaccccgtgagcacccccagcaaggagtacaccagcgccgtgaccgagctggtgaaggacgacgtgaagaacgtggagaaggccatcagcaaggaggtggaggaggagagcaagcagcaggagagaggcagccacctgatccaggaggaggagatcaaggtggaggaggagcagggcgacatcgaggtgaagatgagcagcgccgaggaggagagcgaggccatcaagtgcgagagagagatgaaggtgctgagcgagaccgtgagcgccgcccagctgctgctggtggagaacagcagcgagaagcccgacttcttcgaggacaacgtggtggacctgtgccagttcaccaccctgggcggcgtgtaccacctggacatcctggagctgcccccccagtgcaagcccgtgaagggctggatgatcgtggagatcctgaaggagggcctgcagaagtacacctacccccccgagaccaccgaggagttcgagaccgagaacgccttcccccccatcgaggtgaccctggaggtgcacgagaacgtgatcttcttcgaggaccccgtggtggtgagatgggacgccgagggcaagcactggagaaccgacggcatcagcaacgtgagctacaagcccaaggagagactggtgaccttcagcctggacaccttcggccccgtgaccctgatccaggacgcccacatcaacatgccctaccagagctgggagctgagacccctggacgtgaacaaggtgctgctgaccgtgaccaccgtgttcaccgagatccagatccagatcaaggagaacctgtgcatgctgagcagcatcaagctgaaggacaagaagcacatcagcatcctggagggcacctggatgacccccatccccttcatcatcgccctgaaggaggccggcctgaacatcttccccaccagacacagccacttctacgtgatcatcaacaacaaggtgcccctggtggaggtgaaggcctacagacagatggccctgctgagcagcgccttcgccttcggctggagcaagtggaacctgctgtgcaacagcaccaaggtggtgttcaagtggtag

SEQ ID NO: 37437 - DNA, 2073 bp, Artificial Sequence
  derived and/or modified sequence
atgagacagacaggaggcggcgctacaacagatagtgcatcacccgtgttgaataatgtgatcaagtcacagtcatactttaccgccaaacgcgtgggactggggaacaactcctatctgggagtcggcagaccaagcagtcagcagtggctgagtctgccaggcccaggcggccaggggccaaaggcaaagaagtcaggctctaaaaagaagaaagtgacaaaggccgaacgactgaagctgctgcaggaagaggaggagcgtcggcttaaggaagaggaggaggctcgactgaaatatgagaaggaagagatggagaggctcgagatccaacgcatcgagaaagagaagtggcatcgcctggaggccaaagatctggaacgccggaatgaagaactggaggagctctatttgttggagcgttgttttcccgaggccgaaaaactgaagcaggaaaccaagctattgagccagtggaaacattacatccagtgtgatggttcgcccgatcccagtgttgctcaggagatgaacacttttatttccctgtggaaagagaagacaaacgagacttttgaggaggtgatcgagaagagtaaggtggtactcaatctgatcgagaagctgaagttcatcctgcttgagacccccccgtgcgatcttcaggacaaaaatatcatacagtatcaggagagcatcctacaactacaggaactgctacacctcaagttcggcgtcgctacagaaattctgctgaagcaggcgagcacactcgcagacttggacagtggaaatatggagaaggtcattaaggacgagaacgtgacactgtatgtgtgggctaacctgaagaagaatcctagacaccggtccgtccgcttctcagagactcagatcggctttgaaattccccggatcctggccacatctgatattgccgtgcggctgctgcacacccactatgatcatgtgtccgccctccatccagtgagtacaccatcgaaggaatacaccagcgctgtgacagaacttgtgaaagatgatgtaaaaaatgtggagaaggccatcagcaaagaagtggaggaggagagcaaacagcaggagcgcggcagccatctgattcaggaggaggagattaaggtagaggaggagcagggggacatcgaagtgaagatgtcgagtgccgaggaggagtcggaggcaatcaaatgtgagagagagatgaaggtgctatcagagaccgtaagtgccgcacagctcctactggtcgaaaactcctcagaaaaaccagatttctttgaagataatgtggttgacctgtgtcagtttactacattaggcggagtgtatcatctcgatatattggaacttcctccacagtgtaagcccgtaaagggatggatgattgtggaaatacttaaagagggactgcaaaagtatacgtacccaccggaaaccacagaggaatttgaaaccgaaaatgcattcccacctattgaggtcacactagaggtgcacgaaaacgtgatatttttcgaagacccggtggtggttagatgggacgcagaggggaaacactggaggaccgatggaattagcaatgtatcttacaagccaaaagagcgactggtgactttctccctggatacgttcgggccagtcacactgattcaagatgcccatataaatatgccctaccaatcctgggaactcagaccgctggacgtgaataaggttctcctaaccgttacaactgtttttacggagattcagattcagatcaaggaaaacctctgcatgttaagtagcatcaagctgaaagacaagaagcacatttcaatactcgagggaacttggatgactccaatcccctttatcattgcacttaaggaagctggtctcaatatattccccacccggcactcccacttctacgtaatcattaacaataaagtccctctggtcgaagttaaggcataccggcagatggcgctcctgtcctccgcttttgcttttggctggtcaaaatggaacctactgtgtaacagcaccaaagttgttttcaagtggtag

SEQ ID NO: 37438 - DNA, 1311 bp, Artificial Sequence
  derived and/or modified sequence
atggaacggctggaaatccagagaattgagaaagagaaatggcatagactggaagcaaaagacctggagagaaggaacgaagaactcgaggaactctatctgctggagaggtgttttcctgaggcagagaaacttaagcaggagactaagctcttgagccaatggaaacattacatccaatgcgacggatcccctgatccctcagtggctcaggagatgaatacctttatctctttatggaaggagtatacatccgctgtgacagagttagttaaagacgatgtcaagaacgttgagaaagcaatctctaaagaggtagaggaagagagcaagcagcaagagagaggtagtcatctgattcaggaggaagaaattaaggtggaggaggaacaaggcgacatcgaggtcaaaatgtctagcgctgaagaggagtccgaggcaatcaagtgcgagcgggagatgaaggtgctatccgaaaccgtgtccgcggcacagttactgttagttgagaatagctccgagaaaccggacttttttgaggataatgtggtggacctctgccagttcacaacccttggaggggtctaccatcttgatattcttgagctcccaccccagtgcaagcctgtgaaggggtggatgattgtggagatcctgaaggagggattgcagaaatatacttaccctccggagactactgaggaattcgagacagaaaacgcgtttccccctatcgaagtaactctggaggtgcacgagaacgtcatattttttgaggaccccgtcgtggttcgatgggacgccgagggcaaacattggaggaccgacggaattagcaacgtgtcgtataagcctaaggagcgcctggtgacattcagcttggacacttttggcccagtaacgctgattcaggatgctcacattaatatgccctaccaaagttgggaattgcggccgctggatgtcaataaggtgttgctgacagtgactaccgtcttcactgaaattcagatccagattaaagaaaatctgtgtatgctttcctctataaaattgaaggataaaaaacacatctcaattctggagggtacatggatgacccccattccctttattattgcgcttaaggaggcaggactcaatatcttccccaccaggcatagccatttttacgtgatcattaacaacaaagtcccactggtggaggtgaaagcatatcgtcaaatggccctgctttctagtgccttcgctttcgggtggagcaagtggaatctgctctgcaatagtactaaggtcgtgttcaaatggtag

SEQ ID NO: 37439 - DNA, 1545 bp, Artificial Sequence
  derived and/or modified sequence
atgaacacctttatatcactgtggaaggaaaagactaatgaaacctttgaggaagtcatcgagaagtcaaaggttgtgctaaatctgattgagaagttaaagttcattttgctagaaaccccaccctgtgacctccaagacaagaacattattcagtatcaggaaagcatattacagcttcaagaattgctgcacctcaagtttggtgtcgctacagaaatcctgctcaaacaggctagcaccctagccgacttagacagcgggaatatggaaaaggtgattaaggatgaaaatgtaacactctacgtatgggcaaacctcaaaaaaaacccacggcaccgatcagtgcggttctcggagacccaaattgggttcgagatacccagaatcctcgcgacatctgacattgcagtccggctcctccatactcactacgaccacgtctccgctttgcaccccgtgtccacaccttctaaggagtatacttctgccgtgacagaattggtcaaagatgatgtgaaaaatgtcgaaaaagccatctccaaggaggtggaagaggagtcaaagcagcaggagagaggatcccacctaatccaggaggaagaaattaaagtcgaagaggagcaaggagatattgaggtaaagatgtcgagcgccgaggaagaaagtgaagccatcaaatgcgagcgggagatgaaagtgttgagtgaaacagtgtctgccgcccagctgctcctggtagagaacagttcagagaagcccgatttttttgaagacaacgtggtcgatctctgtcaatttaccacactgggcggcgtataccatcttgatatcctggaactgcctccccagtgtaagccagtgaaaggctggatgattgttgagatactcaaggaagggctacaaaagtatacctatccacccgaaactactgaagaattcgagacagagaacgcattcccccccattgaagtcactctcgaggttcacgagaacgttattttctttgaagatccagttgtcgtccgctgggacgccgaaggaaagcactggagaacagatgggatctcaaatgtgtcctataaaccgaaagagcggctggtcactttttccctggacacattcggacctgtcacactgatccaggatgcgcatattaatatgccatatcaatcctgggagctgcgtccgctggacgtgaacaaagttctattaacagtgacaactgtttttaccgaaattcagatacaaataaaagagaatctctgcatgctcagttccattaagcttaaagacaagaagcacattagtatcttggagggaacctggatgacccccattccattcatcatcgccctgaaggaggcagggttgaatatctttccaacccgccactctcatttttacgtgatcatcaataataaggtccccttggtagaagtgaaagcctatcgccaaatggctctgctcagttccgcctttgcctttggctggtcaaaatggaatctgctgtgcaatagtaccaaagtggtctttaaatggtag

SEQ ID NO: 37440 - DNA, 2073 bp, Artificial Sequence
  derived and/or modified sequence
atgaggcagacaggaggaggagccaccacagacagcgccagccctgtgctgaacaacgtcatcaagagccagagctacttcaccgccaagagggtgggcctgggcaacaacagctacctgggcgtgggccggcccagcagccagcagtggctgagcctgcccggccctgggggccagggccccaaggccaagaagagcggcagcaagaagaagaaggtgaccaaggccgagcggctgaagctgctgcaggaggaggaggagcggcggctgaaggaggaggaggaggcccggctgaagtatgagaaggaggagatggagcggctggagatccagagaattgagaaggagaagtggcaccggctggaggccaaggacctggagaggagaaatgaggagctggaggagctgtacctgctggagcgctgcttccctgaggccgagaagctgaagcaggagaccaagctgctgagccagtggaagcactacatccagtgtgatggcagcccagaccccagcgtggcccaggagatgaacaccttcatcagcctgtggaaggagaagaccaatgagacctttgaggaggtgattgagaagagcaaggtggtgctgaacctgattgagaagctgaagttcatcctgctggagaccccaccctgtgacctgcaggacaagaacatcatccagtaccaggagagcatcctgcagctgcaggagctgctgcacctgaagtttggagtggccacagagatcctgctgaagcaggccagcaccctggccgacctggacagcggcaacatggagaaggtgatcaaggatgaaaatgtgaccctgtatgtgtgggccaacctgaagaagaaccccaggcacaggtctgtgcgcttcagcgagacccagattggatttgagatcccccgcatcctggccaccagtgacattgctgtgcggctgctgcacacccactatgaccacgtgtctgccctgcaccctgtgtccacccccagcaaggagtacaccagcgctgtgacagagctggtgaaggatgatgtgaagaatgtggagaaggccatcagcaaggaggtggaggaggagagcaagcagcaggagcggggcagccacctgatccaggaggaggagatcaaggtggaggaggagcagggcgacatcgaggtgaagatgagcagcgctgaggaggagagcgaggccatcaagtgtgagcgggagatgaaggtgctgtctgagaccgtgtctgctgcccagctgctgctggtggagaacagcagcgagaagccagacttctttgaggacaacgtggtggacctgtgccagttcaccaccctgggcggcgtgtaccacctggacatcctggagctgcccccccagtgcaagcctgtgaagggctggatgattgtggagatcctgaaggagggcctgcagaagtacacctacccacctgagaccacagaggagtttgaaacagaaaatgccttcccccccatcgaggtgaccctggaggtgcatgaaaatgtcatcttctttgaagatcctgtggtggtgcgctgggatgctgagggcaagcactggaggacagatggcatcagcaatgtgtcctacaagcccaaggagcggctggtgaccttcagcctggacacctttggacctgtgaccctcatccaggatgcccacatcaacatgccctaccagagctgggagctgcggcccctggatgtgaacaaggtgctgctgactgtgaccaccgtcttcacagagatccagatccagatcaaggagaacctgtgcatgctgagcagcatcaagctgaaggacaagaagcacatcagcatcctggagggcacctggatgacccccatccccttcatcatcgccctgaaggaggccggcctgaacatcttccccaccaggcacagccacttctacgtgatcatcaacaacaaggtgcccctggtggaggtgaaggcctaccggcagatggccctgctgagcagcgcctttgccttcggctggagcaagtggaacctgctgtgcaacagcaccaaggtggtgttcaagtggtag

SEQ ID NO: 37441 - DNA, 1311 bp, Artificial Sequence
  derived and/or modified sequence
atggagcggctggagatccagagaattgagaaggagaagtggcaccggctggaggccaaggacctggagaggagaaatgaggagctggaggagctgtacctgctggagcgctgcttccctgaggccgagaagctgaagcaggagaccaagctgctgagccagtggaagcactacatccagtgtgatggcagcccagaccccagcgtggcccaggagatgaacaccttcatcagcctgtggaaggagtacaccagcgctgtgacagagctggtgaaggatgatgtgaagaatgtggagaaggccatcagcaaggaggtggaggaggagagcaagcagcaggagcggggcagccacctgatccaggaggaggagatcaaggtggaggaggagcagggcgacatcgaggtgaagatgagcagcgctgaggaggagagcgaggccatcaagtgtgagcgggagatgaaggtgctgtctgagaccgtgtctgctgcccagctgctgctggtggagaacagcagcgagaagccagacttctttgaggacaacgtggtggacctgtgccagttcaccaccctgggcggcgtgtaccacctggacatcctggagctgcccccccagtgcaagcctgtgaagggctggatgattgtggagatcctgaaggagggcctgcagaagtacacctacccacctgagaccacagaggagtttgaaacagaaaatgccttcccccccatcgaggtgaccctggaggtgcatgaaaatgtcatcttctttgaagatcctgtggtggtgcgctgggatgctgagggcaagcactggaggacagatggcatcagcaatgtgtcctacaagcccaaggagcggctggtgaccttcagcctggacacctttggacctgtgaccctcatccaggatgcccacatcaacatgccctaccagagctgggagctgcggcccctggatgtgaacaaggtgctgctgactgtgaccaccgtcttcacagagatccagatccagatcaaggagaacctgtgcatgctgagcagcatcaagctgaaggacaagaagcacatcagcatcctggagggcacctggatgacccccatccccttcatcatcgccctgaaggaggccggcctgaacatcttccccaccaggcacagccacttctacgtgatcatcaacaacaaggtgcccctggtggaggtgaaggcctaccggcagatggccctgctgagcagcgcctttgccttcggctggagcaagtggaacctgctgtgcaacagcaccaaggtggtgttcaagtggtag

SEQ ID NO: 37442 - DNA, 1545 bp, Artificial Sequence
  derived and/or modified sequence
atgaacaccttcatcagcctgtggaaggagaagaccaatgagacctttgaggaggtgattgagaagagcaaggtggtgctgaacctgattgagaagctgaagttcatcctgctggagaccccaccctgtgacctgcaggacaagaacatcatccagtaccaggagagcatcctgcagctgcaggagctgctgcacctgaagtttggagtggccacagagatcctgctgaagcaggccagcaccctggccgacctggacagcggcaacatggagaaggtgatcaaggatgaaaatgtgaccctgtatgtgtgggccaacctgaagaagaaccccaggcacaggtctgtgcgcttcagcgagacccagattggatttgagatcccccgcatcctggccaccagtgacattgctgtgcggctgctgcacacccactatgaccacgtgtctgccctgcaccctgtgtccacccccagcaaggagtacaccagcgctgtgacagagctggtgaaggatgatgtgaagaatgtggagaaggccatcagcaaggaggtggaggaggagagcaagcagcaggagcggggcagccacctgatccaggaggaggagatcaaggtggaggaggagcagggcgacatcgaggtgaagatgagcagcgctgaggaggagagcgaggccatcaagtgtgagcgggagatgaaggtgctgtctgagaccgtgtctgctgcccagctgctgctggtggagaacagcagcgagaagccagacttctttgaggacaacgtggtggacctgtgccagttcaccaccctgggcggcgtgtaccacctggacatcctggagctgcccccccagtgcaagcctgtgaagggctggatgattgtggagatcctgaaggagggcctgcagaagtacacctacccacctgagaccacagaggagtttgaaacagaaaatgccttcccccccatcgaggtgaccctggaggtgcatgaaaatgtcatcttctttgaagatcctgtggtggtgcgctgggatgctgagggcaagcactggaggacagatggcatcagcaatgtgtcctacaagcccaaggagcggctggtgaccttcagcctggacacctttggacctgtgaccctcatccaggatgcccacatcaacatgccctaccagagctgggagctgcggcccctggatgtgaacaaggtgctgctgactgtgaccaccgtcttcacagagatccagatccagatcaaggagaacctgtgcatgctgagcagcatcaagctgaaggacaagaagcacatcagcatcctggagggcacctggatgacccccatccccttcatcatcgccctgaaggaggccggcctgaacatcttccccaccaggcacagccacttctacgtgatcatcaacaacaaggtgcccctggtggaggtgaaggcctaccggcagatggccctgctgagcagcgcctttgccttcggctggagcaagtggaacctgctgtgcaacagcaccaaggtggtgttcaagtggtag

SEQ ID NO: 37443 - DNA, 2073 bp, Artificial Sequence
  derived and/or modified sequence
atgcggcagaccggcggcggcgccaccaccgacagcgccagccccgtgctgaataacgtcattaagagccagagttacttcaccgctaaaagagttggccttggtaacaatagttacttaggagtgggcaggccctccagtcagcagtggctgagcctcccgggccccggcgggcagggcccaaaagccaaaaaaagtggatccaagaagaagaaagtcactaaggccgagcgcctcaaattactgcaggaggaggaagagcgcaggctcaaggaagaggaggaggctcgcctgaagtatgagaaggaagagatggaaaggttagagattcaacggatcgagaaggaaaagtggcaccgcttagaggctaaggatctcgagagaaggaacgaggagttggaggagttgtatctgctggagagatgcttccccgaagccgaaaagttgaagcaagagaccaaactcctgtctcagtggaaacattatattcaatgcgacggatcacctgacccctcagtggcgcaagaaatgaacaccttcatttccctatggaaagaaaagactaacgaaaccttcgaggaagttatcgagaaaagtaaggttgtcctgaacctgattgagaagctgaagttcatcttgctcgaaaccccaccatgcgacctacaggacaagaacataatccagtatcaggagagcatcctgcagttgcaggagctgctgcaccttaagttcggggtcgctacggagatcctgcttaaacaggcttccacactggccgacttggattctggcaatatggagaaggtgatcaaagacgaaaacgtaaccctatatgtctgggcaaatttgaaaaagaacccgaggcatagatctgttcgtttctcagagacgcagattggcttcgaaatccctcgcatattggcaacctccgacatcgcagtccgtctgctccatacccactacgaccatgtgtccgctctccaccctgtgagtaccccgagtaaggaatatactagtgctgtgaccgagctagtgaaagatgacgtcaagaatgtggaaaaagctatctctaaggaggtggaggaggaatcaaagcagcaggaacggggctcccacctgatacaggaggaagagatcaaggtagaagaagagcagggagacattgaggtgaagatgagcagcgctgaggaagagtccgaggcgataaagtgtgagcgtgagatgaaggtcctgagcgagactgtgagcgcagctcagctgctcctggttgaaaacagctcggaaaagccagatttcttcgaagataacgttgtggatttgtgccagtttacaacgctcggaggggtgtaccacttggacattctggagctgccccctcaatgtaagcccgtgaagggttggatgatcgtggagatactgaaagaggggctgcaaaagtatacctaccctcctgagaccacggaagagtttgaaacggagaacgcctttcccccaatcgaagtaactctggaggttcacgagaacgtcatttttttcgaggaccccgttgttgtgaggtgggacgccgagggaaagcactggaggactgacggcatatccaacgtgtcctacaaaccgaaggagaggctcgttacttttagtctggatacttttgggcccgtgacgctgatacaggatgcccacattaatatgccctatcagtcctgggagctgcgacccctggacgttaataaggttcttctgacggtcaccacagtttttacagagatccagattcagataaaggagaacctatgtatgctaagcagcatcaaactaaaggataaaaagcatatcagcatcctcgagggcacctggatgacacccataccgttcataattgccctgaaggaagccggcctaaatatcttccccacacggcacagccatttttacgtaatcataaataacaaggtacccctggtggaggtgaaggcttacaggcagatggcactcctctccagcgcatttgctttcgggtggagtaagtggaatctcctctgcaactcaaccaaagtggtcttcaaatggtag

SEQ ID NO: 37444 - DNA, 1311 bp, Artificial Sequence
  derived and/or modified sequence
atggagcggctggagatccagcggatcgagaaggagaagtggcaccggctggaagctaaggacctagagcgacgaaatgaagaactggaggagctctacttgctggaaagatgtttccccgaagctgaaaagctgaaacaggagaccaaattgctaagtcagtggaagcattatatccagtgcgatggaagcccagacccatccgtagcacaggaaatgaatacctttatttcactttggaaggaatacacatccgctgtgaccgaactggtgaaagatgatgttaaaaatgtggagaaagccatctccaaggaggtggaggaggaatcaaaacaacaggagagaggatcacacctgattcaggaagaagaaatcaaggtggaagaggaacaaggcgatatcgaggttaaaatgagtagcgccgaggaggaaagcgaggccatcaaatgcgagagagagatgaaggtgctatcagagacagtatcagctgctcagctactgcttgtggagaattcatccgagaaacctgacttttttgaagacaacgtggtggacctgtgtcagtttacaactttgggaggtgtgtatcacctagatatcctcgagttaccccctcagtgtaagcctgtgaaggggtggatgattgtggagatcctcaaagagggcctgcaaaaatacacttacccccccgaaacgaccgaggaattcgagacagagaatgctttccctccgatcgaagtgacacttgaggtacatgagaacgtgatcttcttcgaggatcctgtggtggtgcgctgggatgccgagggcaagcactggaggaccgatggcatctcaaacgtgtcatacaagcctaaggagcggctcgtcacgttctctttggacactttcgggcctgtgactcttatacaggatgctcacatcaacatgccatatcagagctgggaattacgtcccctagacgtgaacaaagtacttcttactgtcaccacagtctttacagagatacagatacagattaaagagaacctgtgcatgctctcatccatcaaattgaaggacaaaaagcacataagcattttggaagggacttggatgacccctatcccgtttatcattgccctgaaggaggccgggctcaacatctttccaacgaggcatagtcatttctacgtcattataaataataaggtacccctggttgaggtgaaggcttaccgtcaaatggccttgctgtcatccgccttcgcttttgggtggagcaagtggaacctcctttgtaactctaccaaggtggtgtttaaatggtag

SEQ ID NO: 37445 - DNA, 1545 bp, Artificial Sequence
  derived and/or modified sequence
atgaacaccttcatcagcctgtggaaggagaagaccaacgagacctttgaagaggtgattgagaagagtaaagtggtgctgaatttaattgaaaagctcaagtttatcctcctcgaaactccaccttgcgacttgcaggataaaaatatcattcagtaccaggagtcgatcctacaactccaagaactgttgcacttaaaattcggagtcgccaccgagatattgttgaagcaggcatcaactctggcagatctggattcaggcaacatggagaaagtcattaaggacgagaacgtgacactgtatgtctgggccaacctcaagaaaaaccctcggcaccgatctgtgcgcttttccgaaacccagataggatttgaaatcccacggatcttagcaacttctgatattgccgtgcgtctccttcatacacactacgaccacgtgagtgcactacatccagtaagcacaccaagcaaagaatacactagtgccgtgactgaactggttaaggatgacgtgaagaatgtcgagaaagcgatctcaaaagaggtcgaggaagaatccaagcaacaggagcgcgggtctcatctaatccaagaggaggaaattaaggtggaggaggaacagggcgatatcgaggttaagatgagttccgcggaagaagagtccgaggctattaagtgtgaaagagagatgaaagtcctttctgagactgtctcagctgcccagctgctgttggtggaaaactcttccgaaaaaccggacttttttgaggataacgtagttgatctgtgccagtttacgacgctgggcggagtatatcacctcgacatcctggaattgcctccgcagtgcaagccagtgaaggggtggatgatcgtggaaatactgaaagaagggctccagaagtacacctaccctcccgagacaacagaggagtttgagaccgaaaacgctttccctcccatcgaggtgaccctcgaggtgcacgaaaatgtgattttctttgaggaccccgtggtggtgcgctgggacgcagagggcaaacattggcggactgacgggatctctaatgtgagttataaaccgaaagaaagactcgtaactttcagcctagatactttcggcccggttaccctcattcaagatgctcacattaacatgccctatcagagctgggagttgaggcccctggatgtaaataaggtgctgctgacggtcacaacagtattcactgagatacaaatccagatcaaggagaacctatgtatgctgagttccattaagctgaaggataaaaaacatatttcaatcctggagggcacttggatgaccccaataccattcattatagcgctgaaggaagcgggcttgaatatatttcctacacggcattcccacttttacgttatcataaataataaggtaccattggtagaggttaaagcctatcggcagatggccctcctctccagcgcatttgcgttcggctggtccaagtggaacctgctctgtaacagcaccaaagtggttttcaaatggtag

SEQ ID NO: 37446 - DNA, 2073 bp, Artificial Sequence
  derived and/or modified sequence
atgcgccagactggaggaggcgctacaacagatagcgctagccccgtgcttaacaatgtgataaaatctcagtcttacttcacagcgaagagagtaggcctaggaaacaacagctatctgggcgtaggcagaccctctagccaacagtggctgagcctacctggtccgggaggtcagggacccaaggccaagaaatccggtagcaagaaaaagaaggtgacaaaagctgaacgtctcaagctactgcaggaggaagaggagaggcggctgaaggaggaggaggaggctaggctgaagtatgagaaggaggaaatggagcgactcgaaattcaaaggatcgaaaaggaaaagtggcaccgcttggaggccaaagacctggagagaagaaatgaagaactggaggagctgtacctcctggaaaggtgcttccccgaagccgagaagcttaagcaggaaactaagctgctgtctcaatggaagcactatatccagtgtgatggctctccagacccctctgtggctcaagaaatgaatacattcatttctctgtggaaagaaaaaactaatgaaacgttcgaggaagtgatcgagaagtccaaggtagtgctgaacctcattgagaaattgaaatttatccttctggaaactcccccttgtgacctacaggacaagaatatcatccaataccaagaatccattctccagctgcaagagttgttacatctgaaatttggagtggctaccgaaattctcctgaagcaggctagcaccctggcggacctggacagtgggaacatggagaaggtgataaaggatgaaaatgtgacattgtacgtgtgggccaatctgaagaagaacccgcgtcacaggagtgtccggttctcagaaacccagattggctttgaaataccccgtatcttagcaacctcggatatcgcagtgcgcctgcttcatacgcactatgaccacgtcagcgccctgcaccccgtttccactccaagcaaggaatacacgagcgccgtaactgaattggtgaaggacgatgtcaagaatgtggaaaaagccatcagcaaagaggtggaagaagagagcaaacagcaggaacgcggttcacacctgatccaggaggaagaaatcaaggtggaagaagagcagggagatattgaggtgaaaatgtcctctgctgaagaagaaagtgaagccatcaagtgtgagcgcgagatgaaggtcctcagcgagactgtgagcgcagctcagttgcttctggtcgagaatagtagcgagaagcccgatttttttgaggacaatgtggtggacctgtgtcagttcacaacgctagggggtgtctaccatctggatatcctagaactcccacctcaatgcaaacccgttaagggctggatgatcgtggaaattctgaaagaggggcttcaaaagtacacttatcccccagagactactgaagagtttgaaaccgagaacgccttcccccctattgaggtcacactggaggtgcacgagaatgtgatcttttttgaagatcccgtggtggttaggtgggatgccgaaggcaagcactggcgaactgacgggatctctaacgtctcttataaacctaaggaaagacttgtgaccttttctttagatacttttggtcctgtgacgctgatccaggatgctcatatcaacatgccataccagtcctgggaactccgacctctcgacgtgaacaaggttcttctgactgtgactaccgtgttcacagagatccagatccaaatcaaggagaatttgtgtatgctgtcttcgattaagttgaaggataagaaacatatttccatccttgaaggcacttggatgacccctataccgtttataatcgcccttaaggaggctgggttgaatatctttcctacacgccacagccatttctacgtgattataaataataaggtgccactggtggaagtgaaggcctatcgccagatggcactgctgtctagcgcgtttgccttcgggtggagtaaatggaatctcttatgcaactcaacaaaagtggtgtttaagtggtag

SEQ ID NO: 37447 - DNA, 1311 bp, Artificial Sequence
  derived and/or modified sequence
atggagcgtcttgaaatacaacgaatagagaaggagaagtggcatcggctcgaagccaaggatctcgaacgtagaaatgaagaattggaagagctctacttgctcgagcgatgcttccccgaagccgagaaactgaagcaggagaccaagctgctgtcccagtggaagcattatatccagtgcgacggttcaccagatccaagtgtagcccaggaaatgaatacttttatatccctatggaaggaatataccagcgcggtgacagagctcgtcaaagatgatgtcaagaacgtggaaaaagccatctctaaggaagtcgaggaggagagtaaacagcaggagaggggatcacacctgatccaagaagaggaaattaaagtggaagaagaacagggagatattgaggtgaaaatgtcttctgctgaagaggaatcagaggccattaaatgcgagcgcgagatgaaagtcctctctgagacagtgtcagcagctcagcttctcttggtggaaaactcctctgagaaaccagatttttttgaggacaacgtggtggatctgtgtcagttcacaacactcggaggtgtataccacctggacattcttgagctcccccctcagtgcaaacccgtgaaggggtggatgatagttgaaatattgaaagagggactccagaagtacacgtacccccctgaaaccaccgaggaattcgaaacagagaatgcattccctccaatcgaggtgacgttagaggtccatgaaaacgtaattttttttgaagacccggtcgttgtgcggtgggatgccgaaggtaagcattggagaaccgacggcattagcaatgtgtcctataaacccaaagagagattggtgaccttctccctggatacttttgggcctgttaccctgatacaagatgcacacattaatatgccctaccagtcttgggagctgcgccctcttgatgtaaataaagtgttgttgaccgtcaccaccgtgtttacagaaattcagatccagatcaaggagaatctttgcatgttgtcatctattaaacttaaagacaagaagcatataagtatccttgaggggacttggatgacacccattccgttcatcatcgctttgaaggaagctgggctgaatatatttccaactcgacattcccacttctacgtgataattaacaacaaagtgcccctggtggaggttaaggcttataggcagatggctcttttgtcatccgcatttgctttcggatggtctaaatggaatctgctctgtaatagtaccaaggtagtgttcaagtggtag

SEQ ID NO: 37448 - DNA, 1545 bp, Artificial Sequence
  derived and/or modified sequence
atgaacacatttattagcttatggaaggaaaaaacgaatgagacttttgaagaagtgattgagaagtccaaagtagtcttgaatctgatagagaaattgaaattcattctactcgaaacccctccatgtgatctccaggacaagaacattattcaataccaggagtcaattctccagctccaagagctgctgcacctaaagttcggggtcgctaccgagatcctattgaaacaggccagcactcttgccgacttagacagcggaaacatggaaaaggtgattaaggatgaaaatgtgactctgtatgtgtgggccaatctaaaaaagaacccaagacacagatcagtgcggttcagtgagactcagattggcttcgaaataccaaggattctggcaacctctgatattgccgtcagactgttgcatacgcactacgatcatgtctcagctttacaccctgtgtctacaccctctaaggagtacacctccgctgtgaccgaattggtgaaggacgacgtcaagaacgtagagaaagccattagcaaggaagtggaggaggaaagcaaacagcaggaaagggggagccacttaattcaggaggaggaaatcaaggtggaggaggaacaaggcgatatcgaagtcaagatgagtagtgctgaagaagaatcagaagccattaaatgtgagagagaaatgaaggttttatcagagacagttagcgccgcacaactattactcgtggagaattccagcgagaagccggactttttcgaagataacgtggtcgacctatgtcagttcactaccctggggggagtctatcatttagacatcctggagcttcctccccaatgcaaacccgtaaaaggatggatgattgtggagattcttaaggaaggtctacagaagtacacttacccaccagagactaccgaggagtttgaaaccgagaacgcgtttccccctatcgaggttaccctggaagtgcacgaaaatgtgatctttttcgaagaccccgtcgtggtgaggtgggatgccgagggaaagcactggcgtactgatggcatttccaacgtctcatacaagcctaaagaaagactcgtaacgtttagtctagacacatttgggccagtcacactgattcaggacgcacatattaacatgccctatcagtcttgggaacttcggccattagacgtgaataaggtcctgctaaccgtgacaacagtgttcactgagatccagatccaaataaaggagaacctgtgcatgttatcatcaattaaacttaaagacaagaaacacattagtatcttagagggcacttggatgacacctattcctttcatcatcgctttgaaagaggcaggactgaacatcttcccaaccaggcactcccacttttatgtaatcatcaataataaggtgcctctggtggaggtgaaagcttacaggcagatggctctgctcagcagtgccttcgccttcggttggtccaaatggaatttactctgtaatagcacaaaagtggtcttcaagtggtag

SEQ ID NO: 37449 - DNA, 2445 bp, Artificial Sequence
  derived and/or modified sequence
gcagtggagcttgactcttaatggtgagcaaggcaaatgaggcagacaggtggaggggcgaccactgattctgcttcaccagtgttaaataatgtaatcaagagccagtcatattttacagcgaagcgggtcggtttgggaaataactcataccttggggtgggtcggccctcttctcagcaatggctttccttacctggaccaggcggacagggtcccaaagcaaaaaagtctggcagtaagaaaaagaaagtcaccaaagctgaacgattgaagctgctacaagaggaggaggagagacgactgaaagaggaagaggaagcccgtttgaaatatgagaaagaagaaatggaaaggcttgaaatacagcgaattgagaaagaaaaatggcatcgacttgaagcaaaagatctagaaaggagaaatgaagaacttgaagaactttatttattagagaggtgttttcctgaagcagagaaattgaaacaggaaactaaattgctttctcagtggaagcactacattcaatgtgatgggagtcctgatccttcagtagcccaagaaatgaacacgtttattagtttgtggaaagagaaaacaaatgagacttttgaggaagtgattgagaagagtaaagtagtgctaaatttaattgagaaattgaaatttattttactggaaactccaccatgtgatttgcaagataaaaatataatacagtaccaagaatcaatactacaactgcaggagctccttcatcttaaattcggtgtagccacagaaatacttctcaaacaagctagtactttggcagatctggacagtggaaatatggaaaaagtcattaaagatgaaaatgttactctgtatgtgtgggcaaacctcaagaagaatccaaggcacagaagtgttagattctctgaaacacaaattggatttgagattccaaggatattagcaacaagtgacattgctgtacgactcctgcatacccactatgatcatgtttctgcactgcaccctgtttcaacaccatcaaaagaatacacttctgcagtaactgagcttgtcaaagatgatgttaagaatgtagaaaaagcaatcagcaaggaggtcgaagaagagtccaaacaacaagaaagagggtctcacttaattcaggaggaagaaataaaagttgaggaggaacaaggtgatattgaagtgaaaatgagttctgctgaggaagaatctgaagccataaaatgtgaacgagagatgaaagtattaagtgaaactgtttcagcagcacagttgttgctggtagagaattcttctgaaaagccagatttctttgaagacaatgtggtggatttatgccagttcacaactctgggtggagtataccacttggatattttggagcttcctccacagtgtaaaccagtgaagggatggatgattgtggaaatactcaaagaaggattacagaaatacacatatcctccggaaactacagaagagtttgagacagaaaatgctttcccacctatagaggtcacacttgaggttcatgagaatgtaatcttttttgaggatcctgtggttgtaaggtgggatgctgaaggtaaacattggagaactgatggcatcagcaatgtatcctacaaaccaaaagaaagacttgtaacattcagcctggacacctttggccctgttaccttgattcaagatgctcatattaacatgccgtaccagtcatgggaactaagaccacttgatgtaaataaagtacttttaactgtgactacagtatttactgagattcaaatacaaattaaggaaaacctctgcatgttatcttcaatcaaactaaaagacaagaaacacatctctattttggaaggaacctggatgactcctattcctttcattattgctttgaaagaagctggactgaatatctttcctactagacactctcatttttatgttattataaacaataaggttcctttggtagaagtgaaagcttatcgacagatggccctactaagttctgcttttgcatttggttggagcaagtggaacctactatgtaattctacaaaagtcgtatttaagtggtgacagagcacaaagactgaagatcaaggaagagagtgaggcattttctgaagcacttaaagaagaaactgagtttcattctactttatatcacatggtgaaggattttgcttctgaggaagcaatggagaaagtcaggagttccaactgtcagtttgtcaactctgtgtgccacatgctgctctctaccagattgctcagctactcctaacctccacttacaaactgtattgtaagtatgaagaaccaagcatggtgaaagacaggtatttctgcaacacaatgtaatgagtgaatgaatacatttcaaatcaactattaaaaattttctaatctgca

SEQ ID NO: 37450 - DNA, 1558 bp, Artificial Sequence
  derived and/or modified sequence
caatttctgctccgactctgcggactactgcagtggagcttgactcttaatgggtcccaaagcaaaaaagtctggcagtaagaaaaagaaagtcaccaaagctgaacgattgaagctgctacaagaggaggaggagagacgactgaaagaggaaggtacaaaataaatagtgatactatttacctatacagaggaagcccgtttgaaatatgagaaagaagaaatggaaaggcttgaaatacagcgaattgagaaagaaaaatggcatcgacttgaagcaaaagatctagaaaggagaaatgaagaacttgaagaactttatttattagagaggtgttttcctgaagcagagaaattgaaacaggaaactaaattgctttctcagtggaagcactacattcaatgtgatgggagtcctgatccttcagtagcccaagaaatgaacacgtttattagtttgtggaaagaatacacttctgcagtaactgagcttgtcaaagatgatgttaagaatgtagaaaaagcaatcagcaaggaggtcgaagaagagtccaaacaacaagaaagagggtctcacttaattcaggaggaagaaataaaagttgaggaggaacaaggtgatattgaagtgaaaatgagttctgctgaggaagaatctgaagccataaaatgtgaacgagagatgaaagtattaagtgaaactgtttcagcagcacagttgttgctggtagagaattcttctgaaaagccagatttctttgaagacaatgtggtggatttatgccagttcacaactctgggtggagtataccacttggatattttggagcttcctccacagtgtaaaccagtgaagggatggatgattgtggaaatactcaaagaaggattacagaaatacacatatcctccggaaactacagaagagtttgagacagaaaatgctttcccacctatagaggtcacacttgaggttcatgagaatgtaatcttttttgaggatcctgtggttgtaaggtgggatgctgaaggtaaacattggagaactgatggcatcagcaatgtatcctacaaaccaaaagaaagacttgtaacattcagcctggacacctttggccctgttaccttgattcaagatgctcatattaacatgccgtaccagtcatgggaactaagaccacttgatgtaaataaagtacttttaactgtgactacagtatttactgagattcaaatacaaattaaggaaaacctctgcatgttatcttcaatcaaactaaaagacaagaaacacatctctattttggaaggaacctggatgactcctattcctttcattattgctttgaaagaagctggactgaatatctttcctactagacactctcatttttatgttattataaacaataaggttcctttggtagaagtgaaagcttatcgacagatggccctactaagttctgcttttgcatttggttggagcaagtggaacctactatgtaattctacaaaagtcgtatttaagtggtgacagagcacaaagactgaagatcaa

SEQ ID NO: 37451 - DNA, 2208 bp, Artificial Sequence
  derived and/or modified sequence
ctgtcgtccgggcaacccgggagcgtttgtccacacaatttctgctccgactctgcggactactgcagtggagcttgactcttaatgtctggcagtaagaaaaagaaagtcaccaaagctgaacgattgaagctgctacaagaggaggaggagagacgactgaaagaggaaggatctagaaaggagaaatgaagaacttgaagaactttatttattagagaggtgttttcctgaagcagagaaattgaaacaggaaactaaattgctttctcagtggaagcactacattcaatgtgatgggagtcctgatccttcagtagcccaagaaatgaacacgtttattagtttgtggaaagagaaaacaaatgagacttttgaggaagtgattgagaagagtaaagtagtgctaaatttaattgagaaattgaaatttattttactggaaactccaccatgtgatttgcaagataaaaatataatacagtaccaagaatcaatactacaactgcaggagctccttcatcttaaattcggtgtagccacagaaatacttctcaaacaagctagtactttggcagatctggacagtggaaatatggaaaaagtcattaaagatgaaaatgttactctgtatgtgtgggcaaacctcaagaagaatccaaggcacagaagtgttagattctctgaaacacaaattggatttgagattccaaggatattagcaacaagtgacattgctgtacgactcctgcatacccactatgatcatgtttctgcactgcaccctgtttcaacaccatcaaaagaatacacttctgcagtaactgagcttgtcaaagatgatgttaagaatgtagaaaaagcaatcagcaaggaggtcgaagaagagtccaaacaacaagaaagagggtctcacttaattcaggaggaagaaataaaagttgaggaggaacaaggtgatattgaagtgaaaatgagttctgctgaggaagaatctgaagccataaaatgtgaacgagagatgaaagtattaagtgaaactgtttcagcagcacagttgttgctggtagagaattcttctgaaaagccagatttctttgaagacaatgtggtggatttatgccagttcacaactctgggtggagtataccacttggatattttggagcttcctccacagtgtaaaccagtgaagggatggatgattgtggaaatactcaaagaaggattacagaaatacacatatcctccggaaactacagaagagtttgagacagaaaatgctttcccacctatagaggtcacacttgaggttcatgagaatgtaatcttttttgaggatcctgtggttgtaaggtgggatgctgaaggtaaacattggagaactgatggcatcagcaatgtatcctacaaaccaaaagaaagacttgtaacattcagcctggacacctttggccctgttaccttgattcaagatgctcatattaacatgccgtaccagtcatgggaactaagaccacttgatgtaaataaagtacttttaactgtgactacagtatttactgagattcaaatacaaattaaggaaaacctctgcatgttatcttcaatcaaactaaaagacaagaaacacatctctattttggaaggaacctggatgactcctattcctttcattattgctttgaaagaagctggactgaatatctttcctactagacactctcatttttatgttattataaacaataaggttcctttggtagaagtgaaagcttatcgacagatggccctactaagttctgcttttgcatttggttggagcaagtggaacctactatgtaattctacaaaagtcgtatttaagtggtgacagagcacaaagactgaagatcaaggaagagagtgaggcattttctgaagcacttaaagaagaaactgagtttcattctactttatatcacatggtgaaggattttgcttctgaggaagcaatggagaaagtcaggagttccaactgtcagtttgtcaactctgtgtgccacatgctgctctctaccagattgctcagctactcctaacctccacttacaaactgtattgtaagtatgaagaaccaagcatggtgaaagacaggtatttctgcaacacaatgtaatgagtgaatgaatacatttcaaatcaactattaaaaattttctaatctgc

SEQ ID NO: 37452 - protein, 92 aa, Artificial Sequence
  derived and/or modified sequence
MKPIQKLLAGLILLTWCVEGCSSQHWSYGLRPGGKRDAENLIDSFQEIVKEVGQLAETQRFECTTHQPRSPLRDLKGALESLIEEETGQKKI

SEQ ID NO: 37453 - DNA, 279 bp, Artificial Sequence
  derived and/or modified sequence
atgaagcccatccagaagctgctggccggcctgatcctgctgacctggtgcgtggagggctgcagcagccagcactggagctacggcctgagacccggcggcaagagagacgccgagaacctgatcgacagcttccaggagatcgtgaaggaggtgggccagctggccgagacccagagattcgagtgcaccacccaccagcccagaagccccctgagagacctgaagggcgccctggagagcctgatcgaggaggagaccggccagaagaagatctag

SEQ ID NO: 37454 - DNA, 279 bp, Artificial Sequence
  derived and/or modified sequence
atgaagccaatacaaaagttgttggctggcctcattctgttgacatggtgcgtcgagggatgtagcagccagcattggagttacgggctcaggccgggaggcaagcgagacgccgagaatttgattgactctttccaggagatcgtcaaggaggttggtcaattagccgaaactcagcgttttgaatgtacaactcaccaacccaggtctcccttaagggatctcaagggggcacttgagtccctgattgaggaggagactggtcagaagaagatctag

SEQ ID NO: 37455 - DNA, 279 bp, Artificial Sequence
  derived and/or modified sequence
atgaagcctattcagaaactgctggccggcctgattcttctgacttggtgcgtcgagggctgcagtagccagcattggtcctacggccttcgccctggcggcaaacgcgacgcagaaaacttaatcgattccttccaggaaattgtgaaagaagtgggacaattagccgaaacacagagatttgaatgtacaacccaccagcccaggagtcccctcagggacctaaaaggcgcgctggagtcactaatcgaagaggagacgggacagaagaaaatttag

SEQ ID NO: 37456 - DNA, 279 bp, Artificial Sequence
  derived and/or modified sequence
atgaagcccatccagaagctgctggccggcctcatcctgctgacctggtgtgtggagggctgcagcagccagcactggagctatggcctgcggcctgggggcaagagagatgctgagaacctgattgacagcttccaggagatcgtgaaggaggtgggccagctggccgagacccagagatttgagtgcaccacccaccagcccaggagccccctgcgggacctgaagggggccctggagagcctgattgaggaggagaccggccagaagaagatctag

SEQ ID NO: 37457 - DNA, 279 bp, Artificial Sequence
  derived and/or modified sequence
atgaagcccatccagaagctgctggccggcctgatcctgctgacctggtgtgtggaagggtgttcgtcccagcactggagttatggccttagacctggtggtaaaagagacgccgagaacctgattgactcgttccaggagattgtcaaggaagtgggtcagttggccgagacgcaacgattcgaatgcacgactcaccagcctcggagccctttgagggacctgaagggagctttggagtcactgatagaggaagaaaccggacagaagaaaatttag

SEQ ID NO: 37458 - DNA, 279 bp, Artificial Sequence
  derived and/or modified sequence
atgaagcccatccagaagctgctggccggcctgatcctgctgacctggtgcgttgaaggatgctctagccaacactggtcgtacggactcagaccaggtgggaaacgtgatgccgagaacctgatcgattcattccaagaaatagtgaaggaagtgggccagttggctgagacgcagcgatttgagtgtaccactcatcagccccgctcacctcttcgggatctcaagggcgccctggaaagcctgattgaagaagaaacaggacaaaagaagatatag

SEQ ID NO: 37459 - DNA, 279 bp, Artificial Sequence
  derived and/or modified sequence
atgaagccaattcaaaagctgctggctggcctgattcttttaacttggtgcgtggagggatgcagttctcaacattggtcatatgggctgaggcctggtgggaaaagagacgccgagaatctcatcgatagcttccaggagattgtgaaagaagtcggtcagctagccgagacgcagcgctttgaatgtacgacccatcagcctagatcaccattgagggatctgaagggagccctcgagtctctcatagaagaggaaacaggacagaagaaaatctag

SEQ ID NO: 37460 - DNA, 279 bp, Artificial Sequence
  derived and/or modified sequence
atgaaaccgatacaaaaactactggccggactcatacttttgacttggtgtgtggagggctgttcctcgcagcattggagttatggattgcgtcctggcggaaaaagggatgctgaaaacttgatagactctttccaggagattgtgaaagaggttgggcagttagctgagacccagcggtttgagtgtaccacccatcagccaaggtctcccctgcgagacctgaaaggggctctggaaagcctgatcgaggaggagactggccagaaaaaaatatag

SEQ ID NO: 37461 - protein, 727 aa, Artificial Sequence
  derived and/or modified sequence
MAFQKAVKGTILVGGGALATVLGLSQFAHYRRKQMNLAYVKAADCISEPVNREPPSREAQLLTLQNTSEFDILVIGGGATGSGCALDAVTRGLKTALVERDDFSSGTSSRSTKLIHGGVRYLQKAIMKLDIEQYRMVKEALHERANLLEIAPHLSAPLPIMLPVYKWWQLPYYWVGIKLYDLVAGSNCLKSSYVLSKSRALEHFPMLQKDKLVGAIVYYDGQHNDARMNLAIALTAARYGAATANYMEVVSLLKKTDPQTGKVRVSGARCKDVLTGQEFDVRAKCVINATGPFTDSVRKMDDKDAAAICQPSAGVHIVMPGYYSPESMGLLDPATSDGRVIFFLPWQKMTIAGTTDTPTDVTHHPIPSEEDINFILNEVRNYLSCDVEVRRGDVLAAWSGIRPLVTDPKSADTQSISRNHVVDISESGLITIAGGKWTTYRSMAEDTINAAVKTHNLKAGPSRTVGLFLQGGKDWSPTLYIRLVQDYGLESEVAQHLAATYGDKAFEVAKMASVTGKRWPIVGVRLVSEFPYIEAEVKYGIKEYACTAVDMISRRTRLAFLNVQAAEEALPRIVELMGRELNWDDYKKQEQLETARKFLYYEMGYKSRSEQLTDRSEISLLPSDIDRYKKRFHKFDADQKGFITIVDVQRVLESINVQMDENTLHEILNEVDLNKNGQVELNEFLQLMSAIQKGRVSGSRLAILMKTAEENLDRRVPIPVDRSCGGL

SEQ ID NO: 37462 - protein, 500 aa, Artificial Sequence
  derived and/or modified sequence
MNLAIALTAARYGAATANYMEVVSLLKKTDPQTGKVRVSGARCKDVLTGQEFDVRAKCVINATGPFTDSVRKMDDKDAAAICQPSAGVHIVMPGYYSPESMGLLDPATSDGRVIFFLPWQKMTIAGTTDTPTDVTHHPIPSEEDINFILNEVRNYLSCDVEVRRGDVLAAWSGIRPLVTDPKSADTQSISRNHVVDISESGLITIAGGKWTTYRSMAEDTINAAVKTHNLKAGPSRTVGLFLQGGKDWSPTLYIRLVQDYGLESEVAQHLAATYGDKAFEVAKMASVTGKRWPIVGVRLVSEFPYIEAEVKYGIKEYACTAVDMISRRTRLAFLNVQAAEEALPRIVELMGRELNWDDYKKQEQLETARKFLYYEMGYKSRSEQLTDRSEISLLPSDIDRYKKRFHKFDADQKGFITIVDVQRVLESINVQMDENTLHEILNEVDLNKNGQVELNEFLQLMSAIQKGRVSGSRLAILMKTAEENLDRRVPIPVDRSCGGL

SEQ ID NO: 37463 - protein, 109 aa, Artificial Sequence
  derived and/or modified sequence
MAFQKAVKGTILVGGGALATVLGLSQFAHYRRKQMNLAYVKAADCISEPVNREPPSREAQLLTLQNTSEFDILVIGGGATGSGCALDAVTRGLKTALVERDDFSSGTSS

SEQ ID NO: 37464 - protein, 379 aa, Artificial Sequence
  derived and/or modified sequence
MAFQKAVKGTILVGGGALATVLGLSQFAHYRRKQMNLAYVKAADCISEPVNREPPSREAQLLTLQNTSEFDILVIGGGATGSGCALDAVTRGLKTALVERDDFSSGTSSRSTKLIHGGVRYLQKAIMKLDIEQYRMVKEALHERANLLEIAPHLSAPLPIMLPVYKWWQLPYYWVGIKLYDLVAGSNCLKSSYVLSKSRALEHFPMLQKDKLVGAIVYYDGQHNDARMNLAIALTAARYGAATANYMEVVSLLKKTDPQTGKVRVSGARCKDVLTGQEFDVRAKCVINATGPFTDSVRKMDDKDAAAICQPSAGVHIVMPGYYSPESMGLLDPATSDGRVIFFLPWQKMTIAGTTDTPTDVTHHPIPSEEDINFILNEV

SEQ ID NO: 37465 - DNA, 2184 bp, Artificial Sequence
  derived and/or modified sequence
atggccttccagaaggccgtgaagggcaccatcctggtgggcggcggcgccctggccaccgtgctgggcctgagccagttcgcccactacagaagaaagcagatgaacctggcctacgtgaaggccgccgactgcatcagcgagcccgtgaacagagagccccccagcagagaggcccagctgctgaccctgcagaacaccagcgagttcgacatcctggtgatcggcggcggcgccaccggcagcggctgcgccctggacgccgtgaccagaggcctgaagaccgccctggtggagagagacgacttcagcagcggcaccagcagcagaagcaccaagctgatccacggcggcgtgagatacctgcagaaggccatcatgaagctggacatcgagcagtacagaatggtgaaggaggccctgcacgagagagccaacctgctggagatcgccccccacctgagcgcccccctgcccatcatgctgcccgtgtacaagtggtggcagctgccctactactgggtgggcatcaagctgtacgacctggtggccggcagcaactgcctgaagagcagctacgtgctgagcaagagcagagccctggagcacttccccatgctgcagaaggacaagctggtgggcgccatcgtgtactacgacggccagcacaacgacgccagaatgaacctggccatcgccctgaccgccgccagatacggcgccgccaccgccaactacatggaggtggtgagcctgctgaagaagaccgacccccagaccggcaaggtgagagtgagcggcgccagatgcaaggacgtgctgaccggccaggagttcgacgtgagagccaagtgcgtgatcaacgccaccggccccttcaccgacagcgtgagaaagatggacgacaaggacgccgccgccatctgccagcccagcgccggcgtgcacatcgtgatgcccggctactacagccccgagagcatgggcctgctggaccccgccaccagcgacggcagagtgatcttcttcctgccctggcagaagatgaccatcgccggcaccaccgacacccccaccgacgtgacccaccaccccatccccagcgaggaggacatcaacttcatcctgaacgaggtgagaaactacctgagctgcgacgtggaggtgagaagaggcgacgtgctggccgcctggagcggcatcagacccctggtgaccgaccccaagagcgccgacacccagagcatcagcagaaaccacgtggtggacatcagcgagagcggcctgatcaccatcgccggcggcaagtggaccacctacagaagcatggccgaggacaccatcaacgccgccgtgaagacccacaacctgaaggccggccccagcagaaccgtgggcctgttcctgcagggcggcaaggactggagccccaccctgtacatcagactggtgcaggactacggcctggagagcgaggtggcccagcacctggccgccacctacggcgacaaggccttcgaggtggccaagatggccagcgtgaccggcaagagatggcccatcgtgggcgtgagactggtgagcgagttcccctacatcgaggccgaggtgaagtacggcatcaaggagtacgcctgcaccgccgtggacatgatcagcagaagaaccagactggccttcctgaacgtgcaggccgccgaggaggccctgcccagaatcgtggagctgatgggcagagagctgaactgggacgactacaagaagcaggagcagctggagaccgccagaaagttcctgtactacgagatgggctacaagagcagaagcgagcagctgaccgacagaagcgagatcagcctgctgcccagcgacatcgacagatacaagaagagattccacaagttcgacgccgaccagaagggcttcatcaccatcgtggacgtgcagagagtgctggagagcatcaacgtgcagatggacgagaacaccctgcacgagatcctgaacgaggtggacctgaacaagaacggccaggtggagctgaacgagttcctgcagctgatgagcgccatccagaagggcagagtgagcggcagcagactggccatcctgatgaagaccgccgaggagaacctggacagaagagtgcccatccccgtggacagaagctgcggcggcctgtag

SEQ ID NO: 37466 - DNA, 1503 bp, Artificial Sequence
  derived and/or modified sequence
atgaacctggccatcgccctgaccgccgccagatacggcgccgccaccgccaactacatggaggtggtgagcctgctgaagaagaccgacccccagaccggcaaggtgagagtgagcggcgccagatgcaaggacgtgctgaccggccaggagttcgacgtgagagccaagtgcgtgatcaacgccaccggccccttcaccgacagcgtgagaaagatggacgacaaggacgccgccgccatctgccagcccagcgccggcgtgcacatcgtgatgcccggctactacagccccgagagcatgggcctgctggaccccgccaccagcgacggcagagtgatcttcttcctgccctggcagaagatgaccatcgccggcaccaccgacacccccaccgacgtgacccaccaccccatccccagcgaggaggacatcaacttcatcctgaacgaggtgagaaactacctgagctgcgacgtggaggtgagaagaggcgacgtgctggccgcctggagcggcatcagacccctggtgaccgaccccaagagcgccgacacccagagcatcagcagaaaccacgtggtggacatcagcgagagcggcctgatcaccatcgccggcggcaagtggaccacctacagaagcatggccgaggacaccatcaacgccgccgtgaagacccacaacctgaaggccggccccagcagaaccgtgggcctgttcctgcagggcggcaaggactggagccccaccctgtacatcagactggtgcaggactacggcctggagagcgaggtggcccagcacctggccgccacctacggcgacaaggccttcgaggtggccaagatggccagcgtgaccggcaagagatggcccatcgtgggcgtgagactggtgagcgagttcccctacatcgaggccgaggtgaagtacggcatcaaggagtacgcctgcaccgccgtggacatgatcagcagaagaaccagactggccttcctgaacgtgcaggccgccgaggaggccctgcccagaatcgtggagctgatgggcagagagctgaactgggacgactacaagaagcaggagcagctggagaccgccagaaagttcctgtactacgagatgggctacaagagcagaagcgagcagctgaccgacagaagcgagatcagcctgctgcccagcgacatcgacagatacaagaagagattccacaagttcgacgccgaccagaagggcttcatcaccatcgtggacgtgcagagagtgctggagagcatcaacgtgcagatggacgagaacaccctgcacgagatcctgaacgaggtggacctgaacaagaacggccaggtggagctgaacgagttcctgcagctgatgagcgccatccagaagggcagagtgagcggcagcagactggccatcctgatgaagaccgccgaggagaacctggacagaagagtgcccatccccgtggacagaagctgcggcggcctgtag

SEQ ID NO: 37467 - DNA, 330 bp, Artificial Sequence
  derived and/or modified sequence
atggccttccagaaggccgtgaagggcaccatcctggtgggcggcggcgccctggccaccgtgctgggcctgagccagttcgcccactacagaagaaagcagatgaacctggcctacgtgaaggccgccgactgcatcagcgagcccgtgaacagagagccccccagcagagaggcccagctgctgaccctgcagaacaccagcgagttcgacatcctggtgatcggcggcggcgccaccggcagcggctgcgccctggacgccgtgaccagaggcctgaagaccgccctggtggagagagacgacttcagcagcggcaccagcagctag

SEQ ID NO: 37468 - DNA, 1140 bp, Artificial Sequence
  derived and/or modified sequence
atggccttccagaaggccgtgaagggcaccatcctggtgggcggcggcgccctggccaccgtgctgggcctgagccagttcgcccactacagaagaaagcagatgaacctggcctacgtgaaggccgccgactgcatcagcgagcccgtgaacagagagccccccagcagagaggcccagctgctgaccctgcagaacaccagcgagttcgacatcctggtgatcggcggcggcgccaccggcagcggctgcgccctggacgccgtgaccagaggcctgaagaccgccctggtggagagagacgacttcagcagcggcaccagcagcagaagcaccaagctgatccacggcggcgtgagatacctgcagaaggccatcatgaagctggacatcgagcagtacagaatggtgaaggaggccctgcacgagagagccaacctgctggagatcgccccccacctgagcgcccccctgcccatcatgctgcccgtgtacaagtggtggcagctgccctactactgggtgggcatcaagctgtacgacctggtggccggcagcaactgcctgaagagcagctacgtgctgagcaagagcagagccctggagcacttccccatgctgcagaaggacaagctggtgggcgccatcgtgtactacgacggccagcacaacgacgccagaatgaacctggccatcgccctgaccgccgccagatacggcgccgccaccgccaactacatggaggtggtgagcctgctgaagaagaccgacccccagaccggcaaggtgagagtgagcggcgccagatgcaaggacgtgctgaccggccaggagttcgacgtgagagccaagtgcgtgatcaacgccaccggccccttcaccgacagcgtgagaaagatggacgacaaggacgccgccgccatctgccagcccagcgccggcgtgcacatcgtgatgcccggctactacagccccgagagcatgggcctgctggaccccgccaccagcgacggcagagtgatcttcttcctgccctggcagaagatgaccatcgccggcaccaccgacacccccaccgacgtgacccaccaccccatccccagcgaggaggacatcaacttcatcctgaacgaggtgtag

SEQ ID NO: 37469 - DNA, 2184 bp, Artificial Sequence
  derived and/or modified sequence
atggccttccagaaagcggtcaagggaaccattcttgtgggcgggggggctctcgctaccgtgcttggcctgagccaattcgcccactacagaaggaagcaaatgaacttagcctacgtcaaggccgctgattgtatcagtgagccggtgaatcgcgaaccacccagtagggaggcacaactactgaccctacagaacacatcagaatttgacatactagttataggcggaggcgcaacagggagcggatgcgccctcgacgctgtgacccgcggattaaaaaccgctcttgtcgaaagggacgatttctccagtggtacttccagtcggtcaaccaaactgatccacgggggtgtccggtatctccaaaaggctatcatgaagctggacattgaacagtataggatggtgaaggaggcccttcacgaaagagcgaacctgttggagattgccccccacctttctgctcccctgcctattatgttgcctgtttacaaatggtggcagctcccatactactgggtggggattaaattgtacgatctggtcgcgggctctaactgcctgaagtcaagttatgttctctcgaaaagcagggcccttgagcatttcccaatgctgcagaaagacaaactggtgggcgccatcgtgtattatgacggacaacacaatgacgcacgaatgaacctcgctattgccttgacggccgcaaggtacggagcagccactgcaaattacatggaggttgtcagtttactcaagaagaccgatccacagacagggaaagtaagagtctcaggtgccagatgcaaggacgtcttgactggacaggaattcgacgtgcgcgctaagtgcgtaattaacgccactggaccgttcaccgatagcgtcaggaagatggacgacaaggacgccgctgcgatctgtcagcctagcgccggcgtacatatagtaatgcccggctattactcccctgagtcaatgggacttctcgatccagcaacctcagatgggcgggtcatcttttttctcccctggcagaaaatgaccattgctggcacgacagatacccccactgatgtgacccatcacccgattccatccgaggaagatatcaatttcatactgaatgaggtgcgcaattatttgtcttgcgatgtcgaagtgcggcggggggatgtacttgctgcttggtcaggtatacggcctctggtcacggatccaaagtctgcagatacccagtccatcagccgtaaccacgtcgttgatattagcgaaagtggtttgatcactatcgcgggggggaagtggaccacgtacaggagcatggcagaggacaccataaatgccgcagtgaagacacataatctgaaggccgggccatcgaggacggtcggcctgttcctccagggcggcaaagactggtctccgacactgtatattcgcttagtgcaagactatggccttgagtcggaggttgctcagcatctggcggccacatatggtgacaaggcatttgaagtggccaagatggctagtgtgaccggcaaaagatggccgatagttggtgtgcggctcgtgtcggaatttccttatatagaagccgaagttaagtacggaatcaaggaatacgcctgcaccgctgtggatatgattagtcggcgtaccaggttagccttcctcaacgtgcaggcagcagaggaggcccttccccggatagtagagctgatgggcagagaactaaactgggacgattataaaaaacaggagcagttggaaaccgcccggaaattcctctactatgagatgggctataagagccggtccgaacagctgacagataggagtgagataagcctgctgccaagcgatatagaccggtacaaaaaacggttccacaaattcgacgctgatcagaaagggtttattaccatcgttgacgttcagcgcgtcctggaaagtattaacgttcagatggacgagaacacgcttcatgaaatcctcaacgaggttgatctgaacaagaacgggcaggtggagctgaatgagtttcttcagctgatgtccgccatccagaaggggagggtttccggaagccgtctggccattctgatgaaaacagccgaagaaaacctggatcggagggtgcccattcccgtggatagatcctgcggtgggctatag

SEQ ID NO: 37470 - DNA, 1503 bp, Artificial Sequence
  derived and/or modified sequence
atgaacttggccatagctctcaccgcagccagatacggagcagctacagccaattacatggaggttgtctctctgctgaaaaaaactgacccgcaaacagggaaagttagggtgtctggggcccggtgtaaggacgtgttaaccggtcaggagttcgatgtgagggccaagtgcgtgatcaatgccactggaccatttactgactccgtacgtaaaatggatgacaaggacgctgctgccatatgtcagcctagtgccggagtccacatcgtaatgcccggctactactctcccgagtccatgggcctgctggacccagctacttccgacggcagagtgattttcttcctgccctggcagaaaatgactattgctgggacgaccgatacaccgactgatgtgacccaccacccaatcccatcagaggaggatattaatttcatcttgaatgaagtgcggaattatttgtcatgcgacgtagaagtgcgaagaggggatgttctggctgcatggagcggcattcgcccgctggttaccgaccccaagtcagccgacacacagagcatctctcgtaaccatgtggttgacatttccgaatcaggactgatcaccattgccggtgggaagtggacgacatatcgctctatggccgaggataccattaacgcagctgtgaagactcataatctcaaggccgggcctagtcggacggtcggacttttcctccaaggcggcaaggactggagccccactctatacatccgtctcgtgcaggattatggcctggagtccgaagttgctcaacatctcgccgccacctacggggacaaagccttcgaggttgctaaaatggcctctgttaccggcaaaaggtggcccatcgtgggcgtgagactggtgagcgagtttccttacattgaggcggaggtgaaatacggcattaaagaatacgcctgcacagccgtggatatgatttcccggagaaccagactcgccttcctgaacgtgcaagccgccgaagaggcgttgccccggatcgtggagttaatgggaagggaacttaattgggatgactacaagaagcaggaacagctagagactgctcgcaagtttttgtattacgaaatggggtacaagagccgatccgagcagcttaccgaccgctccgaaattagcctgcttccctctgacatcgacagatacaagaaacgattccacaaattcgacgcggatcagaaggggtttataactattgtcgacgtacagcgcgtattagagtctataaacgtgcaaatggatgagaatacgcttcatgaaattctgaatgaggtggacctgaacaagaatggccaagtcgagctgaatgagttcttgcagctcatgagcgcaatccaaaagggacgagtcagcggaagcagattggctatcctcatgaaaaccgccgaagaaaatctcgaccgccgggtccctatcccggtcgacagatcgtgcggcggtctttag

SEQ ID NO: 37471 - DNA, 2184 bp, Artificial Sequence
  derived and/or modified sequence
atggcttttcaaaaggctgtgaagggaactatcctcgtggggggtggagccctggctacggtactgggactttctcagttcgcccactatagaagaaagcagatgaatctggcttacgttaaggccgcagattgtatcagtgagcctgtgaacagagaacccccgtcacgggaggcacaactactgaccctccagaataccagtgagtttgatattctagtcattggaggtggtgcgactgggtcaggctgtgccctggacgctgtgactagagggctcaagacagcactggtggagcgagatgacttttcttccgggaccagcagtagatccactaagctgatccacggaggagtacgctacctgcagaaagccatcatgaagctcgacattgagcagtataggatggtcaaggaggcgctgcatgaacgcgccaacctgctcgaaattgctccacacttgagcgctccactccctatcatgctccccgtgtacaagtggtggcaattgccttattactgggtggggatcaagctttacgacctagtggctggatccaattgcctcaagagttcatacgtacttagcaagagcagagcgttagagcatttccccatgttacagaaggataaactggtcggggccatcgtgtactatgatgggcagcataatgacgctcgaatgaatctggcgatagcactgaccgcagcaaggtatggcgcagccaccgcgaactatatggaagtggtctcactgctgaagaaaacggacccgcaaactggcaaggtcagagtgtcaggagcgcgctgcaaggacgtcctgactggccaggaattcgacgtgcgggccaagtgcgtcatcaatgccactgggcccttcacagactctgtgagaaaaatggacgataaggacgctgccgctatttgtcagccctcggcaggggtccacatcgttatgcccgggtactatagccccgaatcaatgggactgttggatccggcgacctcagatggcagagttatctttttcctgccgtggcagaagatgacaattgcaggtactacagacacccctacagacgtcacgcatcatccaataccctctgaagaggacatcaatttcatactgaatgaggtgcgcaactatttgtcctgtgacgtggaggttagaagaggagatgtactggctgcctggagcgggattcgcccgctggtcaccgacccaaagtcagctgatacacagagtattagcagaaatcacgtggtggacatcagtgagagcgggctgatcaccatagcgggcggaaaatggaccacataccgctcaatggctgaggataccatcaacgccgctgtcaaaacccacaatctcaaggccggcccctctaggacagttggactgtttctgcaaggtggcaaggactggtctcctactctgtatattagactggtgcaggactacgggctggagtctgaggtggcgcaacacctggccgcaacatatggagacaaggctttcgaagtggccaaaatggctagcgtgacgggcaaaaggtggcctatagtcggtgtgcgccttgtttcagaattcccctatattgaagccgaggttaaatacgggattaaggagtacgcttgcacagcggtcgacatgataagccgtcggaccaggctggcctttttaaatgttcaagccgccgaggaggcactgccacgaatcgtggaactgatgggccgggaattgaactgggacgattacaaaaagcaagagcaactggagacggctagaaaattcttatactacgagatgggttataagtctaggagcgaacagctcacagatcgatctgagattagcctgctgccttcagacatcgataggtataagaagagatttcataagtttgatgcggaccagaagggtttcatcaccatcgtcgatgtgcaacgagttctggagtccataaacgtgcagatggacgaaaatacactgcacgagatcctcaacgaagttgacctgaataaaaacggacaggttgaactcaatgagttcctgcagctgatgagcgctatccagaaaggacgtgtatccggctccagactcgcgatcctaatgaaaactgccgaggaaaatctcgatcggagagtgcctatccctgtggacagatcttgcgggggcctctag

SEQ ID NO: 37472 - DNA, 2184 bp, Artificial Sequence
  derived and/or modified sequence
atggctttccaaaaagccgtcaagggaactatcctcgtgggcggtggcgcactggcgacagtgcttggcctgtcacagtttgcacattacaggcggaagcagatgaacctggcgtatgttaaggccgcagattgcatcagcgagcccgtgaaccgggagccacctagcagagaggcacagttactcacattgcagaatacatccgagtttgatatccttgtgatcggaggaggagccaccggcagcggctgtgcgctcgatgctgtgactaggggactgaaaacagctctcgtggagagggatgacttctcatcaggaacttcatctagatctactaaacttatacacggtggtgtcagatatcttcaaaaagctattatgaaactggatattgagcagtataggatggtgaaagaggctctgcatgaacgggctaacttactggaaattgccccacacctctcagcaccactgcccattatgctgcctgtgtacaaatggtggcagctgccctactattgggtaggaattaagttgtacgatctggtagctgggagcaactgtttgaagtcctcttatgtgctgagtaaatcacgcgccctggaacacttcccaatgctgcagaaggacaaattggtaggagctatcgtgtactacgacggacagcacaacgatgcccggatgaaccttgctattgctttaacagcggccaggtacggcgctgcgaccgccaactatatggaggtcgtgtctctgctgaaaaagaccgaccctcaaaccggcaaggttagggtgtctggagccagatgcaaggatgtgctgaccggtcaagaatttgatgttcgggccaagtgtgttatcaacgcaaccggcccgttcacagacagtgtgcggaaaatggacgataaggatgccgccgccatatgtcagccctcggccggggttcatatagtgatgcccggctattactccccagaaagtatgggcctgcttgaccctgccaccagcgacggcagggtgatcttttttctgccttggcagaagatgacaattgctgggactaccgatacacccacagatgtcacccaccatcccattccctctgaggaagacataaattttatactcaatgaggtacggaattacctgtcatgcgatgttgaagttcggaggggagatgtgctagctgcatggtcagggatcagacctttagtaaccgatcccaaaagcgcagacacccaatctatcagccggaatcatgtcgtcgatatcagcgaatccgggctcatcacgattgccggtggaaaatggacaacataccggagcatggccgaggacactattaatgccgctgtgaagacccacaacctgaaagccggaccttctcgtacagtggggttatttctgcagggcggtaaagactggtcacctactctctatatacggctcgtacaggactatggcctcgagtccgaggttgctcagcatctggctgccacctacggggacaaggctttcgaagtagctaagatggcctctgtgacaggtaagagatggccaatagtgggcgtgagattagtcagcgaattcccctacatagaagccgaggtgaagtacggcatcaaggagtacgcctgcaccgcggtggatatgatctcccgccgtacccggctggcttttttgaacgttcaggccgccgaggaagccctgccacggatcgtggagctcatgggccgggaactcaactgggatgattataaaaaacaggaacagctggagacagcacggaagttcctatactatgagatgggatacaagtcgcgctccgaacagttaaccgataggtcggaaattagtcttctgccctccgatatagacagatataaaaaaagatttcacaagttcgacgctgaccagaaggggtttataaccatagtggacgttcaacgtgtgctggaatccataaatgttcagatggacgagaacaccctgcatgagattctgaatgaggtcgacttgaacaagaacgggcaggtggagcttaatgagttcctccaactcatgtccgcgattcagaaaggcagggtgagtggctctcggttggccatcctaatgaaaaccgcggaagagaatctcgatcgcagggtccccatccctgttgatagaagttgcggggggctttag

SEQ ID NO: 37473 - DNA, 330 bp, Artificial Sequence
  derived and/or modified sequence
atggcctttcaaaaagcagttaagggcactatccttgtcggcggcggcgcgcttgccaccgtactcggactatcccaatttgcacattatcgacggaagcagatgaaccttgcatacgttaaagccgccgattgcatcagcgaaccggtcaaccgggagccccccagtcgggaagcgcagttgctgaccctgcagaatacctcggaattcgacatcctggtcataggcgggggtgcaacgggaagtgggtgcgctcttgatgcggtaacgcggggtctcaaaacagcactggttgagcgcgacgatttttctagcggtaccagctcttag

SEQ ID NO: 37474 - DNA, 2184 bp, Artificial Sequence
  derived and/or modified sequence
atggctttccaaaaagccgtgaagggaaccattttggtgggtgggggggcccttgctactgtactcggactgagccaattcgcacactaccggcgcaagcaaatgaacctggcttatgtcaaggccgctgactgtatcagtgagcccgtaaatcgggaaccaccatcgcgggaggcacaacttctcacactgcagaatacctccgaattcgatatactggtgatcggcggcggtgctacaggctcgggatgtgccctggacgccgttaccaggggcttaaagacagcgctcgtggagagggacgatttttcctctggaacctcgtccagatcgaccaaactgattcacggaggagtgcgatacttacagaaagcaatcatgaagctggatattgaacagtaccggatggtcaaagaggctctccacgagcgcgctaacctgcttgagatagcccctcacttgagtgctcctctgcccattatgctgccggtttacaagtggtggcagctaccctactattgggtcggtatcaaactgtatgatctcgtggccgggagcaactgtctgaagtcctcctacgtgctgtcaaaatcccgggccttggaacatttccctatgcttcagaaggataagttggtgggggcaatagtttactacgatggacagcacaacgacgctcgcatgaatctggcgatcgcccttacggccgcgcgatacggggccgccaccgccaactacatggaggtggtctcactcctgaaaaagactgatccccagaccggcaaggtcagggtctcaggtgcccgctgtaaagacgtgctaacaggccaagagttcgatgtccgtgcaaaatgtgtcatcaacgccactggccctttcaccgacagcgtgaggaagatggacgataaggatgccgcagcaatttgtcagcccagtgctggagttcatattgtgatgcctggctattacagccctgaaagcatgggcctgttagaccccgcaacaagtgatggacgggtcatttttttcctcccatggcagaaaatgaccatagccgggacgactgatacacccactgacgtgacccaccatccaatcccatctgaggaggatattaatttcattctcaatgaggttcggaactacttaagctgtgatgtggaggtccgtcgcggcgacgtcctggcagcctggtcgggaattcggccactggtaacagatccaaaaagcgccgacacacagtccataagccgcaaccacgtcgttgacattagtgaatccggtctcataaccatcgcggggggaaagtggactacctatagatctatggctgaggatactatcaacgcggctgtcaagacacacaacttaaaggctggcccctccaggactgtgggcctctttctccaaggcggaaaggactggtccccgaccctctatattaggctggttcaggactatggtcttgaaagcgaagtggcgcagcatttagccgctacctacggagacaaagccttcgaggtggctaagatggcctctgtcaccggaaaacgatggcccattgttggcgtgcgtctggtgtcagaattcccttacatagaggctgaagtcaagtatggcatcaaggaatacgcctgcactgccgtggacatgattagcagacgcacacggctcgccttcctgaatgtgcaggctgctgaggaggcacttcccaggatagttgaattaatggggcgagagcttaactgggacgattacaagaaacaggagcagctggagactgcccgcaaatttctgtattatgaaatgggttataaaagcaggtcggagcagctgacagatcgatccgagatctcactcttgccgtccgatatagataggtacaagaaaaggtttcacaaatttgatgcggaccagaaaggcttcatcactattgtggatgtccagagagtgttggagagtattaacgtccagatggatgagaatacattacatgaaattttgaacgaggtcgacttaaacaagaatggacaagttgagctcaacgaattcctgcagcttatgtctgccattcaaaaaggcagagtatcaggctctcgattggccattcttatgaagactgcagaagaaaatttggaccggcgcgttccaatcccagtcgaccgaagttgtggaggattatag

SEQ ID NO: 37475 - DNA, 1140 bp, Artificial Sequence
  derived and/or modified sequence
atggcatttcaaaaggccgtcaaggggaccatcctggtcggagggggagcattggccacagttcttggtctcagtcagtttgcacactaccggcgaaaacaaatgaatcttgcctatgtgaaggccgccgattgcatcagcgaaccagtgaaccgtgaacccccctcccgggaagcccagctcttgactttacaaaacacatctgagtttgatatcctggtaataggcggcggggccactggctcgggctgtgcgctcgatgctgttaccagaggccttaaaacggccctagttgagagagacgacttttccagcggcacatctagcaggagcacaaaactgattcacgggggagttagatatttacagaaggcaatcatgaagctagacatcgagcaataccggatggtgaaggaggctctgcacgagagagccaatcttctagaaattgcacctcatctttccgcacccctgccaattatgctgccagtctacaagtggtggcagcttccctactactgggtggggattaagctgtatgacttagtggctggttcaaactgtcttaagtcaagttacgtgctgagcaagagtagggcccttgagcactttcccatgctgcagaaggataagttagtgggagcaatagtctactacgatggacagcacaatgatgcacggatgaatttggccatcgctctgaccgctgccagatacggtgccgccaccgcgaactacatggaggtggtttccctcttgaaaaagaccgaccctcagactggtaaagtcagagtgtctggggccagatgtaaagatgtattgactggtcaggagtttgacgtcagggcaaaatgcgtgattaacgccaccgggccttttaccgactctgtccgtaagatggacgacaaggacgccgccgcgatctgtcagccatctgccggggtccatatcgtgatgcccggttattattcacctgaaagcatgggcctactggatccagccacctccgacggtcgcgttatctttttccttccctggcagaagatgaccatagctggtacaacggatacccctaccgatgttactcatcatcccatcccatctgaagaggatattaactttatcttgaatgaggtctag

SEQ ID NO: 37476 - DNA, 5801 bp, Artificial Sequence
  derived and/or modified sequence
ttttttttttttgggtggcggggggttgcaagtgggaagcctgctgttcagctgccggggctctccgcctccccccacctgtatgaggctgggtctggggaacctgtgctcagcattccaccccctggagcttgggcttggtcttccctgcgggtccctgcgctgacattcaggcggggagccaggaggcctggcgcgcctccagagcccgccgggggagccgggcgagggttctgggctctgacggcggggtcgcagggtcgcccgcctcctggacacgtctgtaggcctagggaagcctgccggccgggaggtacagagtaggagaagccagatcccagggcggacaacgagaagtcgtcaggctaagaaatggcatttcaaaaggcagtgaaagggacgattcttgttggaggaggtgctcttgcaactgttttaggactttctcagtttgctcattacagaaggaaacaaatgaacctggcctatgttaaagcagcagactgcatttcagaaccagttaacagggagcctccttccagagaagctcagctactgactttgcaaaacacatctgaatttgatatccttgttattggaggaggagcaacaggaagtggctgtgcgctagatgctgtcaccagaggactaaaaacagcccttgtagaaagagatgatttctcatcagggaccagcagcagaagcactaaattgatccatggtggtgtgagatatctgcagaaggccatcatgaagttggatattgagcagtataggatggtaaaagaagcccttcatgagcgtgccaacctgctagaaattgctccccatttatcagctccattgcctataatgcttccagtttacaagtggtggcagttaccttactactgggtaggaatcaagctgtatgatttggttgcaggaagcaattgcctaaaaagcagttatgtcctcagcaaatcaagagcccttgaacatttcccaatgctccagaaggacaaactggtaggagcaattgtctactatgacggacaacataacgatgcacggatgaaccttgccattgctctgactgctgccaggtatggggctgccacagccaattacatggaggtagtgagcttgctcaagaagacagacccccagacagggaaagtgcgtgtgagcggcgcacggtgcaaggatgtcctcacagggcaggaatttgacgtgagagccaaatgtgttatcaatgccacgggacctttcacggactctgtgcgcaaaatggatgataaagacgcagcagctatctgccagccaagtgctggtgtccatattgtgatgcctggttattacagcccagagagcatgggacttcttgacccagcgaccagtgatgggcgagttattttcttcttaccctggcaaaagatgacgatcgctggcactactgatactccaactgatgttacacaccatccaattccttcagaagaagatatcaacttcattttgaatgaagtgcgtaattacctgagttgtgatgttgaagtgagaagaggggatgtcctggcagcatggagtggaatccgtcctcttgttacagaccccaaatctgcagatactcagtctatctcccgaaatcatgttgttgatatcagtgagagtggccttattactatagcaggtggaaagtggacaacttatcggtctatggcagaagataccataaatgctgctgtcaaaactcataatttaaaagcaggaccaagtagaacagttgggcttttccttcaagggggtaaagattggagccccacactctacattaggcttgtgcaggattatggacttgaaagcgaggtggcacagcatcttgccgccacctatggtgataaggcctttgaggtggccaaaatggcaagtgtgactggcaaaaggtggcctattgttggagtacgtcttgtgtcagaatttccatatattgaagcagaggtgaaatatgggattaaggagtatgcctgcactgctgtggatatgatttcacgtcgtactcgcctggcctttctaaatgtccaggcagcagaggaagccctacccaggattgttgaactgatgggcagggaactgaattgggatgattataagaagcaggaacaacttgaaacagccaggaagtttctatattatgaaatgggctataaatctcgatcagaacagttaacagatcgctctgaaattagcctactgccttcagacattgacaggtataagaagagatttcataagtttgatgcagaccagaaaggctttattaccattgttgatgttcagcgtgtattagagagtatcaatgtccaaatggatgaaaatacactccatgaaattctaaatgaagttgatttgaataaaaatggacaggttgaactcaatgaatttttgcagctgatgagtgctattcaaaaaggaagggtatctggaagccggcttgctatactaatgaaaactgcagaagagaacctcgacagaagagttccaattccagtggaccgtagttgtggaggattgtgagtctgggcagtaaatccacagccaacaaacatagaaacgacaaatcaccatgtaacaaccagagatgactgaaaccactctgaaataatgaatgtggatagctgccttttttaacactagaaaacattccaaaactttaaggtgttggtgtatttgccagctttatttgctgtactttatttgtatttgccattcagtctagcttttaagtatatttttttctttttctcattttcaatgcacattagttttgcatctgttttgtgacctgttagatgtgacacattctctttttgtttattcccttattctaaatgagttctaaaaacataatattttggcaaaaattgaaaaaagctggagacattttgtgacatgcatacagatagcatgtgttattaaaaagagttgcctattgaaatgatcatgtttctggagaaattaagcttatagacagcatgtgttattaaaaagagttacctattgaaatgatagtgtttctggagatttctcagccccatcttcctccagcttgtctaccttcctcatgcaaacaatattccacatttttatatctagagcatgactggctaactggagagggaaggaaaagtttagatctggttactggagcaagtctcaaagagaaactctgaaagcttccagaatcacaggtataagataaggatagcattgacatttgctgggagttacagtgatagtttcatctcagcagttcatttttttcttcagtcactgctggttttctttgactattatagttgccaggaagatccttgctcttcttactttaaaaccagcatttaagtggcaatttggatgtaataggatgagaccaaatttatctaattattacagtagtaatacatttaagagttaaaaatgtgtttttatatatccacatatgataacaaaagattcaattcccaagcctaaattttgaagcatgtggtattgtcaaatctagcttaccatcttttttgggggtacttgcaaccatagtaaaggaagatggaatagactttagttaactttaattataattatatgttaaataaggcacataaccagtttccaaggtcatcatggttgcttaaagtctttccccttctgtactccatggaaatattctcagtaaaccaaaaacaaaaatggaaaaataatcaccaacccccatcccgacacacacacagagtccaaagcaaaagtcagtgtgtattgaatttaacaagtaatgcagtttgggatgcttttgctacattttggtggcattttaactagttatctgaatatttattaatcgtacttcctcttgtaaagttaactacttacttttttgttgttgtttttttaacatcaggttctgtatctaataggagatgtaacactttatttcatggcaggtttttattgcagagacttgaagtcttagttttttaaactggcacataaaacactttttgctgttatttttatttatgtcaatactgcagagtatctttatgccttattcaagtggattctgagcctgtatgtcacaatgtaaacactggaggttcactcacctacgcactcacccaccacctctgaaagaaacagaaactgcagagaaagacagcatcttagctcattttgtttttaaatgaggttttagacgcttgccacttcctaagggaaatcctaaaacagagcaagtgatgctcccaggtatcactgtgaacttttttctttcaaagtgtgaatttttacactggctttttcatttttttaaagtaattgaagcttgtggctttacaacttagtgttttttgctatccagataacaagtttcattgtttagaacccagtgacacttaataggtagataaattgtcctttaaaatatcccagatgatatacacaatatggtacatttgtgctctctctctctgtttttctctctttctctttctagttagatcaagataacgatgacttgtaccctccctgattctgttacagtagggcccgggcagatctgtgtttgttaaacaggccttgtttgtgcatgctttgctatgaatgaagttcctttaaggacaaagaaaagcacacttttcttcttttgagcatatctgcttttactttaaatctgctaatttctaaaatgtagagtccttcaccaatcccagagactcaatttggaaatgaactgatttcaagccgttactgtgaataaagcaccccagcattttgtataagctcttaattaaacctgtacagcttctttacctgatttaagaaagggagacaagcaataggggggaataagcttcttcaaaattcattccaagcacaaaagaaattttttccctttgcatataaacttgacatcagttgattctgttggggtcggggtgggtatgcagggattgccttttattatcaagtgatttatttcaagagcctttgaggggattcaggtgaaggaacccccatctgtgctggagagttggatactcctttaaatagcccccaccacagtcataacaataatgataatgctggattatttgttaagccaaggttgtctgcctcatatccatcatgctgtttgcaatattcttgctttcaatcaatttatactgagtgtaactttaggatttctgctattaaatgcatgctctctatcctgcttcagtttctggctttgctttgtctgtttcaaaatatgtagcttcctcttttgtacaacaaaaaactcattctcacttttactaaatatactgtaggagtcatcattgatgttatttttctcttatgtatctgtaaagatttttggcatatgaatgtaatattaaagtcaatgatgctataacttgcgatgtttgcatcatgtcaacctttttgaaggagtgaaaaagccctactatgtttttaaatagcaagtgtaagctcagtgctagagtggatatacacaccgcatgttttcatatgtggcacttttatgtatcatgttgggttattgttctagactggactgttaaatactatgtttgaggctgggttgtcatttttataactgtcttggtgttttatggccattatttattacttttgatacacagaatgagctgcatgcatttatagagcaataagaggatgtatttaatgtgccttgtttttaactgaataagaactggaagcatgaatcaataaaactgattaaaatggtctatttgcta

SEQ ID NO: 37477 - DNA, 1939 bp, Artificial Sequence
  derived and/or modified sequence
cagggcggacaacgagaagtcgtcaggctaagaaatggcatttcaaaaggcagtgaaagggacgattcttgttggaggaggtgctcttgcaactgttttaggactttctcagtttgctcattacagaaggaaacaagacaacataacgatgcacggatgaaccttgccattgctctgactgctgccaggtatggggctgccacagccaattacatggaggtagtgagcttgctcaagaagacagacccccagacagggaaagtgcgtgtgagcggcgcacggtgcaaggatgtcctcacagggcaggaatttgacgtgagagccaaatgtgttatcaatgccacgggacctttcacggactctgtgcgcaaaatggatgataaagacgcagcagctatctgccagccaagtgctggtgtccatattgtgatgcctggttattacagcccagagagcatgggacttcttgacccagcgaccagtgatgggcgagttattttcttcttaccctggcaaaagatgacgatcgctggcactactgatactccaactgatgttacacaccatccaattccttcagaagaagatatcaacttcattttgaatgaagtgcgtaattacctgagttgtgatgttgaagtgagaagaggggatgtcctggcagcatggagtggaatccgtcctcttgttacagaccccaaatctgcagatactcagtctatctcccgaaatcatgttgttgatatcagtgagagtggccttattactatagcaggtggaaagtggacaacttatcggtctatggcagaagataccataaatgctgctgtcaaaactcataatttaaaagcaggaccaagtagaacagttgggcttttccttcaagggggtaaagattggagccccacactctacattaggcttgtgcaggattatggacttgaaagcgaggtggcacagcatcttgccgccacctatggtgataaggcctttgaggtggccaaaatggcaagtgtgactggcaaaaggtggcctattgttggagtacgtcttgtgtcagaatttccatatattgaagcagaggtgaaatatgggattaaggagtatgcctgcactgctgtggatatgatttcacgtcgtactcgcctggcctttctaaatgtccaggcagcagaggaagccctacccaggattgttgaactgatgggcagggaactgaattgggatgattataagaagcaggaacaacttgaaacagccaggaagtttctatattatgaaatgggctataaatctcgatcagaacagttaacagatcgctctgaaattagcctactgccttcagacattgacaggtataagaagagatttcataagtttgatgcagaccagaaaggctttattaccattgttgatgttcagcgtgtattagagagtatcaatgtccaaatggatgaaaatacactccatgaaattctaaatgaagttgatttgaataaaaatggacaggttgaactcaatgaatttttgcagctgatgagtgctattcaaaaaggaagggtatctggaagccggcttgctatactaatgaaaactgcagaagagaacctcgacagaagagttccaattccagtggaccgtagttgtggaggattgtgagtctgggcagtaaatccacagccaacaaacatagaaacgacaaatcaccatgtaacaaccagagatgactgaaaccactctgaaataatgaatgtggatagctgccttttttaacactagaaaacattccaaaactttaaggtgttggtgtatttgccagctttatttgctgtactttatttgtatttgccattcagtctagcttttaagtatatttttttctttttctcattttcaatgcacattagttttgcatctgttttgtgacctgttagatgtg

SEQ ID NO: 37478 - DNA, 2397 bp, Artificial Sequence
  derived and/or modified sequence
agtcacaacactcatatcctagggaccaccacactgctatgagtcaggcatgtgcgttgtttaaggctaagaaatggcatttcaaaaggcagtgaaagggacgattcttgttggaggaggtgctcttgcaactgttttaggactttctcagtttgctcattacagaaggaaacaaatgaacctggcctatgttaaagcagcagactgcatttcagaaccagttaacagggagcctccttccagagaagctcagctactgactttgcaaaacacatctgaatttgatatccttgttattggaggaggagcaacaggaagtggctgtgcgctagatgctgtcaccagaggactaaaaacagcccttgtagaaagagatgatttctcatcagggaccagcagcagaagcactaaattgatccatggtggtgtgagatatctgcagaaggccatcatgaagttggatattgagcagtataggatggtaaaagaagcccttcatgagcgtgccaacctgctagaaattgctccccatttatcagctccattgcctataatgcttccagtttacaagtggtggcagttaccttactactgggtaggaatcaagctgtatgatttggttgcaggaagcaattgcctaaaaagcagttatgtcctcagcaaatcaagagcccttgaacatttcccaatgctccagaaggacaaactggtaggagcaattgtctactatgacggacaacataacgatgcacggatgaaccttgccattgctctgactgctgccaggtatggggctgccacagccaattacatggaggtagtgagcttgctcaagaagacagacccccagacagggaaagtgcgtgtgagcggcgcacggtgcaaggatgtcctcacagggcaggaatttgacgtgagagccaaatgtgttatcaatgccacgggacctttcacggactctgtgcgcaaaatggatgataaagacgcagcagctatctgccagccaagtgctggtgtccatattgtgatgcctggttattacagcccagagagcatgggacttcttgacccagcgaccagtgatgggcgagttattttcttcttaccctggcaaaagatgacgatcgctggcactactgatactccaactgatgttacacaccatccaattccttcagaagaagatatcaacttcattttgaatgaagtgcgtaattacctgagttgtgatgttgaagtgagaagaggggatgtcctggcagcatggagtggaatccgtcctcttgttacagaccccaaatctgcagatactcagtctatctcccgaaatcatgttgttgatatcagtgagagtggccttattactatagcaggtggaaagtggacaacttatcggtctatggcagaagataccataaatgctgctgtcaaaactcataatttaaaagcaggaccaagtagaacagttgggcttttccttcaagggggtaaagattggagccccacactctacattaggcttgtgcaggattatggacttgaaagcgaggtggcacagcatcttgccgccacctatggtgataaggcctttgaggtggccaaaatggcaagtgtgactggcaaaaggtggcctattgttggagtacgtcttgtgtcagaatttccatatattgaagcagaggtgaaatatgggattaaggagtatgcctgcactgctgtggatatgatttcacgtcgtactcgcctggcctttctaaatgtccaggcagcagaggaagccctacccaggattgttgaactgatgggcagggaactgaattgggatgattataagaagcaggaacaacttgaaacagccaggaagtttctatattatgaaatgggctataaatctcgatcagaacagttaacagatcgctctgaaattagcctactgccttcagacattgacaggtataagaagagatttcataagtttgatgcagaccagaaaggctttattaccattgttgatgttcagcgtgtattagagagtatcaatgtccaaatggatgaaaatacactccatgaaattctaaatgaagttgatttgaataaaaatggacaggttgaactcaatgaatttttgcagctgatgagtgctattcaaaaaggaagggtatctggaagccggcttgctatactaatgaaaactgcagaagagaacctcgacagaagagttccaattccagtggaccgtagttgtggaggattgtgagtctgggcagtaaatccacagccaacaaacatagaaacgacaaatcaccatgtaacaaccagagatgactgaaaccactctgaaataatgaatgtggatagctgccttttttaacactagaaaacattccaaaactttaa

SEQ ID NO: 37479 - DNA, 2640 bp, Artificial Sequence
  derived and/or modified sequence
agtcacaacactcatatcctagggaccaccacactgctatgagtcaggcatgtgcgttgtttaaggctaagaaatggcatttcaaaaggcagtgaaagggacgattcttgttggaggaggtgctcttgcaactgttttaggactttctcagtttgctcattacagaaggaaacaaatgaacctggcctatgttaaagcagcagactgcatttcagaaccagttaacagggagcctccttccagagaagctcagctactgactttgcaaaacacatctgaatttgatatccttgttattggaggaggagcaacaggaagtggctgtgcgctagatgctgtcaccagaggactaaaaacagcccttgtagaaagagatgatttctcatcagggaccagcagcagaagcactaaattgatccatggtggtgtgagatatctgcagaaggccatcatgaagttggatattgagcagtataggatggtaaaagaagcccttcatgagcgtgccaacctgctagaaattgctccccatttatcagctccattgcctataatgcttccagtttacaagtggtggcagttaccttactactgggtaggaatcaagctgtatgatttggttgcaggaagcaattgcctaaaaagcagttatgtcctcagcaaatcaagagcccttgaacatttcccaatgctccagaaggacaaactggtaggagcaattgtctactatgacggacaacataacgatgcacggatgaaccttgccattgctctgactgctgccaggtatggggctgccacagccaattacatggaggtagtgagcttgctcaagaagacagacccccagacagggaaagtgcgtgtgagcggcgcacggtgcaaggatgtcctcacagggcaggaatttgacgtgagagccaaatgtgttatcaatgccacgggacctttcacggactctgtgcgcaaaatggatgataaagacgcagcagctatctgccagccaagtgctggtgtccatattgtgatgcctggttattacagcccagagagcatgggacttcttgacccagcgaccagtgatgggcgagttattttcttcttaccctggcaaaagatgacgatcgctggcactactgatactccaactgatgttacacaccatccaattccttcagaagaagatatcaacttcattttgaatgaagtgcgtaattacctgagttgtgatgttgaagtgagaagaggggatgtcctggcagcatggagtggaatccgtcctcttgttacagaccccaaatctgcagatactcagtctatctcccgaaatcatgttgttgatatcagtgagagtggccttattactatagcaggtggaaagtggacaacttatcggtctatggcagaagataccataaatgctgctgtcaaaactcataatttaaaagcaggaccaagtagaacagttgggcttttccttcaagggggtaaagattggagccccacactctacattaggcttgtgcaggattatggacttgaaagcgaggtggcacagcatcttgccgccacctatggtgataaggcctttgaggtggccaaaatggcaagtgtgactggcaaaaggtggcctattgttggagtacgtcttgtgtcagaatttccatatattgaagcagaggtgaaatatgggattaaggagtatgcctgcactgctgtggatatgatttcacgtcgtactcgcctggcctttctaaatgtccaggcagcagaggaagccctacccaggattgttgaactgatgggcagggaactgaattgggatgattataagaagcaggaacaacttgaaacagccaggaagtttctatattatgaaatgggctataaatctcgatcagaacagttaacagatcgctctgaaattagcctactgccttcagacattgacaggtataagaagagatttcataagtttgatgcagaccagaaaggctttattaccattgttgatgttcagcgtgtattagagagtatcaatgtccaaatggatgaaaatacactccatgaaattctaaatgaagttgatttgaataaaaatggacaggttgaactcaatgaatttttgcagctgatgagtgctattcaaaaaggaagggtatctggaagccggcttgctatactaatgaaaactgcagaagagaacctcgacagaagagttccaattccagtggaccgtagttgtggaggattatgagatttaaaatcattttgatgatttctctaagattatgttgagtttctaaaacttggtttgtgttaaatctgttcattgatttggagactgacagatataaaagatgtaaaacttttttacatgttcatagccttctatgaagagtgtggaagaatcacaacaatgaagagaagatatgtttcttggggagcatgttcaatctaattcaagtagatacatggagtcgtgaagataaattctgatcacaccgcattctggtcatcattacctagttgaagaggtttattggagaagaactatcagtgttttaaagcagtggtcttcaaacgggggcacacaaagactttccaaggggggtacataaatataaatagttttaaggt

SEQ ID NO: 37480 - DNA, 456 bp, Artificial Sequence
  derived and/or modified sequence
attagtacagcacccagaggtcttcggagcaaagctgttaaagaagtggggtccatttgagccccaactttgccttccttaggtccccttgggcttgtctagccctaggagttccaacaagctaagaaatggcatttcaaaaggcagtgaaagggacgattcttgttggaggaggtgctcttgcaactgttttaggactttctcagtttgctcattacagaaggaaacaaatgaacctggcctatgttaaagcagcagactgcatttcagaaccagttaacagggagcctccttccagagaagctcagctactgactttgcaaaacacatctgaatttgatatccttgttattggaggaggagcaacaggaagtggctgtgcgctagatgctgtcaccagaggactaaaaacagcccttgtagaaagagatgatttctcatcagggaccagcagca

SEQ ID NO: 37481 - DNA, 2457 bp, Artificial Sequence
  derived and/or modified sequence
cccgcgcgcctcgctgggagcacccgggccgaggctctgattctggggggaggccgactccaccctggctggaggaactgggtgctcctgcccgctggcccctcgcgcgtgaggatctatctcaggctaagaaatggcatttcaaaaggcagtgaaagggacgattcttgttggaggaggtgctcttgcaactgttttaggactttctcagtttgctcattacagaaggaaacaaatgaacctggcctatgttaaagcagcagactgcatttcagaaccagttaacagggagcctccttccagagaagctcagctactgactttgcaaaacacatctgaatttgatatccttgttattggaggaggagcaacaggaagtggctgtgcgctagatgctgtcaccagaggactaaaaacagcccttgtagaaagagatgatttctcatcagggaccagcagcagaagcactaaattgatccatggtggtgtgagatatctgcagaaggccatcatgaagttggatattgagcagtataggatggtaaaagaagcccttcatgagcgtgccaacctgctagaaattgctccccatttatcagctccattgcctataatgcttccagtttacaagtggtggcagttaccttactactgggtaggaatcaagctgtatgatttggttgcaggaagcaattgcctaaaaagcagttatgtcctcagcaaatcaagagcccttgaacatttcccaatgctccagaaggacaaactggtaggagcaattgtctactatgacggacaacataacgatgcacggatgaaccttgccattgctctgactgctgccaggtatggggctgccacagccaattacatggaggtagtgagcttgctcaagaagacagacccccagacagggaaagtgcgtgtgagcggcgcacggtgcaaggatgtcctcacagggcaggaatttgacgtgagagccaaatgtgttatcaatgccacgggacctttcacggactctgtgcgcaaaatggatgataaagacgcagcagctatctgccagccaagtgctggtgtccatattgtgatgcctggttattacagcccagagagcatgggacttcttgacccagcgaccagtgatgggcgagttattttcttcttaccctggcaaaagatgacgatcgctggcactactgatactccaactgatgttacacaccatccaattccttcagaagaagatatcaacttcattttgaatgaagtgcgtaattacctgagttgtgatgttgaagtgagaagaggggatgtcctggcagcatggagtggaatccgtcctcttgttacagaccccaaatctgcagatactcagtctatctcccgaaatcatgttgttgatatcagtgagagtggccttattactatagcaggtggaaagtggacaacttatcggtctatggcagaagataccataaatgctgctgtcaaaactcataatttaaaagcaggaccaagtagaacagttgggcttttccttcaagggggtaaagattggagccccacactctacattaggcttgtgcaggattatggacttgaaagcgaggtggcacagcatcttgccgccacctatggtgataaggcctttgaggtggccaaaatggcaagtgtgactggcaaaaggtggcctattgttggagtacgtcttgtgtcagaatttccatatattgaagcagaggtgaaatatgggattaaggagtatgcctgcactgctgtggatatgatttcacgtcgtactcgcctggcctttctaaatgtccaggcagcagaggaagccctacccaggattgttgaactgatgggcagggaactgaattgggatgattataagaagcaggaacaacttgaaacagccaggaagtttctatattatgaaatgggctataaatctcgatcagaacagttaacagatcgctctgaaattagcctactgccttcagacattgacaggtataagaagagatttcataagtttgatgcagaccagaaaggctttattaccattgttgatgttcagcgtgtattagagagtatcaatgtccaaatggatgaaaatacactccatgaaattctaaatgaagttgatttgaataaaaatggacaggttgaactcaatgaatttttgcagctgatgagtgctattcaaaaaggaagggtatctggaagccggcttgctatactaatgaaaactgcagaagagaacctcgacagaagagttccaattccagtggaccgtagttgtggaggattgtgagtctgggcagtaaatccacagccaacaaacatagaaacgacaaatcaccatgtaacaaccagagatgactgaaaccactctgaaataatgaatgtggatagctgccttttttaacactagaaaacattccaaaactttaa

SEQ ID NO: 37482 - DNA, 1961 bp, Artificial Sequence
  derived and/or modified sequence
ggcccctcgcgcgtgaggatctatctcaggctaagaaatggcatttcaaaaggcagtgaaagggacgattcttgttggaggaggtgctcttgcaactgttttaggactttctcagtttgctcattacagaaggaaacaaatgaacctggcctatgttaaagcagcagactgcatttcagaaccagttaacagggagcctccttccagagaagctcagctactgactttgcaaaacacatctgaatttgatatccttgttattggaggaggagcaacaggaagtggctgtgcgctagatgctgtcaccagaggactaaaaacagcccttgtagaaagagatgatttctcatcagggaccagcagcagaagcactaaattgatccatggtggtgtgagatatctgcagaaggccatcatgaagttggatattgagcagtataggatggtaaaagaagcccttcatgagcgtgccaacctgctagaaattgctccccatttatcagctccattgcctataatgcttccagtttacaagtggtggcagttaccttactactgggtaggaatcaagctgtatgatttggttgcaggaagcaattgcctaaaaagcagttatgtcctcagcaaatcaagagcccttgaacatttcccaatgctccagaaggacaaactggtaggagcaattgtctactatgacggacaacataacgatgcacggatgaaccttgccattgctctgactgctgccaggtatggggctgccacagccaattacatggaggtagtgagcttgctcaagaagacagacccccagacagggaaagtgcgtgtgagcggcgcacggtgcaaggatgtcctcacagggcaggaatttgacgtgagagccaaatgtgttatcaatgccacgggacctttcacggactctgtgcgcaaaatggatgataaagacgcagcagctatctgccagccaagtgctggtgtccatattgtgatgcctggttattacagcccagagagcatgggacttcttgacccagcgaccagtgatgggcgagttattttcttcttaccctggcaaaagatgacgatcgctggcactactgatactccaactgatgttacacaccatccaattccttcagaagaagatatcaacttcattttgaatgaagtataagaagagatttcataagtttgatgcagaccagaaaggctttattaccattgttgatgttcagcgtgtattagagagtatcaatgtccaaatggatgaaaatacactccatgaaattctaaatgaagttgatttgaataaaaatggacaggttgaactcaatgaatttttgcagctgatgagtgctattcaaaaaggaagggtatctggaagccggcttgctatactaatgaaaactgcagaagagaacctcgacagaagagttccaattccagtggaccgtagttgtggaggattgtgagtctgggcagtaaatccacagccaacaaacatagaaacgacaaatcaccatgtaacaaccagagatgactgaaaccactctgaaataatgaatgtggatagctgccttttttaacactagaaaacattccaaaactttaaggtgttggtgtatttgccagctttatttgctgtactttatttgtatttgccattcagtctagcttttaagtatatttttttctttttctcattttcaatgcacattagttttgcatctgttttgtgacctgttagatgtgacacattctctttttgtttattcccttattctaaatgagttctaaaaacataatattttggcaaaaattgaaaaaagctggagacattttgtgacatgcatacagatagcatgtgttattaaaaagagttgcctattgaaatgatcatgtttctggagaaattaagcttatagacagcatgtgttattaaaaagagttacctattg

SEQ ID NO: 37483 - DNA, 2184 bp, Artificial Sequence
  derived and/or modified sequence
atggccttccagaaggctgtgaagggcaccatcctggtgggcggcggggccctggccaccgtgctgggcctgagccagtttgcccactacagaaggaagcagatgaacctggcctacgtgaaggctgctgactgcatcagcgagcctgtgaaccgggagccccccagccgggaggcccagctgctgaccctgcagaacaccagcgagtttgacatcctggtgattggaggaggagccaccggcagcggctgtgccctggatgctgtgacccggggcctgaagacagccctggtggagagagatgacttcagcagcggcaccagcagccgcagcaccaagctgatccacggcggcgtgcgctacctgcagaaggccatcatgaagctggacatcgagcagtacaggatggtgaaggaggccctgcacgagcgggccaacctgctggagatcgccccccacctgagcgcccccctgcccatcatgctgcctgtgtacaagtggtggcagctgccctactactgggtgggcatcaagctgtatgacctggtggccggcagcaactgcctgaagagcagctatgtgctgagcaagagccgggccctggagcacttccccatgctgcagaaggacaagctggtgggcgccatcgtgtactatgatggccagcacaatgatgccaggatgaacctggccatcgccctgacagctgcccgctatggagctgccacagccaactacatggaggtggtgtccctgctgaagaagacagacccccagacaggcaaggtgcgggtgtctggggcccgctgcaaggatgtgctgaccggccaggagtttgatgtgcgggccaagtgtgtgatcaatgccaccggccccttcacagacagcgtgaggaagatggatgacaaggatgctgctgccatctgccagcccagcgctggggtgcacatcgtgatgcctggctactacagccctgagagcatgggcctgctggaccctgccaccagtgatggccgggtcatcttcttcctgccctggcagaagatgaccatcgccggcaccacagacacccccacagatgtgacccaccaccccatccccagcgaggaggacatcaacttcatcctgaatgaggtgaggaactacctgagctgtgatgtggaggtgagaagaggagatgtgctggccgcctggagcggcatccggcccctggtgacagaccccaagtctgctgacacccagagcatcagcaggaaccacgtggtggacatcagcgagagcggcctcatcaccatcgccggcggcaagtggaccacctaccgctccatggccgaggacaccatcaatgctgctgtgaagacccacaacctgaaggccggccccagcaggacagtgggcctcttcctgcagggcggcaaggactggagccccaccctgtacatccggctggtgcaggactatggcctggagagcgaggtggcccagcacctggccgccacctatggagacaaggcctttgaggtggccaagatggcctctgtgacaggcaagcgctggcccatcgtgggcgtgcggctggtgtctgagttcccctacattgaagctgaggtgaagtatggcatcaaggagtatgcctgcacagctgtggacatgatcagcaggaggacccggctggccttcctgaatgtgcaggccgctgaggaggccctgcccagaattgtggagctgatgggccgggagctgaactgggatgactacaagaagcaggagcagctggagacagccaggaagttcctgtactatgagatgggctacaagagccgctctgagcagctgacagacagaagtgagatcagcctgctgcccagcgacatcgaccgctacaagaagcgcttccacaagtttgatgctgaccagaagggcttcatcaccatcgtggatgtgcagagggtgctggagagcatcaacgtgcagatggatgagaacaccctgcacgagatcctgaatgaggtggacctgaacaagaatggccaggtggagctgaatgagttcctgcagctgatgtctgccatccagaagggccgggtgtctggcagccggctggccatcctgatgaagacagctgaggagaacctggaccggcgggtgcccatccctgtggacaggagctgtggcggcctgtag

SEQ ID NO: 37484 - DNA, 1503 bp, Artificial Sequence
  derived and/or modified sequence
atgaacctggccatcgccctgacagctgcccgctacggggccgccacagccaactacatggaggtggtgtccctgctgaagaagacagacccccagacaggcaaggtgcgggtgtctggggcccgctgcaaggatgtgctgaccggccaggagtttgatgtgcgggccaagtgtgtgatcaatgccaccggccccttcacagattctgtgaggaagatggatgacaaggatgctgctgccatctgccagcccagcgctggggtgcacatcgtgatgcctggctactacagccctgagagcatgggcctgctggaccctgccaccagtgatggccgggtcatcttcttcctgccctggcagaagatgaccatcgccggcaccacagacacccccacagatgtgacccaccaccccatccccagcgaggaggacatcaacttcatcctgaatgaggtgaggaactacctgagctgtgatgtggaggtgagaagaggagatgtgctggccgcctggagcggcatccggcccctggtgacagaccccaagtctgctgacacccagagcatcagcagaaatcatgtggtggacatcagcgagagcggcctcatcaccatcgccggcggcaagtggaccacctaccgctccatggccgaggacaccatcaatgctgctgtgaagacccacaacctgaaggccggccccagcaggacagtgggcctcttcctgcagggcggcaaggactggagccccaccctgtacatccggctggtgcaggactatggcctggagagcgaggtggcccagcacctggccgccacctacggggacaaggcctttgaggtggccaagatggcctctgtgacaggcaagcgctggcccatcgtgggcgtgcggctggtgtctgagttcccctacatcgaggccgaggtgaagtatggcatcaaggagtatgcctgcacagctgtggacatgatcagcaggaggacccggctggccttcctgaatgtgcaggccgctgaggaggccctgccccgcatcgtggagctgatgggccgggagctgaactgggatgactacaagaagcaggagcagctggagacagccaggaagttcctgtactatgagatgggctacaagagccgctctgagcagctgacagacagaagtgagatcagcctgctgcccagcgacatcgaccgctacaagaagcgcttccacaagtttgatgctgaccagaagggcttcatcaccatcgtggatgtgcagagggtgctggagagcatcaacgtgcagatggatgagaacaccctgcacgagatcctgaatgaggtggacctgaacaagaatggccaggtggagctgaatgagttcctgcagctgatgtctgccatccagaagggccgggtgtctggcagccggctggccatcctgatgaagacagctgaggagaacctggacagaagagtgcccatccctgtggacaggagctgtggcggcctgtag

SEQ ID NO: 37485 - DNA, 330 bp, Artificial Sequence
  derived and/or modified sequence
atggccttccagaaggctgtgaagggcaccatcctggtgggcggcggggccctggccaccgtgctgggcctgagccagtttgcccactacagaaggaagcagatgaacctggcctacgtgaaggctgctgactgcatcagcgagcctgtgaaccgggagccccccagccgggaggcccagctgctgaccctgcagaacaccagcgagtttgacatcctggtgattggaggaggagccaccggcagcggctgtgccctggatgctgtgacccggggcctgaagacagccctggtggagagagatgacttcagcagcggcaccagcagctag

SEQ ID NO: 37486 - DNA, 1140 bp, Artificial Sequence
  derived and/or modified sequence
atggccttccagaaggctgtgaagggcaccatcctggtgggcggcggggccctggccaccgtgctgggcctgagccagtttgcccactacagaaggaagcagatgaacctggcctacgtgaaggctgctgactgcatcagcgagcctgtgaaccgggagccccccagccgggaggcccagctgctgaccctgcagaacaccagcgagtttgacatcctggtgattggaggaggagccaccggcagcggctgtgccctggatgctgtgacccggggcctgaagacagccctggtggagagagatgacttcagcagcggcaccagcagccgcagcaccaagctgatccacggcggcgtgcgctacctgcagaaggccatcatgaagctggacatcgagcagtacaggatggtgaaggaggccctgcacgagcgggccaacctgctggagatcgccccccacctgagcgcccccctgcccatcatgctgcctgtgtacaagtggtggcagctgccctactactgggtgggcatcaagctgtatgacctggtggccggcagcaactgcctgaagagcagctatgtgctgagcaagagccgggccctggagcacttccccatgctgcagaaggacaagctggtgggcgccatcgtgtactatgatggccagcacaatgatgccaggatgaacctggccatcgccctgacagctgcccgctatggagctgccacagccaactacatggaggtggtgtccctgctgaagaagacagacccccagacaggcaaggtgcgggtgtctggggcccgctgcaaggatgtgctgaccggccaggagtttgatgtgcgggccaagtgtgtgatcaatgccaccggccccttcacagacagcgtgaggaagatggatgacaaggatgctgctgccatctgccagcccagcgctggggtgcacatcgtgatgcctggctactacagccctgagagcatgggcctgctggaccctgccaccagtgatggccgggtcatcttcttcctgccctggcagaagatgaccatcgccggcaccacagacacccccacagatgtgacccaccaccccatccccagcgaggaggacatcaacttcatcctgaatgaggtgtag

SEQ ID NO: 37487 - DNA, 2184 bp, Artificial Sequence
  derived and/or modified sequence
atggccttccagaaggccgtgaagggcaccatcctggtgggcggcggagccctggcgaccgtgctggggctcagtcagttcgcccactatcgtcggaaacaaatgaaccttgcatatgtgaaagctgctgactgtatcagtgaacccgttaatagggagcctccctctagagaggcccagctcttaactttacagaacacctctgagtttgatattctggtcatcggaggcggcgccacaggtagtgggtgcgccctggatgcagtaacacggggtctcaaaacagctcttgtggagcgagacgacttctcgagtggaaccagctccagatccactaagcttatccacggtggcgtgaggtatttgcaaaaagcaattatgaagctggatattgaacaataccgaatggtgaaggaggccttacacgagagggctaacctgctcgagatcgctccacacttgtcagctcctttgccaattatgttacctgtgtacaagtggtggcagctgccgtattactgggtgggtatcaagttgtatgatttagtggcaggtagtaactgcctaaaaagctcatacgtgctgtctaagtcgcgggctctagagcactttcccatgctgcagaaggataagctagtgggagccatcgtttattatgatggccagcataacgacgcaaggatgaatttggcgatagctctgacagcagcacggtacggtgccgctactgcgaactacatggaggtcgtgtcactgctcaagaagaccgatccccaaactggtaaggttcgcgttagcggggctagatgtaaagatgtgctgaccggccaggaattcgacgtgagagcaaagtgtgttataaacgctacgggcccttttaccgactctgtacgtaaaatggacgataaggacgctgcagcaatttgtcagccatctgccggcgttcacatcgttatgccagggtactattctccagaaagtatgggtctgttagatcctgcaacgtctgatggccgggttatcttttttctaccatggcagaaaatgacgatagccggaaccacggacaccccaaccgacgtgacacaccacccaatcccgtctgaagaggacatcaattttattctgaatgaggttcgaaattatctgtcgtgcgatgtcgaagtcagaaggggcgatgtacttgccgcatggagcggcattaggcctctggtgaccgaccctaaatccgccgacacccagtccataagccggaaccacgttgttgacataagcgagagtggcctaataacaatagcaggaggcaagtggaccacctacagatcaatggccgaagatactatcaatgctgcagtgaagacccataacctgaaagccggcccttcgcggaccgtggggctcttcctgcaaggcggcaaggactggtcccccactctgtatattcgcctggtgcaggactatggcctcgagagcgaagtagctcagcatcttgctgcaacctacggagacaaggcttttgaagtcgccaaaatggcgagtgtgaccggaaaaaggtggccaattgtaggagtgcgcctggtgtccgaattcccatatatcgaagcagaggttaagtacggcatcaaagagtacgcctgtaccgctgtggatatgatatcacgtcgaacacgactggctttcctgaatgtccaggccgccgaagaggccctgcctcgcattgtcgaactgatggggcgagagctcaactgggacgattataagaaacaggagcagctggaaaccgctcgcaagttcctctattacgagatggggtacaaaagccgctccgagcagttgacagacagatccgagatatccctgctgccctctgatatcgatcggtacaaaaagcggttccataaatttgatgcagaccagaaaggcttcattaccattgtagacgttcagagggttcttgagagtatcaatgtgcagatggatgaaaatacattacatgagatcctaaacgaggtggacctcaacaaaaacggccaggttgagcttaatgagtttctgcaactcatgtcagctatccagaagggccgtgtgtccggttcaaggctggcaatcctaatgaagactgcagaagagaaccttgatagacgagtccctatacccgtcgaccggagctgcggcggcctgtag

SEQ ID NO: 37488 - DNA, 1503 bp, Artificial Sequence
  derived and/or modified sequence
atgaacctggccatcgccctgaccgccgcccggtacggcgccgccacagcaaactatatggaagtggtgagtttgttaaaaaagacggatcctcagacagggaaggttagggtgtctggtgcccgatgtaaagacgttctaacgggtcaggagttcgatgtgcgcgcaaagtgtgtcatcaatgctacaggcccatttacagacagcgtgcgaaagatggacgacaaggatgcggctgccatctgtcaaccctccgccggcgtgcatattgtaatgcccggatattactcccccgaatctatgggcctcttggacccagccacatccgatggcagagtgatttttttcctgccatggcagaagatgacgatcgcaggcaccaccgacactcccaccgatgtcactcatcatcccatacccagcgaggaagacataaatttcattctgaacgaggtgaggaactacctgtcttgcgatgtggaggtgagacgaggggatgtccttgcggcttggtccggaataagacccctggtgactgaccccaaatctgccgacacacagagtatttcccggaatcatgtggtagacatttcagagtctggcctgatcacaatcgccggggggaaatggactacctaccgctctatggcagaggacacaatcaatgccgctgtgaagacacataatcttaaggcagggccgtcacggacagtgggcttattcttgcagggcggtaaagattggtctcccacactctacattcgattagtgcaagattacgggctggaatcggaggtggcacagcatttagccgcgacctacggcgataaagctttcgaggtggccaagatggcatccgtcactgggaagagatggcccattgtaggagtgcggcttgtgtctgagtttccctatattgaggcagaggtaaaatacgggataaaagagtatgcctgcacagctgtcgacatgatttcaaggcggaccagattagcctttctgaacgtccaggctgcggaagaagccctcccccgtatcgtagaactgatgggaagggagctcaactgggatgactacaagaaacaagagcagctagagactgccaggaagttcctgtattacgagatgggctacaagagccgctctgagcagctcactgaccgtagcgaaatttctcttctccctagcgatatcgatcgatacaagaagagatttcataagttcgatgctgaccagaaggggttcatcaccatagtggacgtccagcgggtgcttgagagtatcaacgttcagatggacgaaaacaccctgcacgagatactaaacgaggtggacctcaacaagaacggccaagtcgaactgaatgaatttctccaactcatgtcagccatacagaaggggagagtaagcgggtcacggctggccattctaatgaaaactgcagaggaaaaccttgatcggagagtgcccattccagttgatcgcagctgcgggggcttatag

SEQ ID NO: 37489 - DNA, 2184 bp, Artificial Sequence
  derived and/or modified sequence
atggccttccagaaggccgtgaagggcaccatcctggtgggcggcggcgcgcttgctacagtgcttggattgtctcagttcgctcactaccggcgtaagcaaatgaatcttgcatacgtgaaagccgctgactgtatttccgagcctgtgaatagagaaccaccttctcgggaagcgcagctccttaccctccaaaatacgtctgaattcgacatacttgtgattggcgggggtgccaccggctccggatgcgccttagatgccgtcacccggggcctgaaaacagccctggttgagagggatgatttcagctccgggacctcaagccgttctactaagctcatacacggaggcgtgcgctacctccaaaaagccattatgaagctggacattgagcagtaccgaatggtgaaggaggcgctccacgaacgggcaaatctgctggaaatcgcccctcatctctcagcaccgttaccgataatgctgcctgtctacaaatggtggcagttgccttactattgggttggcattaaactatacgaccttgtggccggaagcaactgcttaaagtcatcatatgttctgagtaaaagtagagccttagaacacttccccatgctacagaaagacaaacttgtcggggcgatcgtttattacgacggtcagcataacgatgccaggatgaacttggctatcgcgttaactgcagccaggtacggcgctgctacagccaattatatggaagtagttagtctcctgaaaaagacggaccctcagaccggaaaagtgagagtgtcgggggccagatgtaaagacgtgctcactggccaagagttcgatgtcagggcaaaatgtgtgatcaatgcgactgggccctttaccgattccgtgcggaagatggacgacaaagatgccgccgcgatttgccaacccagcgcaggagtgcacatcgttatgccaggctattattccccagaatccatgggcctgttagaccccgcaacttctgatggaagagtgatattcttcctaccatggcaaaagatgactatagctgggactacggatactcccaccgacgtgactcaccatccaataccgtccgaggaggatattaattttattcttaatgaggtgagaaactatctttcctgcgacgtggaagtgcgtcggggagacgtgttggctgcctggtctggtattaggcctctggtgaccgaccctaagtcggcagatacacaatctattagtagaaaccacgtcgtggacatttcagagtctggtctcatcactattgcagggggaaagtggacgacatacaggtcaatggctgaggatactattaatgctgcagtgaagactcataacctcaaggcaggcccatcccggaccgttggactgtttttacagggcgggaaagattggtccccgacgctttatatccgactcgtacaagattatggcttggaatccgaggtcgcacagcacctggcagctacgtacggcgacaaggctttcgaggtggcaaagatggcctcagtcactggcaaacgctggccaatcgtgggtgttagattagtcagtgaattcccatacatcgaggcagaggtcaaatacggaataaaagagtacgcatgtacagcggtggatatgatcagccggagaacccggttggcttttctcaacgtccaggcagccgaagaggcactccccaggatcgtggagctgatgggaagggagttaaattgggacgattataaaaaacaggagcagctggaaactgccaggaaatttttatactacgagatgggctataaaagccgaagcgagcagttgacggatcgttcggagattagcttgcttccatcggacatcgaccgctataagaagcgatttcataagttcgatgccgatcagaagggttttattacaattgtggacgtccagcgagtcctggaaagcatcaatgtgcagatggacgaaaataccttgcacgagatactgaacgaggtcgacctcaataagaacgggcaggtagagctcaacgagtttctgcaattaatgagtgctatccagaagggtagggtttctggcagccgcctcgcgatacttatgaagaccgccgaagagaacctagaccggagagtgccaatacctgtcgatcggtcatgcggtggtctctag

SEQ ID NO: 37490 - DNA, 2184 bp, Artificial Sequence
  derived and/or modified sequence
atggccttccagaaggccgtgaagggcaccatcctggtgggcggcggggctttagctactgtgttgggtcttagccagtttgcgcactacaggagaaaacaaatgaatcttgcctatgtcaaggcagccgactgcatttccgaacccgtgaaccgcgagcctcccagtcgcgaagcccaactgctcactttacaaaatacgtctgaatttgatatcctggtaatcgggggcggagctactggttccggatgcgcactggatgccgtgacaagaggccttaagacagcactggtcgaacgagatgatttctccagtggcacgtcaagccggagcacaaagctgatacatggtggcgtcaggtacttgcaaaaggccatcatgaagctggacattgagcagtaccgaatggttaaagaggccctccatgagcgggcaaacctgctggaaatagcccctcatctgagcgctcccttgccaatcatgctgcccgtttacaagtggtggcagctgccatactactgggtgggaattaagttatacgatctcgtggcaggatctaactgcctcaaaagcagctacgtgctgtccaagtctagggctttagaacacttcccaatgctgcaaaaggacaaactcgtgggtgccattgtctactacgacggacaacataatgacgcccgcatgaatctggccatagccctgaccgcagctcgatacggtgctgcgacagccaattacatggaagtcgtgagtctgttaaaaaaaaccgaccctcagaccggaaaggtacgggtctccggcgctaggtgtaaggacgtgctcaccggacaggagtttgatgtgcgcgccaaatgcgtgataaacgctaccggcccctttactgattccgtgcggaagatggatgacaaagacgctgccgcaatctgccaaccttcagctggagttcatattgtgatgcccggctactactcacccgagagcatggggctgttggacccggccacatcagatggccgggtaatatttttccttccatggcagaagatgacgattgccggtaccacagatacacccacagacgtgacgcaccaccccataccttctgaagaagacattaatttcatcttgaatgaggtacggaattatctttcctgcgacgtcgaggtccggagaggtgatgtcctcgctgcctggtccggaattcgccctctggtgacagatcccaaatcagccgacacccaaagcattagtagaaaccatgtcgtcgatatcagtgagagcggcttaattaccattgctggcggtaagtggacgacataccgttcgatggccgaagatacaataaatgccgctgtgaaaacacacaacttgaaggccggaccctccagaacagtcggcctgttcctgcaaggcggcaaggactggtctcctacgctctacattagacttgttcaggattatggattggaaagtgaagtggctcagcacctggcggccacttacggtgacaaggccttcgaagttgctaagatggccagcgtgacaggaaagcgctggcccatagtaggcgtgagattagtttcagagttcccctacatcgaggcggaggtgaaatatgggataaaggaatacgcatgcaccgcagtggatatgatctctaggaggacaaggctggccttcctcaacgtacaggcggccgaagaagccttgccaaggatagttgaactcatgggccgcgagttgaactgggatgactacaaaaaacaggagcaattagaaactgcccgcaaatttttgtattatgaaatggggtataaatctcgcagcgaacaactgacggaccgcagcgaaataagtcttctgccatccgacatagaccgatacaaaaagaggtttcacaaattcgacgctgaccagaaagggttcattaccattgtcgatgtgcaaagggttttggagagtataaacgtccagatggacgagaatactctgcacgagatacttaacgaggtggacctgaacaagaacgggcaggtggaattgaatgaattcctgcagctcatgtccgctatccagaaggggcgtgtctctggctcaagactggccatcctgatgaaaacagctgaagagaatctggacagaagggtgcctattcccgtggatcggagttgtggaggcctgtag

SEQ ID NO: 37491 - DNA, 330 bp, Artificial Sequence
  derived and/or modified sequence
atggccttccagaaggccgtgaagggcaccatcctggtgggcggcggtgccttagctaccgttcttggcctttcacagttcgctcactataggcgcaagcagatgaacctagcgtatgtcaaagctgctgattgcatcagcgaaccggtaaaccgggaacctccaagtcgcgaagcccaactgctgactctccagaatacctctgagttcgacatccttgttattgggggcggcgctaccggatcgggatgtgccctcgacgctgtcactagaggattgaagactgccctcgtagagagggatgacttctcctccggaacttccagctag

SEQ ID NO: 37492 - DNA, 2184 bp, Artificial Sequence
  derived and/or modified sequence
atggccttccagaaggccgtgaagggcaccatcctggtgggcggcggagcattggcaacagtccttggtttgtcccaattcgcccactatcgccgtaaacagatgaatctcgcttacgtgaaggccgctgactgtatcagcgagcctgtaaaccgtgagcctccatctcgagaggcgcagctcctgacattgcagaacactagcgagtttgacatcttggtgatcggcggaggggccacaggaagcgggtgcgctctggatgcagttacccgtggcctgaaaactgcactggtggaacgggacgatttttcaagtgggacgagctcccgctccactaaacttatccacggaggggtgcgatatctgcagaaggcgataatgaaactggacatagagcaatatcgcatggtaaaggaggctctgcacgagcgtgcaaacttgctggagatcgccccacacttatctgcccccctgcctatcatgctgcccgtttacaaatggtggcagctgccttactactgggtgggaataaaattgtatgacctggtagctggaagtaattgtctgaaatcgtcttacgttctgtcgaaatcccgggccctggagcacttccccatgcttcaaaaagataagcttgttggtgccatcgtatactacgacggtcagcataatgatgcccggatgaacctcgccatcgcactgaccgctgcccgctacggagctgccacagcaaattacatggaagtagtgtccctactgaaaaaaaccgacccccagaccggaaaagtacgagtcagtggagctcgatgtaaagatgtgctaactggccaggaattcgatgtgcgcgccaaatgcgtgataaacgccaccggtcccttcaccgatagtgtacgaaagatggacgataaagacgccgcagctatctgccagccctccgctggggtccacattgtgatgccagggtattacagcccggagtcaatggggctactcgatcccgccacaagtgacggcagggtgatttttttcctgccatggcagaagatgaccatcgccgggactacggacacgcccactgatgtgacgcaccacccaatccccagcgaagaagatataaactttatactgaatgaggtcaggaattacctgtcctgtgatgttgaagttaggagaggcgacgtgctcgccgcttggtccggaatcagaccgttggtgactgacccaaaaagcgccgacacccagtcgatcagccgcaaccacgtcgttgacatatccgagtcagggctgatcacaatagcaggaggtaagtggacaacataccgttctatggcagaggacaccataaatgccgccgtgaaaactcataatttaaaagctgggccttctcgcactgtcggactttttctgcagggcggcaaggactggtctcctaccctgtacattcgtctcgtccaggactatggattggagagtgaggtggcccagcatttggcagctacttacggagacaaagcctttgaggttgctaaaatggctagtgtgaccggcaagagatggccgattgtgggtgtgcgcttagtaagcgagttcccctacattgaggctgaggttaaatacggaattaaagaatacgcctgcacagctgtcgatatgatttccaggagaacccgcctggcgttcctgaacgtgcaagccgcagaggaggcattacctcggattgtggagctcatgggaagagaattaaattgggatgactataaaaagcaagagcagctcgaaacggccagaaagtttttgtattatgagatgggctataagagtcgatccgagcagctgaccgataggtcagagatctcactccttccctccgatattgaccgatataaaaagcggttccacaagttcgatgcggaccagaagggatttatcacgattgttgatgtgcagcgtgttcttgagagcattaacgttcagatggatgagaatactttacatgaaatcctgaacgaggtggacctaaataagaacggccaagtagaacttaatgagttcctgcaacttatgtccgcaattcagaagggcagggtgagtggtagtcggctagcaatcctgatgaagacggcagaggaaaatcttgaccgtagggtaccaattccagttgaccggtcctgcggagggctgtag

SEQ ID NO: 37493 - DNA, 1140 bp, Artificial Sequence
  derived and/or modified sequence
atggccttccagaaggccgtgaagggcaccatcctggtgggcggcggtgctctcgctaccgtgctgggcctttcacagtttgcccactacaggagaaagcagatgaaccttgcctatgtgaaggcagccgactgcatctccgaaccagtgaacagggaaccccctagcagagaagcacagctgctcacacttcaaaatacatctgaatttgacattctggtgatcggcgggggagctacaggcagcggctgtgccctggacgccgtgactagaggcctgaaaactgccctagtcgagagagacgactttagctcagggacctcctctcggtctactaaattaattcacggcggcgttcgctacctgcaaaaggctatcatgaaacttgacatcgagcagtataggatggtgaaagaggcattgcatgaacgggccaatttgttagagattgctccgcatctgtctgcgccactgcctatcatgctgcctgtgtataagtggtggcagcttccctactattgggttggcatcaaactctatgacctggtcgcaggctccaattgtttgaaaagctcctacgttttgtccaagagcagggctctggagcactttccaatgctgcaaaaagataaactagttggggctatcgtctattacgatggccagcacaacgatgctcgaatgaacctggccatcgccctgaccgcagctaggtatggagcagccacagcgaattacatggaagtagtgtccctgctcaagaaaaccgacccacaaactgggaaagtgagggtgtctggcgccagatgtaaggacgtgctcacggggcaagagttcgatgtacgggcgaagtgtgtaataaacgcgaccggaccctttaccgattccgttagaaaaatggatgataaggacgcagcggcaatttgtcagcccagtgcgggagtgcacatcgtgatgccggggtattactcgccagagagcatgggcttactcgatccagccacttccgacggtcgggtcatattctttcttccatggcaaaaaatgacaattgccggcaccacagatacaccaactgacgtcacccaccacccaataccgagcgaagaggatataaattttattcttaatgaagtgtag

SEQ ID NO: 37494 - DNA, 2184 bp, Artificial Sequence
  derived and/or modified sequence
atggcctttcagaaggccgtgaaaggaaccatcctggtgggcggaggagctctggccacagtccttggtctgtcccagttcgctcattatagaagaaagcagatgaacttggcatacgtgaaagcggctgactgtatcagtgaacctgttaaccgagagcccccatccagagaggcgcaattactgacactgcagaacacatcagaattcgacatccttgtgattggaggaggcgctacaggatctggctgcgcactggatgccgtcacaaggggacttaaaacagctcttgtggagagggacgactttagtagcggcacgtcaagcaggtcaacaaaactgatccacggcggagtccgctatctccagaaggccattatgaagctcgacattgaacagtacagaatggttaaggaagctctgcatgagagggccaacttgctggagatcgccccacatctgtccgcccctctgccgattatgctcccagtgtacaaatggtggcagctgccctattactgggttggcatcaaactgtacgacctggtggccggatccaactgtcttaagtcatcctacgtgctgtctaagtcccgagccctggagcacttccctatgttacaaaaagacaagttggtgggggcaatcgtatattacgacgggcagcacaatgatgccagaatgaacctggccattgcacttactgctgcacggtacggagctgccaccgccaattacatggaagttgtttcactcctgaaaaagaccgaccctcagaccggcaaagtacgcgtatctggagctcggtgtaaagacgtccttaccggccaggagttcgatgtccgagctaagtgcgtcataaacgccaccggaccctttacagactcagtacgcaagatggacgacaaggatgccgctgccatatgccagccaagtgctggagtccacatcgtgatgcccggttactacagccccgaatctatgggcctgctagatcccgcaacatcagatgggagggtgatattttttctgccctggcaaaagatgactatcgccggaaccaccgatactccgactgacgtcacacaccacccaattccatcagaagaggacatcaacttcattttaaacgaagttaggaactatttatcatgcgatgtggaagtccggagaggggatgtcctcgcggcatggagtgggattagacctctggtaacggatcccaagtcagctgacacacagagcatcagtaggaaccatgtcgtggatatcagtgagtctggcctaatcaccattgccggaggtaaatggactacttaccggagcatggccgaggacacaatcaacgccgcagtcaaaactcataacttaaaagccggaccaagcagaacagtcggtttgtttctccaaggaggaaaggactggtccccaaccttgtacattcgtctagtacaggactacggcctggagagtgaggtggcccagcacctagcagctacttatggggataaagccttcgaggtcgctaagatggcctcagtgactgggaagaggtggccaattgtgggggttcgcctggttagcgaattcccttacatcgaagccgaggtcaagtacggtattaaggagtacgcgtgtaccgccgttgatatgatttctaggcgtacccgtctggctttcctgaatgttcaggccgctgaggaagccctcccaaggattgttgaattgatgggcagagagctgaactgggacgactacaagaagcaggagcagctagagactgctcgaaagtttctttactacgagatgggatacaagtcccgtagtgaacaactgactgacaggtccgagatttcgctgctgccatccgacatagaccgttacaaaaagcgattccataaattcgacgcagaccagaaggggttcataaccattgttgacgttcagcgggtacttgaatcaataaacgttcaaatggatgaaaacaccctccacgagatactgaacgaggtggatttaaacaagaatggccaagttgagctgaacgagttcctccaactgatgtctgccatacagaagggcagggttagcgggtctagactcgcaattttgatgaaaaccgctgaggaaaatctggataggcgtgtccccatccctgtggaccgatcatgcggcggtttgtag

SEQ ID NO: 37495 - DNA, 1503 bp, Artificial Sequence
  derived and/or modified sequence
atgaatctggcaattgcacttacagccgctcgctacggagccgcaacagctaactacatggaagtggtgtccctgcttaagaaaactgaccctcagactggcaaggtgagggtctctggcgctcgctgtaaggatgtgctaacagggcaggagtttgacgtgagagccaaatgtgtgattaatgccacagggccatttacagactcagtcagaaagatggacgataaagacgctgcagccatctgccagccatctgccggagtccacatcgtcatgcctggctattacagtcctgagtcaatgggtcttctggatcctgctacctctgacggtagagtcatttttttcctcccatggcaaaaaatgacaatcgcgggaacaacagacacccccactgatgttactcatcacccgatccctagcgaggaagacattaattttatccttaatgaggttcggaactacctgagttgtgatgtggaagttcgccgaggagatgtgctcgcggcttggagcggaatcagaccactggttacagatcctaagagtgccgacactcagtcaataagcaggaatcatgttgtagacatctccgagtccggattgatcacaattgccggaggcaaatggacaacctaccgtagtatggccgaggacactataaatgctgccgtaaagacgcataatctgaaggcgggtccctcacggactgtcggattgtttctccaaggaggaaaggactggagccccaccctttacattagattggtccaggactacggcctcgaatccgaggtagcgcagcatcttgctgccacgtacggggacaaagccttcgaggtggctaagatggcaagcgtaacaggcaagcggtggccaatcgtgggagtccgtctggtatccgaatttccatacatcgaggcagaagtgaagtatggcatcaaagagtatgcatgcaccgccgtcgatatgatttctcgccgaaccagactagcctttcttaatgtccaggccgcagaagaggcattgcccaggatcgtggaactgatggggcgtgagttaaattgggatgattataagaagcaggaacagttagagactgccaggaagttcctgtattacgagatggggtacaaatctagatcagaacagctaaccgacaggtccgaaattagcctgttgcctagtgacatagatcggtacaagaaaaggttccacaagttcgatgccgatcagaagggtttcatcacaattgtagatgtgcagagggtgttagagtccataaacgtgcagatggatgagaacactctgcatgagatcctgaacgaggtggacctgaacaaaaatggacaggttgagctgaatgagttcctccagctgatgtcagccatccagaagggacgcgtttccggttccagacttgctatcctgatgaagacagccgaggagaatcttgatagacgggttccaatacctgtcgatcggagttgcggcggactctag

SEQ ID NO: 37496 - DNA, 2184 bp, Artificial Sequence
  derived and/or modified sequence
atggcctttcagaaggctgttaaggggactatcctggtcggcggaggggctttggccaccgtgcttggtctgtctcaattcgcccactaccgtaggaaacagatgaatcttgcatatgttaaagccgcagattgcatttctgagccagttaacagggaaccacccagcagggaggcacagctgctgacattgcaaaataccagcgagttcgatattctcgtcatcggtgggggagccactgggtcgggctgtgctctggatgccgtcactcgcggacttaaaactgcgctggtagagcgggacgacttctctagtgggaccagctcccgcagcactaagctgatccatggcggagtcagatatctgcagaaagctataatgaaacttgacatcgaacagtatcgcatggtgaaggaagccttgcatgagcgggcaaatctcctggagatcgctccccatctctccgcacctctacctattatgctaccggtatacaagtggtggcaactcccctactattgggtgggaattaagctctacgatctagtcgctggctccaactgcctgaagtctagttacgtgctgagtaagtctcgcgctttggagcactttccgatgttgcagaaagataaactggtcggcgctattgtctattatgacgggcagcacaatgacgctcggatgaatctggccatcgcactgacagccgctcgctatggagcagcaacggcaaattatatggaagttgtcagcctcttaaagaagaccgatccacagacagggaaagtgcgcgtgagtggagctcgctgtaaggatgtgctgactgggcaggaattcgacgttagagccaaatgtgtcataaacgccaccgggccattcaccgatagcgtccggaaaatggacgataaagacgccgcagcaatctgccaaccctctgccggtgttcacatcgtgatgcccggatattattctcccgaatccatgggtctactggaccccgctacttctgatgggagggtcatttttttcctcccctggcagaagatgacgatcgccggaactacagacacacccaccgatgtgacacatcatcccatcccttcagaggaggacatcaacttcatcttgaatgaagtgaggaactatctctcgtgcgacgttgaagttagacggggagatgtcttagcagcttggtctggaatcagacctcttgtgaccgacccaaaaagcgcagatacacagagcatatcacgtaaccacgtggttgatatttctgagtccggcctgattactatcgccggtggaaagtggactacttaccggtcaatggctgaagataccataaacgcagccgtgaagactcacaacttgaaggctgggcctagcagaaccgtcggcctgttcctccagggcggaaaggactggtctcctaccctttatattagactagttcaggattatgggctggagagcgaagtggcccagcatctcgccgctacttacggagataaagccttcgaggtagctaaaatggcaagcgtgacagggaaaaggtggcccatagtaggggtgagactggtctccgaatttccctacatcgaggcagaggtcaaatatggaatcaaggaatatgcctgcacagcagttgatatgatttcacgcaggacacgactggcatttttaaacgtgcaggcagcggaagaggccctgccccgtatcgtggaactcatgggcagagaactaaactgggacgactacaagaagcaggagcagctcgaaactgctcgcaaatttctatactatgaaatgggctataaaagcagaagcgaacagctcactgatcgctctgagataagcttgttgcctagcgatattgacagatataagaagaggttccataagtttgatgcggaccagaaaggctttatcacgattgtggatgtacaaagggtcctggaatctattaatgtgcagatggatgagaatactctccacgaaatcctgaacgaggtggacctaaacaagaatgggcaggtcgagctaaacgagttcctgcagctaatgtccgccattcaaaaaggaagagtgagcggctctcggctggccattctgatgaaaacggccgaggaaaacctggatcggcgtgtgcccatcccagtcgaccgaagctgtggtggtctatag

SEQ ID NO: 37497 - DNA, 2184 bp, Artificial Sequence
  derived and/or modified sequence
atggcgtttcagaaagccgtgaagggcacaatcctcgttggcggaggcgctctcgccaccgttcttgggctttctcagtttgctcactatcgtcgtaagcagatgaacttagcttatgtgaaagcagccgactgcatcagcgagcctgtcaaccgggagccaccttctcgcgaggcacagctactgaccctccaaaacacgagtgaatttgacatccttgtgatcggcggtggcgctaccggttccggctgcgccttggacgccgtgaccagaggcctgaagacggcattagtggagagagacgatttttcctccggtaccagttcccggtctactaaactgatccacggaggcgtccgttacctgcagaaagctatcatgaaactagacatcgaacagtatcggatggtgaaagaggcactgcacgaaagggctaaccttttagaaattgctccccacctgtctgcacccctgccaattatgttgcctgtttacaagtggtggcaactgccatattactgggtaggcattaaattgtacgacttggtggccggatccaattgcttaaagagttcctacgtgctgagcaagtcaagggctctggaacactttccgatgctacaaaaagacaaactcgtgggggcaatcgtgtactatgacggacagcataacgacgccagaatgaatctggcaatcgcgctgacagcagccaggtatggtgccgcaaccgcaaactacatggaggtggtctcactgctgaaaaagaccgacccccagaccggaaaggtgcgtgtcagtggcgcacgctgtaaagatgtcttgactggccaggagtttgacgtacgtgccaaatgtgttattaacgcaacaggaccgtttaccgattccgtcaggaaaatggacgacaaagatgctgccgcaatctgccagcccagtgcaggggtccatattgtcatgcctggctactacagcccagaaagtatgggtcttctggacccagccaccagcgatggcagggtgatcttcttcttgccttggcagaaaatgactatagcaggtaccactgatacccctaccgatgtgacccaccaccccattccctctgaggaggatatcaactttatcctcaatgaagtgcgcaactatctgagttgcgacgtggaggtccggcgaggggatgtgctcgccgcttggtcgggcatacgacccctcgtgacagatcctaaatccgccgacacccagagcatttcacgcaaccatgtcgtggatatctcagagagcgggctaataactatcgctggcggtaaatggacaacttaccgaagcatggctgaagacacgatcaacgctgccgtgaagacccataatctcaaagccggtccatccagaaccgttggtctgtttctccaggggggtaaggattggagtcccaccctctacatcagattggtccaagattacggactggagagcgaagttgctcagcatttagccgcaacctacggtgacaaagcctttgaggtggccaaaatggcatcagtgacggggaagcgctggccaatcgtcggggtgaggttggtttctgagtttccatatattgaagctgaagtcaagtatggcatcaaggagtacgcatgtacggccgtggacatgatttcccgcagaacccgtctcgcctttctgaatgtccaagcagccgaggaggcccttccccgtatcgttgaactgatggggagggaactcaactgggatgattataagaagcaggagcagctggaaaccgcacgaaaatttttatattatgagatgggatacaaaagcaggtctgagcagttgacagaccgatcagagatctccctgctccccagcgatattgaccggtacaaaaagcggtttcataaatttgatgccgaccagaaagggtttatcactatcgttgacgttcagcgagtactggagtcaatcaacgtacagatggatgaaaacaccctccacgaaatactgaacgaagtagacctgaataaaaatggccaagtggagttgaatgagttcctgcagctgatgtctgcaattcagaagggtcgggttagtggcagtagactggccattttaatgaagacagctgaagaaaacttagatcggcgtgttcccatcccagttgatcgaagctgcggtggcctttag

SEQ ID NO: 37498 - DNA, 330 bp, Artificial Sequence
  derived and/or modified sequence
atggcattccagaaggccgtgaaaggaaccatccttgtgggtggcggtgctctcgccaccgttctgggcttaagccagtttgcccactaccgacgtaaacaaatgaatctcgcctacgttaaggctgcagattgcatttcagagcccgtaaatagggagccgcctagtcgcgaagcacagctcttgacactccaaaatacctcagaattcgacattctcgtaattggtgggggtgcaaccggtagcggttgcgccttggacgcagtgactagggggctgaaaaccgccttagtagagagagacgacttctcctctgggaccagtagttag

SEQ ID NO: 37499 - DNA, 2184 bp, Artificial Sequence
  derived and/or modified sequence
atggcctttcagaaggcagtcaaagggaccatcttggtgggtggcggtgcccttgccaccgtgttgggtctgtcgcagttcgcacactaccgcagaaagcagatgaacctggcctacgtaaaggctgcagactgtattagcgaacctgtcaaccgtgagcccccttcccgggaagcccagctcctcacattgcagaatacttcagagtttgacattctggtgatcggtggcggagcaacaggaagcggatgtgccctggatgccgtgacgcgaggacttaaaacagcattagtcgagcgggatgattttagcagcggaactagttcaaggagcaccaaactgatccacgggggagttcggtatctacagaaagccataatgaaattggacatcgaacagtaccggatggtaaaagaagctctccacgagagagctaacctgcttgagatagcccctcacctttctgcccctttgccaatcatgctacccgtatataagtggtggcagctgccctattactgggttgggatcaagctgtatgaccttgtagctgggagtaattgtctcaaatcctcttatgtgttatcgaagagccgcgctctcgagcactttcccatgctgcagaaggataagttagtcggggcaatcgtttactacgatggacagcataacgatgctaggatgaatttggctatcgcattgacagctgcacggtacggcgctgccactgcaaattatatggaggtggtgagcttgctgaaaaagacagacccccagacgggaaaggtgagggtttctggagctagatgcaaagacgtcctgactggccaagagttcgacgtgcgcgctaaatgtgtaattaacgccacaggcccattcacagatagcgtccgcaaaatggacgataaggacgctgcagctatctgccagccttccgcaggcgtgcacatcgtaatgccagggtattattctcccgagagcatgggactgttggatcctgccacaagcgatggcagggtaattttttttctgccttggcagaaaatgaccatcgctggaaccactgatacccctacagacgtcacacaccatccgatccccagcgaagaggacatcaacttcatccttaatgaagttcggaattacttgtcctgcgacgtcgaagtgcggcgaggggacgtgctcgctgcctggtcagggattcgacccctggtgacggacccaaaatctgccgacacccaatcaatatcgaggaaccacgtcgttgacatttctgagagtggcctgataactatcgccggtggtaagtggactacataccgatctatggcagaagatacgattaatgccgcagtcaagacccacaatcttaaagctgggccaagccgtactgtggggctgtttctgcagggtggcaaagattggtctccaaccctgtacatccggctggtgcaggactatggcctcgagtctgaagtggcccagcacctggcagctacctatggcgataaagcttttgaggtcgccaagatggccagtgtcaccggaaaacgatggcccattgtaggcgtgcggttggtatccgagtttccttatatcgaagccgaagtaaagtacggcattaaagagtacgcgtgcaccgccgtcgacatgatttcccgtcgcacacggcttgcattcctgaacgtgcaagcggctgaggaggctctgccgaggattgtagagttgatgggacgcgagctgaactgggacgactacaaaaaacaggagcagctcgaaacagcaagaaaattcttgtactatgaaatgggatataagtcccggagcgaacagttgacggacaggtctgagatctccctgctgccatccgatattgatcggtataaaaagcgcttccacaagtttgatgccgatcagaaaggattcatcaccatcgtcgatgttcagagagtactagagtcaattaacgtccagatggacgagaacactctgcatgaaattctgaacgaggtagacctaaataagaacggccaagtggaattgaatgagttcctgcagctaatgtctgctattcagaagggacgagttagtggatcccgtttagctattctaatgaaaacagcggaggaaaatctcgaccggagagtgccaataccagtggatcggtcttgcggcggactgtag

SEQ ID NO: 37500 - DNA, 1140 bp, Artificial Sequence
  derived and/or modified sequence
atggcgtttcagaaagctgtcaaggggaccattctagtgggcggaggggctctagccactgtgctggggctctcgcaattcgcccactatcggaggaaacaaatgaacctcgcctacgtgaaagccgctgactgcatctccgagccagtaaatagggaacctcccagccgggaggcacagcttctgacactgcagaatacatctgagttcgacattctcgtcatcggcggtggggcaacgggtagcggctgtgctctggacgcggtcacacgtggcctgaagacagcgctggtggagagagatgatttttctagcgggacatctagtagaagtactaagcttatccacggcggtgtgaggtatctgcagaaagctatcatgaagcttgacattgaacaataccgaatggtcaaggaggctctgcacgagagagctaacctcctggaaattgctcctcatctgagtgcgccacttcctattatgcttcctgtttataaatggtggcagctgccctattactgggtcggtatcaagctttatgacctggtcgccggttctaattgtctgaagtcgtcatacgtgctgagcaagtcaagagcgttggaacatttccccatgttgcaaaaggataaactggtaggggcaatcgtgtattacgatggccagcacaatgacgccaggatgaatcttgcaatcgctctcaccgccgctcgatatggggcagcgactgcaaactatatggaagtcgtgagcctgttgaagaagacagatcctcagaccggcaaagtaagagtctctggcgctaggtgtaaggacgtgcttactgggcaggaattcgacgtacgagcgaagtgtgttatcaatgccactggcccatttaccgattccgttaggaagatggacgacaaagatgctgctgctatatgtcaacccagcgccggagtgcacattgtgatgcccggttactattcacccgaaagcatgggtctgctggatcctgcaacatcagacggacgggtaatttttttcctgccttggcagaagatgacgattgctggcacgaccgatacacctacagatgtcactcaccaccctattccaagtgaggaggatatcaactttatactgaatgaggtgtag

SEQ ID NO: 37501 - protein, 511 aa, Artificial Sequence
  derived and/or modified sequence
MDEESLESALQTYRAQLQQVELALGAGLDSSEQADLRQLQGDLKELIELTEASLVSVRKSSLLAALDEERPGRQEDAEYQAFREAITEAVEAPAAARGSGSETVPKAEAGPESAAGGQEEEEGEDEEELSGTKVSAPYYSSWGTLEYHNAMVVGTEEAEDGSAGVRVLYLYPTHKSLKPCPFFLEGKCRFKENCRFSHGQVVSLDELRPFQDPDLSSLQAGSACLAKHQDGLWHAARITDVDNGYYTVKFDSLLLREAVVEGDGILPPLRTEATESDSDSDGTGDSSYARVVGSDAVDSGTCSSAFAGWEVHTRGIGSRLLTKMGYEFGKGLGRHAEGRVEPIHAVVLPRGKSLDQCVETLQKQTRVGKAGTNKPPRCRGRGARPGGRPAPRNVFDFLNEKLQGQAPGALEAGAAPAGRRSKDMYHASKSAKRALSLRLFQTEEKIERTQRDIRSIQEALARNAGRHSVASAQLQEKLAGAQRQLGQLRAQEAGLQQEQRKADTHKKMTEF

SEQ ID NO: 37502 - DNA, 1536 bp, Artificial Sequence
  derived and/or modified sequence
atggacgaggagagcctggagagcgccctgcagacctacagagcccagctgcagcaggtggagctggccctgggcgccggcctggacagcagcgagcaggccgacctgagacagctgcagggcgacctgaaggagctgatcgagctgaccgaggccagcctggtgagcgtgagaaagagcagcctgctggccgccctggacgaggagagacccggcagacaggaggacgccgagtaccaggccttcagagaggccatcaccgaggccgtggaggcccccgccgccgccagaggcagcggcagcgagaccgtgcccaaggccgaggccggccccgagagcgccgccggcggccaggaggaggaggagggcgaggacgaggaggagctgagcggcaccaaggtgagcgccccctactacagcagctggggcaccctggagtaccacaacgccatggtggtgggcaccgaggaggccgaggacggcagcgccggcgtgagagtgctgtacctgtaccccacccacaagagcctgaagccctgccccttcttcctggagggcaagtgcagattcaaggagaactgcagattcagccacggccaggtggtgagcctggacgagctgagacccttccaggaccccgacctgagcagcctgcaggccggcagcgcctgcctggccaagcaccaggacggcctgtggcacgccgccagaatcaccgacgtggacaacggctactacaccgtgaagttcgacagcctgctgctgagagaggccgtggtggagggcgacggcatcctgccccccctgagaaccgaggccaccgagagcgacagcgacagcgacggcaccggcgacagcagctacgccagagtggtgggcagcgacgccgtggacagcggcacctgcagcagcgccttcgccggctgggaggtgcacaccagaggcatcggcagcagactgctgaccaagatgggctacgagttcggcaagggcctgggcagacacgccgagggcagagtggagcccatccacgccgtggtgctgcccagaggcaagagcctggaccagtgcgtggagaccctgcagaagcagaccagagtgggcaaggccggcaccaacaagccccccagatgcagaggcagaggcgccagacccggcggcagacccgcccccagaaacgtgttcgacttcctgaacgagaagctgcagggccaggcccccggcgccctggaggccggcgccgcccccgccggcagaagaagcaaggacatgtaccacgccagcaagagcgccaagagagccctgagcctgagactgttccagaccgaggagaagatcgagagaacccagagagacatcagaagcatccaggaggccctggccagaaacgccggcagacacagcgtggccagcgcccagctgcaggagaagctggccggcgcccagagacagctgggccagctgagagcccaggaggccggcctgcagcaggagcagagaaaggccgacacccacaagaagatgaccgagttctag

SEQ ID NO: 37503 - DNA, 1536 bp, Artificial Sequence
  derived and/or modified sequence
atggacgaggaaagtttggaaagtgctctgcagacatatcgtgcgcaactgcagcaagttgagcttgccctgggcgctggcctggactcatccgaacaggctgatctacgtcagcttcagggcgatctgaaagaattgatagagcttaccgaagcaagcctggtgtctgttcggaaaagctcgttgctggctgcgctggacgaagagagaccgggcagacaggaggatgccgaataccaagctttccgggaggctatcactgaggctgtcgaagcgccggccgccgcccgcggatctggctccgagacagtgccgaaagcggaggctggcccagaatcggctgccggcggccaggaggaggaagagggcgaggatgaggaagagttgagcggaaccaaagtttctgccccctactacagcagctggggtactctggagtaccacaatgctatggtggtggggactgaggaggctgaggatggcagcgcaggggtgagggtgctgtatctgtatcccactcacaagtccctgaaaccttgcccattcttcctcgagggcaagtgccggttcaaagagaattgtaggttttcccacggccaggtggtctctttggatgaactgaggcctttccaagatcctgatctgagttcgctgcaggcggggtcagcctgtttagcaaagcaccaagatgggctctggcacgccgcccggattaccgacgttgacaatggatactataccgtgaaattcgacagtctcctgctgagggaggctgtcgtggaaggtgacggaatcctcccacctttgcggacagaggccaccgagagtgattctgactctgacgggactggagacagcagctatgcccgggttgtgggttctgacgccgtcgacagcggcacatgctcatccgccttcgccggatgggaagtgcacacgcgtggaattggatccaggttgctgactaagatgggctatgaattcggaaagggactaggccgacatgcagagggaagagtggagcccatccatgccgtagtccttccacgaggaaaaagtctcgaccaatgcgtggagaccttacaaaaacaaactcgcgtcgggaaggctggaaccaacaagcctccgagatgcagaggcagaggcgctcgtccgggaggacgacccgcaccacgcaatgtgttcgatttcctaaatgaaaaattgcaggggcaggcacccggagccctggaggctggcgcggcgcctgcagggcgccgttccaaagatatgtaccacgcaagtaagtctgcaaaaagggccctgagcctccgcttgtttcagaccgaggagaagattgaaaggactcaacgtgacattcgcagcatacaggaagccctggcacgtaacgccggccgacattctgtggcttccgcacagctgcaggagaagttggccggcgcccagcgccaactgggtcagctcagagctcaggaggccggcctgcagcaagaacagaggaaagctgacacacataagaagatgactgagttctag

SEQ ID NO: 37504 - DNA, 1536 bp, Artificial Sequence
  derived and/or modified sequence
atggatgaggagtctctcgagtctgccctgcagacttacagggcccaactgcaacaggtggaactcgcactcggtgctggactcgactcctccgagcaggcagaccttcggcagctccagggtgatctcaaagagctcatagagcttacagaggcttccctagtatctgtgcgaaaaagctctctgcttgcggcactcgatgaagagcgcccaggtcggcaggaggacgccgaataccaggccttcagggaggccattactgaggccgtcgaggcacccgccgcggcgcgtgggagcggctccgaaaccgttccaaaagctgaggccggacccgaatcagcagctgggggacaggaggaagaagaaggggaggatgaggaggaactgtccggtaccaaagtcagcgctccgtattatagctcctggggaactcttgaataccataatgcaatggttgtggggacagaggaagccgaagatggctccgcaggagttcgggtattgtacctgtatccgacccacaagagtctgaagccctgtccttttttcctggaggggaaatgccggtttaaagaaaattgtaggttcagccacggacaggtggtgtccctcgatgaattacgcccctttcaggatccggacttgagctcattgcaggccggttccgcttgcctagctaaacatcaagacggcttgtggcacgccgcaaggattacagacgtcgacaacgggtattatactgtcaaattcgactctctgctgctccgagaggcggttgtggagggagatggcatactgccacccttgaggacagaggccacggaatccgatagcgatagcgacggaaccggtgattcttcttatgccagggtggtgggctctgacgcagtggatagtgggacctgtagctccgcgtttgctggatgggaggtgcatacccgcgggattgggagtagactcctgacgaaaatgggttatgagttcggcaaaggccttggtagacacgctgagggccgggttgaacccattcatgcagtggtgctcccccggggcaaaagcttggaccagtgtgtagagactctgcaaaagcagactcgcgtgggcaaagccggcacaaataaacctcccagatgtcgtggtcgcggagcccggcccggtggtaggcccgccccaaggaacgtattcgactttcttaatgaaaagttacaaggccaagctcctggtgctcttgaggccggcgctgctcctgcaggccgtagatccaaggatatgtaccacgcttcgaaaagcgctaagagggcgctttccttgaggctgttccaaacagaggaaaaaatcgaaaggacacagagggacataaggtcaattcaagaggcgctggctcgtaacgccggacgtcacagcgttgcatcagcccagcttcaggagaagcttgctggtgctcagcggcagttgggccagctgcgtgcacaagaagcagggctgcaacaagaacagaggaaggcagatacacataaaaagatgacagagttttag

SEQ ID NO: 37505 - DNA, 1536 bp, Artificial Sequence
  derived and/or modified sequence
atggatgaggagagcttggagtccgcgctccagacatatagagcccagctgcagcaggtagaattggcactgggtgctggcctagacagcagtgagcaggcagacctccggcagcttcagggggacttgaaggaactaatcgaactcactgaagcatctcttgtgagtgtgaggaagtcgagtctgttagctgcccttgatgaagaaaggcctgggaggcaagaagacgccgaatatcaggccttccgggaggccatcaccgaggctgtggaggcccctgcagcagccagggggtccgggagtgagacagtgccaaaggccgaggcaggaccggaaagcgccgctggaggacaggaagaagaagaaggagaagacgaggaggagctttcggggactaaggtttctgcgccttactatagcagctggggcaccttggagtaccacaatgcaatggtagtaggcaccgaagaggctgaggacggttcagctggggtgcgcgtgctgtacctatatcctactcacaaatcccttaagccttgccccttttttctggagggaaagtgtaggttcaaggagaattgcagattcagccatggccaggtcgtatcattagacgagctccgcccttttcaggaccccgacctgagtagtctgcaggctgggagcgcctgtttggctaagcatcaggacggcctgtggcacgctgcgcgcatcaccgatgtcgacaacggttattatacggtcaagttcgactcactcctactgcgtgaggccgttgttgagggcgacggaattctgccccctctgcgaacagaagcgaccgaatctgattccgactcagacggaaccggcgatagctcttacgcccgggtggtcggcagcgatgctgtggactccggcacctgtagctctgctttcgctggatgggaagtgcacactcggggcattgggtctcggctccttacgaaaatgggatacgagtttggcaaagggctcggccgtcatgccgaagggagagtggagcccatacacgctgtcgtgttgccccgcggcaaaagcctggaccagtgtgtcgagacgctccagaagcaaaccagggtcggtaaagcgggcaccaataagcctccccgctgtcggggtaggggagcaaggcccggcggcagacctgccccacgcaacgtgtttgatttcctaaacgaaaaattacaaggccaggcccccggggcgttggaggcaggcgctgctccagcagggcgcaggagtaaggatatgtaccacgcatccaagtcggcgaaacgcgcgctgtcactgagactttttcagacggaagaaaaaattgagcgcacacagcgtgatatccgaagcattcaggaggccctcgcgcggaatgcagggaggcatagcgtggctagcgcacagttgcaggaaaaactggcaggagctcaaaggcagctggggcagctgagggcccaggaggctgggctccagcaggaacaacgaaaggcagatactcataagaagatgacagagttctag

SEQ ID NO: 37506 - DNA, 1536 bp, Artificial Sequence
  derived and/or modified sequence
atggatgaggagagcctggagagcgccctgcagacctaccgggcccagctgcagcaggtggagctggccctgggcgccggcctggacagcagcgagcaggccgacctgcggcagctgcagggcgacctgaaggagctgattgagctgacagaggccagcctggtgtctgtgaggaagagcagcctgctggccgccctggatgaggagaggcctggccggcaggaggatgctgagtaccaggccttccgggaggccatcacagaagctgtggaggccccagctgctgcccggggcagcggcagcgagaccgtgcccaaggccgaggccggccctgagagcgctgctgggggccaggaggaggaggagggggaggatgaggaggagctgagcggcaccaaggtgtctgccccctactacagctcctggggcaccctggagtaccacaatgccatggtggtgggcacagaggaggctgaagatggcagcgctggggtgcgggtgctgtacctgtaccccacccacaagagcctgaagccctgccccttcttcctggagggcaaatgtcgcttcaaggagaactgccgcttcagccacggccaggtggtgtccctggatgagctgcggcccttccaggaccctgacctgagcagcctgcaggccggcagcgcctgcctggccaagcaccaggacggcctgtggcatgctgcccgcatcacagatgtggacaatggctactacacagtgaagtttgacagcctgctgctgcgggaggccgtggtggagggagatggcatcctgccccccctgaggacagaggccacagaaagtgacagcgacagtgatggcactggagacagcagctatgcccgggtggtgggcagtgatgctgtggacagcggcacctgcagcagcgcctttgctggctgggaggtgcacacccggggcatcggcagccggctgctgaccaagatgggctatgaatttgggaagggcctgggcagacatgctgagggccgggtggagcccatccatgctgtggtgctgccccggggcaagagcctggaccagtgtgtggagaccctgcagaagcagaccagggtgggcaaggccggcaccaacaagcccccacgctgccggggccgcggggcccggcctgggggccgcccagcccccagaaatgtgtttgacttcctgaatgagaagctgcagggccaggcccctggggccctggaggccggggccgccccagctggaagaagaagcaaggacatgtaccacgccagcaagagcgccaagagggccctgagcctgcggctcttccagacagaggagaagattgaaagaacccagagggacatccgcagcatccaggaggccctggccagaaatgccggccgccacagcgtggccagcgcccagctgcaggagaagctggccggggcccagaggcagctgggccagctgcgggcccaggaggccggcctgcagcaggagcagaggaaggctgacacccacaagaagatgacagagttctag

SEQ ID NO: 37507 - DNA, 1536 bp, Artificial Sequence
  derived and/or modified sequence
atggacgaggagagcctggagagcgccctgcagacctaccgggcccaactgcagcaggttgaactggctctgggcgcaggtctcgatagttctgaacaggccgatctacgccagcttcaaggcgatctcaaggagcttattgaactcacagaggcctcactggtgagcgtgaggaaaagctctctgctcgctgcactggacgaggaacgacccggccggcaggaagatgccgaatatcaagcctttagggaggccataactgaggcagttgaggctccagccgctgcccgcggttccggtagcgaaacggtacctaaagccgaagccgggcctgagtcagccgccggcggtcaggaagaggaggagggtgaggacgaagaagagctgtcgggcacaaaggtaagtgcaccatactacagcagctggggaactctggagtatcataacgctatggtggtggggacagaggaagctgaagacggctccgctggagtacgggtcttgtacctgtatcccacccataaatctctgaagccatgcccatttttcctagaagggaagtgtagatttaaggaaaattgtagattttctcatggacaagtagtgtcattggatgaacttagaccttttcaggatccagatctatcttctctgcaagcagggagcgcatgcctcgccaaacaccaagacgggttgtggcatgcagcccgaattaccgacgtggacaacggctattacacagtcaaatttgactctctgctcttgcgcgaggctgtggttgagggggacgggattcttccccccctccggaccgaggctacagaatctgacagcgactctgacggcaccggtgactcatcttatgcccgtgtggtgggctcagacgccgtggatagtggaacttgcagctccgccttcgccgggtgggaagttcacactagagggataggctcgagactactcaccaagatgggatacgagttcggcaagggcctaggccggcacgcagaaggcagagtcgagccaattcacgcggtggtactgcctcgtggtaagagtctcgatcagtgtgtagagacattacagaaacagactcgcgtgggaaaggccgggactaacaaacccccacgatgccgcggccggggagcccgtccgggagggagacctgccccccgcaatgtttttgattttctaaatgaaaagttacagggacaggccccaggtgctctcgaggctggcgcagctcccgcaggccgccggtctaaagatatgtatcacgcatcgaaaagtgcaaagagagctcttagcctgaggctcttccagacagaggaaaaaattgaacgtacacagcgggatatccggagtatccaggaagccttggcccgaaatgctggacgacatagtgtggcctctgcacagctccaggaaaaactcgccggagctcagcggcagctgggccagttgcgggcgcaggaggcgggtctccagcaggagcagagaaaagccgatacccacaaaaagatgactgaattttag

SEQ ID NO: 37508 - DNA, 1536 bp, Artificial Sequence
  derived and/or modified sequence
atggacgaggagagcctggagagcgccctgcagacctaccgggcccagctgcagcaagtcgaacttgccctcggggctggcttggatagcagcgagcaggccgatttgcgccagttgcagggggatctgaaagagctgattgaattaactgaggcctccctcgtatctgtgcgcaaaagttcattgctcgcagccctggacgaggaacgtcccggcaggcaagaggacgccgagtaccaggcattcagagaagcaattacagaggccgtggaggcacctgcagcagcccgtgggagtggctctgagacagttccaaaagccgaagccgggcccgaatctgccgcaggaggtcaggaagaagaggagggggaggatgaagaagaactctctgggactaaggtctccgccccttactactcctcatggggcactttggagtaccacaacgccatggtcgttgggaccgaggaagctgaggatggctccgccggggtcagggtgttgtatctgtaccccacgcataagagcctgaagccttgtcccttttttctggaaggcaaatgcagatttaaagagaactgtagatttagtcacggacaagtggtgagcttggatgaattgcggcccttccaagaccctgacctatcttccctacaggcagggtcagcatgtttagccaagcaccaggatggcctgtggcacgccgcccgcatcactgatgtcgacaatggctattataccgtcaagttcgattccttactgctacgcgaagccgtcgttgaaggtgatggtatattgccccctctgcggaccgaggccactgaatccgactccgacagtgatggcacaggcgattcaagctacgcacgggtggttggcagcgatgctgtggatagtggcacttgctccagcgcattcgccgggtgggaagttcacactcgcgggattggatctcgattactgaccaagatggggtacgaatttggaaaagggctcggacgtcacgcagaaggccgagttgagcccatccacgcagttgtcctgccccgaggtaagagtctagaccagtgtgtcgaaacccttcaaaagcagaccagagtggggaaagccggaaccaataaaccccctagatgcagaggaagaggcgcccgacccggcgggcgtcccgccccacgtaacgtgttcgatttcctcaacgagaagctgcaaggccaggccccaggggccttagaagccggtgcggcccctgctggcagaagatcaaaggacatgtatcatgcatccaagagcgcgaagagggccctctccctgcggctgttccagaccgaggagaagatcgagagaacccagagggacattaggtcgatacaggaagctctggctcggaacgccggaagacactctgtcgcttcagctcagctgcaagagaagcttgccggggcacagaggcagctgggccagctgagagctcaggaggcgggtctccagcaggagcagcgtaaagccgatacacacaaaaagatgactgaattttag

SEQ ID NO: 37509 - DNA, 1536 bp, Artificial Sequence
  derived and/or modified sequence
atggacgaggagagcctggagagcgccctgcagacctaccgggcccagttacaacaggtcgagctcgccctcggcgccggtctagacagtagcgagcaagcggacttaaggcaactccagggggacttgaaggaactgattgaattgacggaagcctctctcgtcagcgtgagaaagagtagcctgctcgcagcgctggacgaggagaggcccggccggcaagaagacgcagagtatcaggccttcagggaggctataaccgaagcggtcgaggctccagcagccgctcgggggagcgggagcgagacggtgccaaaggcagaagctggaccagagtccgcagcgggtggtcaggaggaagaggaaggcgaggatgaggaggagctgagtgggaccaaagtgtcagccccctattactccagctggggcacactggagtaccacaatgccatggtggtgggcactgaggaggccgaggacgggagcgctggagttcgcgtcctgtatttgtaccctactcataagtctcttaagccttgtcctttttttctggaaggcaaatgccgattcaaggagaactgccgattttcccacggccaagtagtttctctggacgagctgagaccttttcaagatcccgacttgtcttcactacaagctggcagcgcctgcctggctaagcatcaggacgggctctggcacgccgctagaatcacggacgtggacaacggctattatactgtgaaattcgactcattgctccttcgggaggccgtggttgagggcgacggcattcttcctcctctgaggaccgaagccacagaatctgattcagactccgacgggacgggcgattcctcttacgcccgggtagtaggatccgacgctgtagatagcgggacctgttcttcagctttcgcaggatgggaggtacatacacgcggaatcggttcgcgtttgctcaccaaaatgggctacgagttcgggaagggcctaggaaggcacgctgagggcagggtcgaacctatccacgccgttgtgttgcccaggggcaagagcctagatcagtgtgttgagactctgcagaagcagacaagggtcggaaaggccggcacaaacaaacctccacgctgtcgcggccgaggggcccgcccgggcggacgacctgcacctagaaacgtgttcgacttcttgaatgagaagctgcagggacaggctcctggtgccctggaggcaggcgccgcacccgctggacgccgctcgaaggatatgtaccacgcttccaaaagcgccaaacgagccctctctttgagactgttccagaccgaggagaaaatcgagcgcactcagcgagatatccgatctatccaggaagctctggccaggaacgcagggcggcattccgtcgcctctgcacagctgcaggagaagctggcaggagcacagagacagctgggacagcttcgtgcccaagaagccggcctacagcaggaacagcgaaaagcggatactcataagaagatgacggagttctag

SEQ ID NO: 37510 - DNA, 1536 bp, Artificial Sequence
  derived and/or modified sequence
atggacgaagaatctttagaatctgcattacagacgtatcgtgcccaattgcaacaagtggaattagccctcggcgcaggactggatagctctgagcaggccgatctacgccaattacagggagaccttaaggagctgattgagctgaccgaggcatccctcgtgtccgtcaggaaatcctctctcctcgccgcacttgacgaagaaagacccggacgacaggaggacgccgaataccaggctttcagggaagcaattactgaggcagtagaagctcctgccgcagcacggggatcgggctcagaaactgttcccaaggccgaggccggacccgaaagcgctgcaggaggacaggaggaggaggaaggcgaagatgaggaagaactatccgggacgaaggtgagcgcaccatattattcgagctggggtaccctggaatatcacaacgccatggttgtaggcaccgaagaggccgaagatggcagcgcgggagttcgcgtgctgtatctgtatcccactcacaagagcctgaaaccatgtcccttctttctggaagggaagtgcagattcaaagagaattgtcgtttctcccatggtcaggtcgtgagtctggacgagctgcggccattccaagaccctgacttgtccagcctacaggcgggttccgcttgtctggccaagcaccaggacggcctctggcacgcagcaagaattacggatgtcgacaatggctactatactgtgaaattcgacagtctgctgctgagagaagcggttgtggagggagacggcatcctgcctcctctgagaaccgaggccaccgagtcagatagcgactccgacggaaccggggacagcagttacgcaagagtcgtcggctctgatgccgtggatagcggcacttgctcctcggcatttgccggttgggaggtgcatacacgaggcatcggcagccggctgctgaccaagatgggctatgaattcggaaagggtcttggtagacacgccgaaggccgagttgaacctattcatgcagtcgtcttgcccagaggaaagtcactcgatcagtgtgtcgagactctgcagaaacaaactcgtgtcgggaaggcaggcacaaataaaccgccaaggtgcagaggcaggggcgctcgaccaggtgggagaccagccccacgcaatgtcttcgacttcctgaatgaaaagcttcagggccaggccccaggtgcactagaagccggtgccgcacccgcaggcaggaggtccaaagatatgtaccacgccagtaaaagcgctaagagagcactatctctaaggctgttccagaccgaagagaaaattgagagaacccagcgtgatattagatctatccaggaggcgctggctaggaacgccggaagacattctgtcgcgtcggcgcaacttcaggaaaagctggctggagctcaaaggcagctgggccagcttagggctcaggaggccggtcttcaacaggaacagcgaaaagctgatacacataaaaagatgacagaattctag

SEQ ID NO: 37511 - DNA, 1536 bp, Artificial Sequence
  derived and/or modified sequence
atggacgaagagtctctggagagcgcactacagacttacagggctcagctgcaacaagtggagctggccctgggggcaggcctggattcttctgagcaagccgaccttaggcagttacagggcgatctgaaagaattgattgagctaaccgaagcctcccttgtcagcgttcggaagtccagcctactggcagcacttgatgaagaacgaccgggaaggcaggaggacgctgagtaccaggcttttcgcgaggccataacggaggcagtggaggctcctgctgcggctcgcggttccggcagcgagacagtaccaaaggctgaagccggtccagaatctgctgcaggcggacaggaagaagaggagggcgaggacgaagaggaattatccgggacaaaggtttcagccccttattattccagctggggcaccctagaatatcataacgcaatggttgttggtacagaagaggcagaagacggaagcgcaggcgtccgggttctgtacctttatcctacacataagtcactgaagccatgcccctttttcctcgaaggaaagtgtcgcttcaaagagaactgccggttctctcacggtcaggtggtatctctggatgagctccgccctttccaagacccagaccttagcagtctacaggctgggtctgcatgtctggctaaacaccaagatgggctgtggcacgctgccaggattaccgatgtggataatggatattacacagtgaagtttgatagcctcctgctgagagaagccgtggtggaaggtgacgggatccttccaccattacgaaccgaagccactgaatccgactcggactccgacggaaccggggacagctcctacgcccgagtggtcggatctgatgccgtcgattctgggacttgctccagtgcctttgccggatgggaagtgcatacccgcggaattggctctcgccttttgactaaaatggggtacgagtttggcaagggactgggacggcacgccgagggcagggtggaacccattcacgctgtcgtgcttcccagaggtaagagcctggatcaatgtgtcgagaccctgcagaagcagaccagggtgggaaaagcaggcacaaataaacctcccagatgcaggggccgaggcgctcgccctggcggaagacccgcaccacgtaacgtctttgatttcttaaatgaaaagttgcaaggacaagcccctggagcactcgaggcgggagctgctcccgcaggaaggcggtctaaggatatgtaccacgcctcgaagagtgcgaaacgcgcactgtctctgcggttgttccaaaccgaagagaagatcgagaggacccagagagacatccgttcaattcaggaagcactggcgagaaacgccggtcgccattctgtggcaagcgcccagctgcaagagaagcttgccggagcccagcggcagttggggcagcttcgcgcacaggaggccggactgcagcaggagcagcgaaaagccgacacacacaagaagatgacagaattctag

SEQ ID NO: 37512 - DNA, 1536 bp, Artificial Sequence
  derived and/or modified sequence
atggacgaagagtcactagagtctgccctgcagacttaccgcgcacagctacaacaagtcgaactcgcgcttggagctggcctggattcttccgagcaagccgacctgaggcagctccaaggagatcttaaggagctgatcgagttgacagaagcaagcctggtttcggtacggaagagctccctgcttgccgctctggatgaagaaagacccggacggcaagaggatgccgagtatcaagcctttcgcgaagctattactgaggccgtggaggcccctgcagctgctcgtggctccggctcggagacagtgcctaaggccgaagcgggacccgaaagcgctgctgggggacaggaggaagaagagggagaagacgaagaggagctaagcggcacaaaggtaagtgctccttactactccagctggggcaccttagagtaccataacgctatggttgtgggaacagaggaggcagaggacggctcagccggagtccgggtactgtatctttatccaacccataagtctttaaaaccttgcccctttttccttgagggtaaatgccggttcaaagagaattgccggttctcccatggtcaggtggtgtcgttggatgaactgaggccttttcaggaccccgacctctcttcattgcaggcaggcagcgcctgtctggctaagcaccaggacgggctttggcacgccgcaaggataactgacgtggataacgggtattatactgtaaaatttgattctctgctcttacgggaagccgtggtggagggtgacggaatcctgccacccttgagaactgaggccaccgaaagcgacagcgactcagacggcactggtgacagttcttacgccagagtggtcggatcagatgcggttgatagcggtacgtgctcatctgctttcgccggttgggaagtacacacacggggaatcggcagcagactccttaccaagatggggtacgagttcggaaaaggcctcgggagacacgccgagggacgtgttgagccgattcacgcagtggtgcttccccgaggtaaaagtctggaccagtgtgtggagacacttcagaagcagacgcgcgttgggaaagcagggacgaataagccccctcgctgcagaggaaggggagcccgaccgggagggagaccagctccaaggaatgtctttgacttcctgaatgagaaactccagggacaagcccctggcgcactggaagcaggcgctgctcctgccggacgcagatccaaagatatgtatcatgcgagcaagtctgctaaaagggctctttccttaaggctctttcaaactgaagaaaaaatcgagcggacgcagcgagatatcagatcaattcaggaggctcttgctcggaacgcaggacgccacagcgtcgccagcgctcagctgcaagaaaaactggccggagcacagagacagttgggccagctgcgagctcaagaagcaggcttgcaacaagagcagcgcaaggccgatactcataagaaaatgacagagttttag

SEQ ID NO: 37513 - DNA, 1871 bp, Artificial Sequence
  derived and/or modified sequence
aagcacttccggaagcggcggcgctcgggaggaagtgccgatcggctgctggggcgaaaagggggcgccgggccgctctagccgccctggtccagcgcctccctctctcagcatggacgaggagagcctggagtcggccttgcagacctaccgtgcgcagctgcagcaggtggagctggccttgggcgccggcctggattcgtctgagcaggctgacctgcgccagctgcagggggacctgaaggagctcatcgagctcaccgaggccagcctggtgtctgtcaggaagagcagcttgttggccgcgctggacgaagagcgcccgggccgccaggaagatgctgagtaccaggctttccgggaggccatcactgaggcggtggaggcaccagcagcggcccgtgggtccggatcagagaccgttcctaaagcagaggcggggccagaatctgcggcaggtgggcaggaggaggaagagggagaggacgaggaagagctgagtgggacaaaggtgagcgcgccctactacagctcctggggcactctggagtatcacaacgccatggtggtgggaacggaagaggcggaggatggctcggcgggtgtccgtgtgctttacctgtaccccactcacaagtctctgaagccgtgcccgttcttcctggagggaaagtgccgctttaaggagaactgcaggttctcccatgggcaggtggtctctctggatgagctgcgccccttccaggacccagacctgagctccctgcaggccggctctgcgtgtctggccaagcaccaggatggcctctggcacgcagcacgcatcaccgatgtggacaacggctactacacagtcaagtttgactcgctgctgctgagggaggccgtggtggagggggacggcatcctgcccccactgcgcacagaggccacagagtccgactcagacagcgacggtacgggtgactccagctatgccagagtggtggggtcagatgctgtggactctgggacctgcagctctgcctttgctggctgggaggtgcacacgcgaggtataggctccagactcctcaccaagatgggctatgagtttggcaagggtttgggccgacacgcggaaggccgggtggagcccatccatgctgtggtgttgcctcgagggaagtcgctggaccagtgtgtggagaccctgcagaagcagaccagggttggcaaggctggcaccaacaagccccccaggtgccggggaagaggggccaggcctgggggccgcccagctcctcggaatgtgtttgacttcctcaatgaaaagctgcaaggtcaggctcctggggccctagaagccggggcggccccagcggggaggaggagcaaggacatgtaccatgccagcaagagtgccaagcgggccctgagcctgcggctcttccagactgaggagaagatcgagcgaacccagcgggacatcaggagcatccaggaggctctcgcccgcaacgctggccggcatagcgtggcgtcagcccagctgcaggagaagctggcaggagcccagcgccagctggggcagctccgggctcaggaagccggcctgcagcaggagcagaggaaggcagacacccacaagaagatgactgagttctagagaccccacaagcactatggacgaagcgtgggaccccagcacgggctgccctcaggaagaccagtgttgcccgaggaggggccggcctgctggcctggggcgtgcagacactgctgagtggagacagagctgcggggtcccatctggacacttacttgcccacctgccagtgtcttgggcatttccttggcaaggacattaaagtgatttcatcacagtgtca

SEQ ID NO: 37514 - DNA, 1890 bp, Artificial Sequence
  derived and/or modified sequence
gggcgaaaagggggcgccgggccgctctagccggtgaggccggcgggctctctgtggctgcggctgggaaaccgcgcggaggaggtgcccggccggggaccagccctggtccagcgcctccctctctcagcatggacgaggagagcctggagtcggccttgcagacctaccgtgcgcagctgcagcaggtggagctggccttgggcgccggcctggattcgtctgagcaggctgacctgcgccagctgcagggggacctgaaggagctcatcgagctcaccgaggccagcctggtgtctgtcaggaagagcagcttgttggccgcgctggacgaagagcgcccgggccgccaggaagatgctgagtaccaggctttccgggaggccatcactgaggcggtggaggcaccagcagcggcccgtgggtccggatcagagaccgttcctaaagcagaggcggggccagaatctgcggcaggtgggcaggaggaggaagagggagaggacgaggaagagctgagtgggacaaaggtgagcgcgccctactacagctcctggggcactctggagtatcacaacgccatggtggtgggaacggaagaggcggaggatggctcggcgggtgtccgtgtgctttacctgtaccccactcacaagtctctgaagccgtgcccgttcttcctggagggaaagtgccgctttaaggagaactgcaggttctcccatgggcaggtggtctctctggatgagctgcgccccttccaggacccagacctgagctccctgcaggccggctctgcgtgtctggccaagcaccaggatggcctctggcacgcagcacgcatcaccgatgtggacaacggctactacacagtcaagtttgactcgctgctgctgagggaggccgtggtggagggggacggcatcctgcccccactgcgcacagaggccacagagtccgactcagacagcgacggtacgggtgactccagctatgccagagtggtggggtcagatgctgtggactctgggacctgcagctctgcctttgctggctgggaggtgcacacgcgaggtataggctccagactcctcaccaagatgggctatgagtttggcaagggtttgggccgacacgcggaaggccgggtggagcccatccatgctgtggtgttgcctcgagggaagtcgctggaccagtgtgtggagaccctgcagaagcagaccagggttggcaaggctggcaccaacaagccccccaggtgccggggaagaggggccaggcctgggggccgcccagctcctcggaatgtgtttgacttcctcaatgaaaagctgcaaggtcaggctcctggggccctagaagccggggcggccccagcggggaggaggagcaaggacatgtaccatgccagcaagagtgccaagcgggccctgagcctgcggctcttccagactgaggagaagatcgagcgaacccagcgggacatcaggagcatccaggaggctctcgcccgcaacgctggccggcatagcgtggcgtcagcccagctgcaggagaagctggcaggagcccagcgccagctggggcagctccgggctcaggaagccggcctgcagcaggagcagaggaaggcagacacccacaagaagatgactgagttctagagaccccacaagcactatggacgaagcgtgggaccccagcacgggctgccctcaggaagaccagtgttgcccgaggaggggccggcctgctggcctggggcgtgcagacactgctgagtggagacagagctgcggggtcccatctggacacttacttgcccacctgccagtgtcttgggcatttccttggcaaggacattaaagtgatttcatcacagtgtca

SEQ ID NO: 37515 - DNA, 1904 bp, Artificial Sequence
  derived and/or modified sequence
ggggaacacactcgctgcagccccgcctgggccacggcaccctcgagcgccagccccgcgccccacccgggagcagcgagccaccggcgcgctccccaggagcccctgcaggcgccggccctggtccagcgcctccctctctcagcatggacgaggagagcctggagtcggccttgcagacctaccgtgcgcagctgcagcaggtggagctggccttgggcgccggcctggattcgtctgagcaggctgacctgcgccagctgcagggggacctgaaggagctcatcgagctcaccgaggccagcctggtgtctgtcaggaagagcagcttgttggccgcgctggacgaagagcgcccgggccgccaggaagatgctgagtaccaggctttccgggaggccatcactgaggcggtggaggcaccagcagcggcccgtgggtccggatcagagaccgttcctaaagcagaggcggggccagaatctgcggcaggtgggcaggaggaggaagagggagaggacgaggaagagctgagtgggacaaaggtgagcgcgccctactacagctcctggggcactctggagtatcacaacgccatggtggtgggaacggaagaggcggaggatggctcggcgggtgtccgtgtgctttacctgtaccccactcacaagtctctgaagccgtgcccgttcttcctggagggaaagtgccgctttaaggagaactgcaggttctcccatgggcaggtggtctctctggatgagctgcgccccttccaggacccagacctgagctccctgcaggccggctctgcgtgtctggccaagcaccaggatggcctctggcacgcagcacgcatcaccgatgtggacaacggctactacacagtcaagtttgactcgctgctgctgagggaggccgtggtggagggggacggcatcctgcccccactgcgcacagaggccacagagtccgactcagacagcgacggtacgggtgactccagctatgccagagtggtggggtcagatgctgtggactctgggacctgcagctctgcctttgctggctgggaggtgcacacgcgaggtataggctccagactcctcaccaagatgggctatgagtttggcaagggtttgggccgacacgcggaaggccgggtggagcccatccatgctgtggtgttgcctcgagggaagtcgctggaccagtgtgtggagaccctgcagaagcagaccagggttggcaaggctggcaccaacaagccccccaggtgccggggaagaggggccaggcctgggggccgcccagctcctcggaatgtgtttgacttcctcaatgaaaagctgcaaggtcaggctcctggggccctagaagccggggcggccccagcggggaggaggagcaaggacatgtaccatgccagcaagagtgccaagcgggccctgagcctgcggctcttccagactgaggagaagatcgagcgaacccagcgggacatcaggagcatccaggaggctctcgcccgcaacgctggccggcatagcgtggcgtcagcccagctgcaggagaagctggcaggagcccagcgccagctggggcagctccgggctcaggaagccggcctgcagcaggagcagaggaaggcagacacccacaagaagatgactgagttctagagaccccacaagcactatggacgaagcgtgggaccccagcacgggctgccctcaggaagaccagtgttgcccgaggaggggccggcctgctggcctggggcgtgcagacactgctgagtggagacagagctgcggggtcccatctggacacttacttgcccacctgccagtgtcttgggcatttccttggcaaggacattaaagtgatttcatcacagtgtc

SEQ ID NO: 37516 - protein, 534 aa, Artificial Sequence
  derived and/or modified sequence
PCHTAARSECKRSHKFVPGAWLAGEGVDVTSLRRSGSFPVDTQRFLRPDGTCTLCENALQEGTLQRLPLALTNWRAQGSGCQRHVTRAKVSSTEAVARDAARSIRNDWKVGLDVTPKPTSNVHVSVAGSHSQAANFAAQKTHQDQYSFSTDTVECRFYSFHVVHTPPLHPDFKRALGDLPHHFNASTQPAYLRLISNYGTHFIRAVELGGRISALTALRTCELALEGLTDNEVEDCLTVEAQVNIGIHGSISAEAKACEEKKKKHKMTASFHQTYRERHSEVVGGHHTSINDLLFGIQAGPEQYSAWVNSLPGSPGLVDYTLEPLHVLLDSQDPRREALRRALSQYLTDRARWRDCSRPCPPGRQKSPRDPCQCVCHGSAVTTQDCCPRQRGLAQLEVTFIQAWGLWGDWFTATDAYVKLFFGGQELRTSTVWDNNNPIWSVRLDFGDVLLATGGPLRLQVWDQDSGRDDDLLGTCDQAPKSGSHEVRCNLNHGHLKFRYHARCLPHLGGGTCLDYVPQMLLGEPPGNRSGAVW

SEQ ID NO: 37517 - protein, 534 aa, Artificial Sequence
  derived and/or modified sequence
PCYTATRSECKQKHKFVPGVWMAGEGMDVTTLRRSGSFPVNTQRFLRPDRTCTLCKNSLMRDATQRLPVAITHWRPHSSHCQRNVAAAKVHSTEGVAREAAANINNDWRVGLDVNPRPEANMRASVAGSHSKVANFAAEKTYQDQYNFNSDTVECRMYSFRLVQKPPLHLDFKKALRALPRNFNSSTEHAYHRLISSYGTHFITAVDLGGRISVLTALRTCQLTLNGLTADEVGDCLNVEAQVSIGAQASVSSEYKACEEKKKQHKMATSFHQTYRERHVEVLGGPLDSTHDLLFGNQATPEQFSTWTASLPSNPGLVDYSLEPLHTLLEEQNPKREALRQAISHYIMSRARWQNCSRPCRSGQHKSSHDSCQCECQDSKVTNQDCCPRQRGLAHLVVSNFRAEHLWGDYTTATDAYLKVFFGGQEFRTGVVWNNNNPRWTDKMDFENVLLSTGGPLRVQVWDADYGWDDDLLGSCDRSPHSGFHEVTCELNHGRVKFSYHAKCLPHLTGGTCLEYAPQGLLGDPPGNRSGAVW

SEQ ID NO: 37518 - protein, 534 aa, Artificial Sequence
  derived and/or modified sequence
PCYTATRSECKQNHKFVPGVWAAGEGVDVTTLRRSSSFPVNTGKFLRPDRTCTLCKNALMNDGIQRLPVAIAHWRPHGSHCQRNVATTKVSSTEGVAREAAANINNDWRAGLDVNPKPEANVHVSVAGSHSKIANFAAEKAHQDQYNFNTDTVECRMYSFRLAQKPPLHPDFRKALKNLPHNFNSSTEHAYRRLISSYGTHFITAVDLGGRVSVLTALRTCQLTLDGLTADEVGDCLSVEAQVSIGAQASVSSEYKACEEKKKQHKIATSFHQTYRERHVEVLGGPLDSSNDLLFGNQATPEHFSTWIASLPTRPDVVDYSLEPLHILLEDSDPKREALRQAISHYVMSRARWRDCNRPCRAGQHKSSRDSCQCVCQDSNVTNQDCCPRQRGLAKLMVRNFQAKGLWGDYITSTDAYLKVFFGGQEIRTGVVWNNNHPSWSDKMDFGNVLLSTGGPLRVQVWDADNGWDDDLLGTCDKSPKSGFHEVNCPLNHGSIKFIYQANCLPDLTGETCLEYAPQGLLGDPRGNRSGAVW

SEQ ID NO: 37519 - protein, 555 aa, Artificial Sequence
  derived and/or modified sequence
MAARLLLLGILLLLLPLPVPAPCHTAARSECKRSHKFVPGAWLAGEGVDVTSLRRSGSFPVDTQRFLRPDGTCTLCENALQEGTLQRLPLALTNWRAQGSGCQRHVTRAKVSSTEAVARDAARSIRNDWKVGLDVTPKPTSNVHVSVAGSHSQAANFAAQKTHQDQYSFSTDTVECRFYSFHVVHTPPLHPDFKRALGDLPHHFNASTQPAYLRLISNYGTHFIRAVELGGRISALTALRTCELALEGLTDNEVEDCLTVEAQVNIGIHGSISAEAKACEEKKKKHKMTASFHQTYRERHSEVVGGHHTSINDLLFGIQAGPEQYSAWVNSLPGSPGLVDYTLEPLHVLLDSQDPRREALRRALSQYLTDRARWRDCSRPCPPGRQKSPRDPCQCVCHGSAVTTQDCCPRQRGLAQLEVTFIQAWGLWGDWFTATDAYVKLFFGGQELRTSTVWDNNNPIWSVRLDFGDVLLATGGPLRLQVWDQDSGRDDDLLGTCDQAPKSGSHEVRCNLNHGHLKFRYHARCLPHLGGGTCLDYVPQMLLGEPPGNRSGAVW

SEQ ID NO: 37520 - DNA, 1668 bp, Artificial Sequence
  derived and/or modified sequence
atggccgctagattgttactgttgggcattcttctcctcctgttgcccctacccgttccagctccctgccacacggccgccagatcagagtgtaagagatcccacaaatttgtgccaggtgcctggttggctggggagggcgtggatgtaactagcttgcgcagatccggttctttccctgttgacacacagcgctttttgcggcctgatggtacgtgtacgctttgtgagaatgcacttcaggaggggacattacagcgtctgccactggccctcactaattggagggcacaggggagcggctgtcagagacacgtgaccagggccaaagtctcatcaaccgaggcagtcgccagagacgccgcacggagcattcgcaatgattggaaggtgggccttgacgtgacacccaagccaacatcgaacgtccatgtgtccgtggccggtagtcactctcaggcagctaatttcgccgcacaaaagacgcaccaagaccagtactcttttagcacagacacagtagaatgccggttttactctttccacgtggtacatacacccccactgcaccccgatttcaagcgagcactcggcgacctgcctcatcacttcaacgctagcacgcagccggcttatctgagattgatctcgaactatgggacacactttatccgcgccgtcgagctgggcggtcgaatcagtgctctgaccgctctgagaacgtgcgagctggccctggagggcctgaccgacaacgaggtagaggattgcctcacagtggaggcccaggtgaatatcgggatacacggctctatatctgccgaggccaaagcatgcgaagagaaaaaaaagaaacacaagatgactgcaagctttcatcagacataccgggagcggcacagcgaggtggtgggcggtcatcacacctccatcaacgatctgttattcggtatccaggctggcccagagcagtactcggcctgggtgaattccctgcccggctctccggggctcgtggattatactctcgagccgctgcacgttcttcttgactcacaggatcccaggcgagaggccctaaggcgggcactttcacaatatctaacagatcgcgccaggtggagggactgttccagaccgtgtcctccgggcagacagaagagcccccgagacccttgccagtgcgtgtgccacgggagcgcagtcacaactcaggattgttgtccgaggcagcgggggcttgcacaactggaggttacgttcattcaggcatggggactctggggcgactggttcaccgcaactgatgcttacgtcaagttattttttggaggccaggaactgcggaccagtaccgtatgggacaataacaatcccatatggagtgtgcggctcgattttggagacgtgctgctggcgaccgggggcccactgcgacttcaggtgtgggatcaagacagcggcagggacgatgacctgctcggcacctgtgaccaggcccctaaatcggggtctcatgaagtccggtgtaacttaaatcacgggcacctgaaatttcgttatcatgcacggtgtctcccccacctgggcggcgggacgtgtctggattatgtaccccagatgcttctcggagaaccccctggaaaccgtagcggtgcagtgtggtag

SEQ ID NO: 37521 - DNA, 1668 bp, Artificial Sequence
  derived and/or modified sequence
atggccgcaaggttattactactggggatactgcttctactactcccattgcccgtgccggctccatgccatactgccgcccgttccgagtgtaaacgttctcacaaatttgtgcctggtgcctggctggctggcgagggagtagatgttacttccctacggcgtagcggctcttttcctgtcgacacacaaagatttctgcgaccagacggcacttgcactctgtgcgagaatgcattgcaggagggtactctccagcgtttgcccctggccttaacaaactggcgtgctcagggctcagggtgccagcgtcacgtgacgcgagctaaagtgagctctactgaagccgtggcacgggatgctgcccgcagcattaggaacgactggaaagttggcctggatgtgactcccaagcccaccagtaacgttcatgtatctgtcgccggcagtcattcacaggccgcaaacttcgcggcccagaagacccaccaagaccagtactcgttttccactgacacagtcgaatgcaggttctacagcttccacgtagtgcacactcctcccctccaccctgacttcaaaagagcactgggagatctgccccaccatttcaacgcctccacacagcccgcctacttgagactcataagtaactacggtacccattttattcgagcagttgagctcggagggcgaattagcgccttgaccgcactgcggacctgcgaacttgcgctagagggactgacggacaacgaggtagaggattgcctgactgtcgaagcgcaggtaaacattggaattcacggcagcatctccgccgaagcaaaggcatgtgaggaaaagaagaagaagcataaaatgaccgcctcctttcaccagacctatcgcgaaagacattctgaggtcgtgggaggccatcatacatctattaatgatctgttgtttggaattcaggcgggacccgagcagtatagtgcttgggtgaactctctgcctggatctccaggcttggtcgactacacactcgagcctctacacgtgctgttagatagtcaggacccgaggagggaagcacttcgccgagcactgtcccagtatttgactgaccgggcacgttggagagattgttcccgtccttgtccccctgggcgccagaaatcacctagagacccatgccagtgtgtttgtcatggctctgctgtgactacacaggactgctgcccgaggcaaaggggcctagcccagcttgaggtgacctttattcaggcctgggggttgtggggcgactggttcaccgccacagatgcttatgttaagttattttttggcggtcaggagctgcggacaagcacggtgtgggacaacaacaatcccatatggtccgtcagactggatttcggggacgtactcctcgccacaggtgggccactgaggttgcaagtttgggaccaggattctggccgtgacgatgacttgctgggaacctgcgatcaagcccccaagtccggtagccatgaggttcgctgcaacctgaatcacggtcacctgaagtttagataccatgctcgctgcctgccccatctaggcgggggaacgtgcctcgactacgtgccgcagatgttgctgggcgaacctcctggtaaccgaagtggcgccgtgtggtag

SEQ ID NO: 37522 - DNA, 1668 bp, Artificial Sequence
  derived and/or modified sequence
atggctgcccgtctactgctcctgggcatcctcctccttcttctgcccttaccagtcccagctccctgtcacactgcagccaggagcgagtgtaaacggagtcacaagtttgtgcccggagcctggttggcaggcgaaggggtggacgtaacatctctcagacgctcgggctctttcccagtggatacgcagaggttcttacgaccagatggcacttgcactctatgtgaaaacgcactgcaggaagggactctgcaaaggctaccccttgctctgaccaactggcgtgcccagggctcaggttgccagcgtcacgtcacaagggcaaaagtgagctctaccgaagctgttgcacgagacgctgcacgctctatcaggaacgattggaaggtagggctcgacgtaacccccaaaccgaccagcaacgttcatgtttccgttgcaggaagtcacagccaggccgccaattttgctgctcaaaagacccatcaggatcagtacagtttctccaccgacacggtagaatgtaggttctatagttttcacgtagttcacacgccccctttacatcccgattttaaacgagcgctgggggatctgcctcatcatttcaatgcgtcaacacagccagcctatctccggctgatctccaattacgggactcacttcattagggctgtcgaactgggtgggaggatcagtgcgctcactgcgctcagaacttgtgaactggctctggaaggcctgactgataacgaagtcgaagattgcctcacagtagaggcgcaggtaaatatcggaattcatgggagtatatccgcagaagctaaagcatgcgaggaaaaaaagaagaagcataagatgacagccagtttccaccagacttaccgcgaacggcactctgaagtcgtcggcggccaccatacctccatcaacgacctcctatttggcatccaggcaggcccggagcaatacagcgcttgggtgaattcactcccaggcagcccgggcttggtagactacacactggaaccgctgcatgttctgctagacagtcaagacccccgaagggaggccttaagaagggcgctatcccaatatctcaccgatcgtgctcgctggagagactgttcaagaccttgcccgccaggacgacagaaatcccctcgggacccgtgccaatgtgtatgccatggatcggccgtgacgacacaggactgttgtccgcgtcagcgcggcctagcccagcttgaggtcacatttatacaggcttgggggctgtggggtgactggtttaccgcaacggacgcatatgtgaaactcttctttggcggacaagaactccgcacaagcaccgtctgggacaataacaaccccatttggagcgtgcgccttgacttcggcgatgtactgctggccacgggcgggccactccgcctgcaggtgtgggaccaggactcgggtcgtgatgatgacctcctgggaacatgcgatcaggcaccaaagtctgggtcccacgaggtgcgctgtaacctaaaccacggccacttgaagttccggtatcacgcaagatgccttccacacctgggcggtggaacatgtctggactacgtgccgcagatgctgctgggcgaacctcccgggaacagaagcggagccgtgtggtag

SEQ ID NO: 37523 - DNA, 1668 bp, Artificial Sequence
  derived and/or modified sequence
atggccgcccggctgctgctgctgggcatcctgctgctgctgctgcccctgcctgtgcctgccccctgccacacagctgcccggtctgagtgcaagaggagccacaagtttgtgcctggggcctggctggccggggagggcgtggatgtgaccagcctgcggcgcagcggcagcttccctgtggacacccagcgcttcctgcggccagatggcacctgcaccctgtgtgaaaatgccctgcaggagggcaccctgcagaggctgcccctggccctgaccaactggagggcccagggcagcggctgccagagacatgtgacccgggccaaggtgagcagcacagaggccgtggccagagatgctgcccggagcatcagaaatgactggaaggtgggcctggatgtgacccccaagcccaccagcaatgtgcacgtgtctgtggccggcagccacagccaggccgccaactttgctgcccagaagacccaccaggaccagtacagcttcagcacagacacagtggagtgccgcttctacagcttccacgtggtgcacaccccacccctgcacccagacttcaagagggccctgggggacctgccccaccacttcaatgccagcacccagcctgcctacctgcggctcatcagcaactacggcacccacttcatccgggctgtggagctgggcggccgcatcagcgccctgacagccctgcggacctgtgagctggccctggagggcctgacagacaatgaggtggaggactgcctgactgtggaggcccaggtgaacatcggcatccacggcagcatctctgctgaggccaaggcctgtgaggagaagaagaagaagcacaagatgacagccagcttccaccagacctaccgggagcggcacagcgaggtggtgggcggccaccacaccagcatcaatgacctgctgtttggcatccaggccggccctgagcagtacagcgcctgggtgaacagcctgcccggcagccctggcctggtggactacaccctggagcccctgcacgtgctgctggacagccaggacccccggcgggaggccctgcggcgggccctgagccagtacctgacagaccgggcccgctggagggactgcagccggccctgccccccaggccggcagaagagcccccgggacccctgccagtgtgtgtgccacggcagcgctgtgaccacccaggactgctgcccccggcagaggggcctggcccagctggaggtgaccttcatccaggcctggggcctgtggggagactggttcaccgccacagatgcctacgtgaagctgttctttggaggccaggagctgcggaccagcacagtgtgggacaacaacaaccccatctggagcgtgcggctggactttggagatgtgctgctggccaccggcggccccctgcggctgcaggtgtgggaccaggacagcggcagagatgatgacctgctgggcacctgtgaccaggcccccaagagcggcagccatgaggtgcgctgcaacctgaaccacggccacctgaagttccgctaccacgcccgctgcctgccccacctgggcggcggcacctgcctggactatgtgccccagatgctgctgggggagcccccaggcaacagaagtggagctgtgtggtag

SEQ ID NO: 37524 - DNA, 1668 bp, Artificial Sequence
  derived and/or modified sequence
atggccgcccggctgctgctgctgggcatcctgctgctgctgctgccgttacccgtgcctgctccatgccatacagccgcgaggtcggagtgtaagaggtcccacaaatttgtgcccggcgcatggctggccggggagggcgtggatgtgaccagcctccgccgttccggatcattccccgtggacacgcagcgcttcttacgacctgatggcacttgtactttgtgcgaaaatgcgcttcaggaagggacactacaaaggctgccgctggcattgaccaattggcgcgctcagggttccgggtgtcaacgccacgtgacgcgtgccaaggtcagctccacagaggctgttgcccgagatgcggcccggtctatccgcaatgattggaaggtcggcttagatgttacgcccaaacccacgagtaacgtgcacgtaagcgttgcggggtcccactcacaggccgccaactttgcggcacaaaagacacaccaggaccagtatagctttagcacagatacagtggagtgtagattttacagcttccacgttgtgcacacacctcctctgcaccccgatttcaaacgggccctcggcgatctccctcatcacttcaacgccagcactcagccagcatacctcagattgatttccaattacggaacccacttcatccgggcagtggagctgggcggccggatttccgccctcacagccctgcgtacctgcgagctggcattagaaggactgacagataatgaagtggaagattgccttactgtggaagcccaagtcaacataggtatccatgggagcatttcggctgaagcaaaggcttgcgaagagaagaaaaaaaagcacaagatgactgcaagtttccatcagacgtacagggaaaggcatagtgaggtggtaggtggacatcatacgtctatcaacgaccttctgtttggcattcaagcaggacctgaacagtacagcgcatgggtcaactctctgccaggcagcccaggcctggttgattataccctggagccgttgcatgtcctgctggactcccaagacccgcgcagggaggcactccggcgcgctctgtcacaatacttaacggaccgggcgcgctggcgggattgctcccgaccctgccccccaggtcgtcagaagagcccacgcgacccctgtcagtgtgtttgtcacggaagcgccgtcactacacaagactgctgccccaggcagaggggcctcgcccaattagaagtgacgttcatccaggcgtggggcctgtggggggattggtttacagcaactgacgcctatgtgaaattattctttgggggccaggagctaagaacaagcacagtgtgggataacaataatccaatttggagtgtgaggctcgatttcggggatgtgctgctagctaccggcggcccgttgaggctgcaagtgtgggaccaagactccgggagggatgatgacctgctgggaacctgcgaccaagcacctaagtcagggagccacgaagtccggtgtaatctcaatcatggccacctcaagttccggtatcacgcacgttgcttaccccacttgggcgggggaacctgcctcgattacgtgccacaaatgttactgggggagcccccgggcaatcggtccggggctgtgtggtag

SEQ ID NO: 37525 - DNA, 1668 bp, Artificial Sequence
  derived and/or modified sequence
atggccgcccggctgctgctgctgggcatcctgctgctgctgctgccactccccgtccccgcaccatgccatactgccgccaggtctgagtgcaagcgctcacacaagttcgtccctggcgcatggctagcaggcgagggtgtggatgtcacttcactacggcgatctggctcattcccagtggatacacagcgctttttaagacccgacgggacatgcaccctgtgcgagaacgctctccaagagggcacactacaacgcctgcctctcgctttaaccaattggcgagcccaaggttctggatgccagcggcatgtgacaagggcgaaggtgtcatccacagaagccgtggcgagggacgccgcccgaagcatccgtaatgattggaaagtggggctcgatgttacaccaaagcccacgagtaacgttcacgtgagtgtcgctggttctcatagccaggccgccaattttgccgcccaaaagactcaccaggaccagtacagtttctcaactgataccgtggagtgtcgattctattccttccacgtcgttcacacacctcctctgcacccagactttaagagagctcttggcgatctcccccaccatttcaacgcctcgactcaaccagcttacctacgtctgatatcaaattatggcacgcacttcataagggccgtcgagctcggaggacgcatttccgctctcactgctctgaggacatgtgaactcgccctggagggcctgacggataacgaggtggaagattgtctgacagttgaggcacaggtcaatataggcattcacggcagtatctcagcagaagccaaggcctgcgaagaaaaaaagaaaaaacataaaatgacagctagtttccatcagacctatcgtgagcgtcactcagaagtggtcgggggacaccacacgtcaattaatgacctattgtttgggatacaggccggaccggagcagtattcagcttgggtgaatagcctgccagggtccccgggattggtagattacacactcgagcctctgcatgtattacttgacagccaggatccacgcagagaagcactccgccgtgctttaagccagtatcttacggatagagcccgctggcgggactgcagtcgaccttgcccgcctgggcgccagaaatctcctcgggacccttgtcagtgcgtgtgccacggatccgcagtgacaacacaggattgttgcccaagacagagaggccttgcccagttagaagttacattcatccaggcctggggactctggggcgactggtttacagccacagatgcttatgtaaaactgtttttcggagggcaggaacttcggacaagtacggtgtgggacaacaacaacccaatatggtccgtgcgcttggacttcggcgacgtgctgctggctactggaggtccattaagattgcaagtgtgggaccaagatagtggacgggatgatgacttattgggcacctgcgatcaggcgccgaaatccggcagccatgaagttcgctgcaatctgaatcatggacatttaaaatttagatatcacgcgagatgccttccacatctcgggggtggcacatgccttgattatgtaccccagatgcttctgggggaacccccaggtaatcgctccggtgcagtgtggtag

SEQ ID NO: 37526 - DNA, 1668 bp, Artificial Sequence
  derived and/or modified sequence
atggccgcccggctgctgctgctgggcatcctgctgctgctgctgccgctccccgtcccggcaccgtgccacacggcagcccgctctgaatgtaaacgctctcacaagtttgtccctggcgcatggttggcaggagagggtgtggacgtcacttcactccgtagatcgggctcatttccggtggacacacagcgatttcttcggccagatggcacctgcactctgtgcgagaacgcactacaagagggaaccctccagcggctcccactggcactaactaattggcgcgcacagggcagcggctgtcagcgacacgtcacaagagcaaaggtcagctctactgaggcagtggcgcgggacgcggccaggtccattagaaatgattggaaggtgggactagacgtcacacctaaaccaacctctaatgtgcacgtatcagtggctggaagccacagccaggctgccaattttgctgcccagaagactcatcaggaccagtacagcttttccaccgacacagtggagtgccgattctacagtttccacgttgttcatacccccccgctgcacccagatttcaaaagggcactgggtgacctccctcaccactttaacgcctctacacagccagcctacctgcggctgatcagtaactacgggacacatttcatcagggccgtggagctgggtggacggatctccgcccttaccgccttgcggacatgcgagcttgctctggagggattgactgacaacgaagtggaagattgcctcaccgtggaagcccaggtcaatatcggcatccatggcagcatcagtgcagaagccaaggcctgcgaggagaagaaaaaaaagcacaagatgacagcctcctttcatcagacctaccgcgagcggcattctgaagtcgtaggcggccatcacacgtccatcaatgacctcttattcggaatccaggccggtcccgagcagtattcagcatgggtcaacagtcttccaggcagcccgggtcttgtggactacactctggaacctcttcacgtcctgctggatagtcaggatcccaggcgggaggccctccgaagagcactgtcacagtatctgaccgatcgcgcccgctggcgggattgtagccgcccgtgcccccctggacggcagaagtccccaagggacccgtgccaatgcgtctgtcatgggagcgcggtgacaacccaagattgctgtcccaggcaaaggggactggcgcaacttgaagtgacatttatacaggcatggggtctttggggcgactggtttacagctaccgacgcctacgttaaactgttttttgggggccaggagctgagaacttccaccgtctgggataataacaatccgatatggtccgtgaggctcgatttcggcgacgttcttctcgcaacaggggggcccttacggctccaggtatgggatcaggattccggccgcgacgatgatcttctcggtacgtgcgaccaggcaccaaaatccggatctcacgaggttagatgcaatttgaaccacggccacctgaaattccgatatcatgctagatgccttccccacctgggtgggggcacgtgcctcgactatgtaccccagatgttactgggggaaccccctggaaacaggtcaggagcggtttggtag

SEQ ID NO: 37527 - DNA, 2507 bp, Artificial Sequence
  derived and/or modified sequence
gaagtgatgtgagtggtggctggtgcaaggagccacagtgggctgcctggggggctgatgccaccattccaggagcctcggtgaagagaggatatccatctgtgtagccgcttctctatacgggattccagctccatggcagcccgtctgctcctcctgggcatccttctcctgctgctgcccctgcccgtccctgccccgtgccacacagccgcacgctcagagtgcaagcgcagccacaagttcgtgcctggtgcatggctggccggggagggtgtggacgtgaccagcctccgccgctcgggctccttcccagtggacacacaaaggttcctgcggcccgacggcacctgcaccctctgtgaaaatgccctacaggagggcaccctccagcgcctgcctctggcgctcaccaactggcgggcccagggctctggctgccagcgccatgtaaccagggccaaagtcagctccactgaagctgtggcccgggatgcggctcgtagcatccgcaacgactggaaggtcgggctggacgtgactcctaagcccaccagcaatgtgcatgtgtctgtggccggctcacactcacaggcagccaactttgcagcccagaagacccaccaggaccagtacagcttcagcactgacacggtggagtgccgcttctacagtttccatgtggtacacactcccccgctgcaccctgacttcaagagggccctcggggacctgccccaccacttcaacgcctccacccagcccgcctacctcaggcttatctccaactacggcacccacttcatccgggctgtggagctgggtggccgcatatcggccctcactgccctgcgcacctgcgagctggccctggaagggctcacggacaacgaggtggaggactgcctgactgtcgaggcccaggtcaacataggcatccacggcagcatctctgccgaagccaaggcctgtgaggagaagaagaagaagcacaagatgacggcctccttccaccaaacctaccgggagcgccactcggaagtggttggcggccatcacacctccattaacgacctgctgttcgggatccaggccgggcccgagcagtactcagcctgggtaaactcgctgcccggcagccctggcctggtggactacaccctggaacccctgcacgtgctgctggacagccaggacccgcggcgggaggcactgaggagggccctgagtcagtacctgacggacagggctcgctggagggactgcagccggccgtgcccaccagggcggcagaagagcccccgagacccatgccagtgtgtgtgccatggctcagcggtcaccacccaggactgctgccctcggcagaggggcctggcccagctggaggtgaccttcatccaagcatggggcctgtggggggactggttcactgccacggatgcctatgtgaagctcttctttggtggccaggagctgaggacgagcaccgtgtgggacaataacaaccccatctggtcagtgcggctggattttggggatgtgctcctggccacaggggggcccctgaggttgcaggtctgggatcaggactctggcagggacgatgacctccttggcacctgtgatcaggctcccaagtctggttcccatgaggtgagatgcaacctgaatcatggccacctaaaattccgctatcatgccaggtgcttgccccacctgggaggaggcacctgcctggactatgtcccccaaatgcttctgggggagcctccaggaaaccggagtggggccgtgtggtgagaacagtgagcttggaaaggaccagtatgcttggactgaaggggttctcacagtgggagccagggctgtcttcgtattcccattagaccaagcttgtccaacccgaggcccgcatgcggcccaggatggctttgaatgcggcccaacgcaaattcgcaaactttcttaaaacattatgagtttctttttgctattttttttttttttttagctcatcggctatcgttagtgctagtggattttacatgtggcccaacacaattcttcttccaacgtggcccagagaagccaaaagattggatacgcatcagacagatggaaaagggagattcagactgtttttcagggaggtggctgggtttacacgctaatcccgattcaccctgtccaaactgcctaagccctccgccattctcaagccctgcagtcacagctacacagatcacagcttcagccaggagctgggcagaaggccaagaggctgttcccaccaggctgctcagggctggtcttttaggacccttcccttgagccctctatggtgtggcaaagccttcattgccttaactggagccccatcagctccagctgctctgtcttctttgcccacaatgctttgcccctgagacaaatggaggcctgtcctgacctgtctcaccatgtacatagcttgataaagggccaataaatatgatgttatggtg

SEQ ID NO: 37528 - DNA, 2488 bp, Artificial Sequence
  derived and/or modified sequence
tggctggtgcaaggagccacagtgggctgcctggggggctgatgccaccattccaggagcctcggtgaagagaggatatccatctgtgtagccgcttctctatacgggattccagatggcagcccgtctgctcctcctgggcatccttctcctgctgctgcccctgcccgtccctgccccgtgccacacagccgcacgctcagagtgcaagcgcagccacaagttcgtgcctggtgcatggctggccggggagggtgtggacgtgaccagcctccgccgctcgggctccttcccagtggacacacaaaggttcctgcggcccgacggcacctgcaccctctgtgaaaatgccctacaggagggcaccctccagcgcctgcctctggcgctcaccaactggcgggcccagggctctggctgccagcgccatgtaaccagggccaaagtcagctccactgaagctgtggcccgggatgcggctcgtagcatccgcaacgactggaaggtcgggctggacgtgactcctaagcccaccagcaatgtgcatgtgtctgtggccggctcacactcacaggcagccaactttgcagcccagaagacccaccaggaccagtacagcttcagcactgacacggtggagtgccgcttctacagtttccatgtggtacacactcccccgctgcaccctgacttcaagagggccctcggggacctgccccaccacttcaacgcctccacccagcccgcctacctcaggcttatctccaactacggcacccacttcatccgggctgtggagctgggtggccgcatatcggccctcactgccctgcgcacctgcgagctggccctggaagggctcacggacaacgaggtggaggactgcctgactgtcgaggcccaggtcaacataggcatccacggcagcatctctgccgaagccaaggcctgtgaggagaagaagaagaagcacaagatgacggcctccttccaccaaacctaccgggagcgccactcggaagtggttggcggccatcacacctccattaacgacctgctgttcgggatccaggccgggcccgagcagtactcagcctgggtaaactcgctgcccggcagccctggcctggtggactacaccctggaacccctgcacgtgctgctggacagccaggacccgcggcgggaggcactgaggagggccctgagtcagtacctgacggacagggctcgctggagggactgcagccggccgtgcccaccagggcggcagaagagcccccgagacccatgccagtgtgtgtgccatggctcagcggtcaccacccaggactgctgccctcggcagaggggcctggcccagctggaggtgaccttcatccaagcatggggcctgtggggggactggttcactgccacggatgcctatgtgaagctcttctttggtggccaggagctgaggacgagcaccgtgtgggacaataacaaccccatctggtcagtgcggctggattttggggatgtgctcctggccacaggggggcccctgaggttgcaggtctgggatcaggactctggcagggacgatgacctccttggcacctgtgatcaggctcccaagtctggttcccatgaggtgagatgcaacctgaatcatggccacctaaaattccgctatcatgccaggtgcttgccccacctgggaggaggcacctgcctggactatgtcccccaaatgcttctgggggagcctccaggaaaccggagtggggccgtgtggtgagaacagtgagcttggaaaggaccagtatgcttggactgaaggggttctcacagtgggagccagggctgtcttcgtattcccattagaccaagcttgtccaacccgaggcccgcatgcggcccaggatggctttgaatgcggcccaacgcaaattcgcaaactttcttaaaacattatgagtttctttttgctattttttttttttttttagctcatcggctatcgttagtgctagtggattttacatgtggcccaacacaattcttcttccaacgtggcccagagaagccaaaagattggatacgcatcagacagatggaaaagggagattcagactgtttttcagggaggtggctgggtttacacgctaatcccgattcaccctgtccaaactgcctaagccctccgccattctcaagccctgcagtcacagctacacagatcacagcttcagccaggagctgggcagaaggccaagaggctgttcccaccaggctgctcagggctggtcttttaggacccttcccttgagccctctatggtgtggcaaagccttcattgccttaactggagccccatcagctccagctgctctgtcttctttgcccacaatgctttgcccctgagacaaatggaggcctgtcctgacctgtctcaccatgtacatagcttgataaagggccaataaatatgatgttatggtga

SEQ ID NO: 37529 - DNA, 2533 bp, Artificial Sequence
  derived and/or modified sequence
gaagtgatgtgagtggtggctggtgcaaggagccacagtgggctgcctggggggctgatgccaccattccaggagcctcggtgaagagaggatatccatctgtgtagccgcttctctatacgggattccagagcccaagtgccccctgtctctgcagctccatggcagcccgtctgctcctcctgggcatccttctcctgctgctgcccctgcccgtccctgccccgtgccacacagccgcacgctcagagtgcaagcgcagccacaagttcgtgcctggtgcatggctggccggggagggtgtggacgtgaccagcctccgccgctcgggctccttcccagtggacacacaaaggttcctgcggcccgacggcacctgcaccctctgtgaaaatgccctacaggagggcaccctccagcgcctgcctctggcgctcaccaactggcgggcccagggctctggctgccagcgccatgtaaccagggccaaagtcagctccactgaagctgtggcccgggatgcggctcgtagcatccgcaacgactggaaggtcgggctggacgtgactcctaagcccaccagcaatgtgcatgtgtctgtggccggctcacactcacaggcagccaactttgcagcccagaagacccaccaggaccagtacagcttcagcactgacacggtggagtgccgcttctacagtttccatgtggtacacactcccccgctgcaccctgacttcaagagggccctcggggacctgccccaccacttcaacgcctccacccagcccgcctacctcaggcttatctccaactacggcacccacttcatccgggctgtggagctgggtggccgcatatcggccctcactgccctgcgcacctgcgagctggccctggaagggctcacggacaacgaggtggaggactgcctgactgtcgaggcccaggtcaacataggcatccacggcagcatctctgccgaagccaaggcctgtgaggagaagaagaagaagcacaagatgacggcctccttccaccaaacctaccgggagcgccactcggaagtggttggcggccatcacacctccattaacgacctgctgttcgggatccaggccgggcccgagcagtactcagcctgggtaaactcgctgcccggcagccctggcctggtggactacaccctggaacccctgcacgtgctgctggacagccaggacccgcggcgggaggcactgaggagggccctgagtcagtacctgacggacagggctcgctggagggactgcagccggccgtgcccaccagggcggcagaagagcccccgagacccatgccagtgtgtgtgccatggctcagcggtcaccacccaggactgctgccctcggcagaggggcctggcccagctggaggtgaccttcatccaagcatggggcctgtggggggactggttcactgccacggatgcctatgtgaagctcttctttggtggccaggagctgaggacgagcaccgtgtgggacaataacaaccccatctggtcagtgcggctggattttggggatgtgctcctggccacaggggggcccctgaggttgcaggtctgggatcaggactctggcagggacgatgacctccttggcacctgtgatcaggctcccaagtctggttcccatgaggtgagatgcaacctgaatcatggccacctaaaattccgctatcatgccaggtgcttgccccacctgggaggaggcacctgcctggactatgtcccccaaatgcttctgggggagcctccaggaaaccggagtggggccgtgtggtgagaacagtgagcttggaaaggaccagtatgcttggactgaaggggttctcacagtgggagccagggctgtcttcgtattcccattagaccaagcttgtccaacccgaggcccgcatgcggcccaggatggctttgaatgcggcccaacgcaaattcgcaaactttcttaaaacattatgagtttctttttgctattttttttttttttttagctcatcggctatcgttagtgctagtggattttacatgtggcccaacacaattcttcttccaacgtggcccagagaagccaaaagattggatacgcatcagacagatggaaaagggagattcagactgtttttcagggaggtggctgggtttacacgctaatcccgattcaccctgtccaaactgcctaagccctccgccattctcaagccctgcagtcacagctacacagatcacagcttcagccaggagctgggcagaaggccaagaggctgttcccaccaggctgctcagggctggtcttttaggacccttcccttgagccctctatggtgtggcaaagccttcattgccttaactggagccccatcagctccagctgctctgtcttctttgcccacaatgctttgcccctgagacaaatggaggcctgtcctgacctgtctcaccatgtacatagcttgataaagggccaataaatatgatgttatggtg

SEQ ID NO: 37530 - DNA, 1668 bp, Artificial Sequence
  derived and/or modified sequence
atggctgctagactgctgctactgggtatattactcttactgcttcctctgcctgtgccggctccctgccacacagcggcaagatccgaatgtaaacgatcccataagttcgttccaggggcttggctggctggcgagggcgtggatgttacaagcttgcgcagatcgggcagcttccccgttgacactcagcgctttctgcgccctgacgggacatgcactctgtgcgaaaatgctctgcaggaaggaacactgcagcgcctcccgctagcgttgactaactggcgggctcagggatctggctgtcagagacatgtgacaagggccaaggtgtccagtactgaggcagtggccagagacgcggctagaagtatccggaacgactggaaagtgggcctcgatgtgactcctaaacccaccagcaatgtgcacgtttctgtagccggaagccattctcaagctgccaacttcgcagcgcaaaagactcatcaggaccagtactctttcagtacagacaccgtggaatgcagattttacagctttcatgtcgtccacaccccgccactgcacccagactttaagagagctctaggcgacctcccacaccacttcaatgcctctactcaacccgcatacctgcgcttgatctcaaactacggcacccactttatccgtgcggttgaactggggggaagaatttccgcccttaccgcccttcggacctgcgagcttgcactcgagggcctcactgataatgaggtcgaagactgcctgacagtggaggcacaggttaacatcgggattcacggcagcatcagtgccgaggccaaagcgtgtgaggagaagaaaaaaaaacataaaatgaccgctagtttccatcaaacttatcgcgaaagacactctgaggtggtaggtggacaccacacaagcataaatgacttactctttggaatacaagccggacccgagcagtactccgcctgggtcaattcccttcctggatcccccggtctcgtagactacacgctggagcctctgcacgtactcctggattcccaagatcccaggcgcgaggccctgagaagagctctctcccagtatctgaccgatcgagccaggtggagggattgctcccggccttgtccccctggtaggcagaagtctccgagggatccctgccagtgtgtctgccatggctccgcagtcactacacaggactgttgcccgagacagcgagggttggcccagcttgaagttacatttatacaggcatgggggctctggggggactggttcaccgccactgatgcttatgtcaagcttttcttcggcggacaggagttgcggacaagcactgtgtgggataacaataatcccatttggagcgtcagactggatttcggagacgtcctgctggctacaggcggtcccctgaggctgcaagtgtgggatcaggactcaggcagggatgatgatcttctcggcacctgcgatcaggcacctaaaagtgggtcccatgaagttcgctgtaatctgaaccatggacatctcaaatttcgataccacgcacgttgcctgccccacctcggtggaggaacgtgtctcgattacgtgcctcaaatgctgctcggggagccccctggcaacagatccggagccgtgtggtag

SEQ ID NO: 37531 - DNA, 1668 bp, Artificial Sequence
  derived and/or modified sequence
atggctgctaggttgctcctgcttgggatcctcctgttactcctgcctctgccagtccccgcaccttgtcacaccgctgctagatccgagtgtaagagatcccataaattcgtgccaggcgcatggttggcgggagagggcgtcgacgtaacatcccttcgtcgatctgggagcttccctgtcgatacccagcgcttcctgcgcccagacggcacctgcactttgtgcgagaatgctctgcaagagggcaccctgcagcgacttcccctcgcgttgactaactggcgcgcacagggcagcgggtgccagaggcacgttacaagggccaaagtttcctctactgaggctgtggcacgagatgctgcgagaagcattcggaacgattggaaggtgggattagacgtcacccccaaacctacctcaaatgttcacgtttcagtcgccggatcgcactctcaagccgcaaattttgctgcccagaaaacccaccaggaccagtattccttttcaaccgatacagtggagtgtcgtttttattcctttcacgtcgtgcatactcctcccctccaccctgattttaagagagctctaggtgacctgccacaccatttcaatgcgtctacgcaaccagcctatcttcggctgataagcaactacggaactcactttataagagccgtagagttgggtgggagaattagcgccctgaccgccctcaggacgtgcgagctcgcactggagggccttacagacaacgaggtagaggattgcttaaccgttgaggcccaggtgaatatcggcattcatggaagcattagtgccgaggccaaggcctgtgaggagaaaaagaaaaagcataaaatgactgccagttttcaccagacttaccgagaacgccactcggaggtagtgggtggacaccacacatccattaatgatctgctctttggcattcaggcgggtccagagcagtactcggcctgggtgaacagcttaccaggctcccccggactcgtggactatacactcgagcctctccatgtgctccttgacagtcaggatcctaggcgggaagcacttcgtagagccttgtcccaatacctgactgacagggcccgatggcgcgactgcagtcgcccttgccccccaggtcggcagaagtctcctagggacccttgtcaatgcgtgtgtcatggttccgcagttacgacccaggattgttgcccaaggcagagaggtttggcacagcttgaagtgacgtttatccaggcgtgggggctgtggggggactggttcaccgccacggatgcatatgttaaactgttctttggcggtcaggagctaagaacctcaacagtatgggataataacaacccgatctggtctgtgcgcttggactttggggatgtgttactcgccaccggcggtccactccggttgcaggtgtgggaccaggactctggaagagatgatgacctgttgggtacttgcgaccaggcacccaagtcaggatcccatgaggtgaggtgtaaccttaaccacggccacttaaagttcagatatcacgctcggtgtttaccgcacctggggggaggaacgtgcctggattacgtacctcagatgctgctaggagaaccgccaggaaatagatccggcgctgtttggtag

SEQ ID NO: 37532 - DNA, 1668 bp, Artificial Sequence
  derived and/or modified sequence
atggccgctcggctactgctgctgggtatcttgctgctcttattaccgctcccagttcccgctccatgccataccgcagcaagaagtgaatgcaagcgctctcataaatttgtccctggtgcctggctagctggagaaggagtggacgtaacatcccttagacgaagcggaagctttccagtcgacactcaacggtttctgcggcctgatggaacgtgtacgctgtgcgaaaatgcgctgcaggagggtaccctgcagcgcctgccactggctctcacgaactggagagcccagggctcggggtgccaacgtcatgtgacgcgcgctaaagtgagttctactgaagctgtcgcgcgtgatgctgctcggtctatcagaaacgactggaaagtcgggctcgacgtaactcctaaacctacctctaatgtacacgtgtccgttgccggatctcacagtcaagctgccaacttcgctgctcagaaaactcaccaagatcaatacagtttcagtaccgatacagtcgaatgccggttctacagctttcacgtggtgcatactccccctttgcatcctgacttcaaaagggcgctgggcgatcttccccatcacttcaatgcttctacacagcctgcttacctgcgcctcatctcgaattacggcacccactttataagggccgtcgagttgggtggtaggatatctgctctgactgcacttagaacatgtgaactggcgcttgagggcctaacggacaacgaggtcgaggactgcttaacggtcgaggctcaggttaacatcgggatccacggcagcatctcagcggaggccaaagcatgtgaagagaagaagaagaagcataagatgacagccagctttcaccagacttatagagagaggcacagcgaagtggtgggagggcaccatacttctatcaacgacctactcttcggcatccaggccggaccggaacagtatagcgcctgggtgaatagtctgccagggtcgccaggacttgtggactatacactcgagccactgcacgtattgctggattcacaggatccgaggcgcgaggcccttcggagggccctgtctcagtatttaaccgacagagccaggtggagggattgctctcggccttgtccgcctgggcgacagaaaagtccgcgtgatccttgtcagtgtgtgtgtcacggatccgcggttaccacccaagattgctgccccaggcaacgcggtctcgctcagctggaagtgacattcattcaggcatggggtctttggggtgattggtttacagccaccgatgcctacgtgaagctcttcttcgggggacaggaactgcgtacatctacggtgtgggataataacaaccccatctggagcgtgcgcctggactttggcgacgttctcctagccaccggaggcccactgagacttcaagtctgggaccaggactctgggagggatgacgatctgctcgggacatgtgatcaggcacccaagtcagggtctcacgaagttaggtgcaacctgaatcacggacacttaaagtttcgttatcatgcgagatgtctgccacacttgggcggtggaacctgtctcgattacgtcccccagatgctcctgggagagcctcctggtaaccggtccggggctgtgtggtag

SEQ ID NO: 37533 - DNA, 1668 bp, Artificial Sequence
  derived and/or modified sequence
atggccgccagactgctgctgctgggcatcctgctgctgctgctgcccctgcccgtgcccgccccctgccacaccgccgccagaagcgagtgcaagagaagccacaagttcgtgcccggcgcctggctggccggcgagggcgtggacgtgaccagcctgagaagaagcggcagcttccccgtggacacccagagattcctgagacccgacggcacctgcaccctgtgcgagaacgccctgcaggagggcaccctgcagagactgcccctggccctgaccaactggagagcccagggcagcggctgccagagacacgtgaccagagccaaggtgagcagcaccgaggccgtggccagagacgccgccagaagcatcagaaacgactggaaggtgggcctggacgtgacccccaagcccaccagcaacgtgcacgtgagcgtggccggcagccacagccaggccgccaacttcgccgcccagaagacccaccaggaccagtacagcttcagcaccgacaccgtggagtgcagattctacagcttccacgtggtgcacaccccccccctgcaccccgacttcaagagagccctgggcgacctgccccaccacttcaacgccagcacccagcccgcctacctgagactgatcagcaactacggcacccacttcatcagagccgtggagctgggcggcagaatcagcgccctgaccgccctgagaacctgcgagctggccctggagggcctgaccgacaacgaggtggaggactgcctgaccgtggaggcccaggtgaacatcggcatccacggcagcatcagcgccgaggccaaggcctgcgaggagaagaagaagaagcacaagatgaccgccagcttccaccagacctacagagagagacacagcgaggtggtgggcggccaccacaccagcatcaacgacctgctgttcggcatccaggccggccccgagcagtacagcgcctgggtgaacagcctgcccggcagccccggcctggtggactacaccctggagcccctgcacgtgctgctggacagccaggaccccagaagagaggccctgagaagagccctgagccagtacctgaccgacagagccagatggagagactgcagcagaccctgcccccccggcagacagaagagccccagagacccctgccagtgcgtgtgccacggcagcgccgtgaccacccaggactgctgccccagacagagaggcctggcccagctggaggtgaccttcatccaggcctggggcctgtggggcgactggttcaccgccaccgacgcctacgtgaagctgttcttcggcggccaggagctgagaaccagcaccgtgtgggacaacaacaaccccatctggagcgtgagactggacttcggcgacgtgctgctggccaccggcggccccctgagactgcaggtgtgggaccaggacagcggcagagacgacgacctgctgggcacctgcgaccaggcccccaagagcggcagccacgaggtgagatgcaacctgaaccacggccacctgaagttcagataccacgccagatgcctgccccacctgggcggcggcacctgcctggactacgtgccccagatgctgctgggcgagccccccggcaacagaagcggcgccgtgtggtag

SEQ ID NO: 37534 - protein, 97 aa, Artificial Sequence
  derived and/or modified sequence
MASSAELDFNLQALLEQLSQDELSKFKSLIRTISLGKELQTVPQTEVDKANGKQLVEIFTSHSCSYWAGMAAIQVFEKMNQTHLSGRADEHCVMPPP

SEQ ID NO: 37535 - DNA, 294 bp, Artificial Sequence
  derived and/or modified sequence
atggccagcagcgccgagctggacttcaacctgcaggccctgctggagcagctgagccaggacgagctgagcaagttcaagagcctgatcagaaccatcagcctgggcaaggagctgcagaccgtgccccagaccgaggtggacaaggccaacggcaagcagctggtggagatcttcaccagccacagctgcagctactgggccggcatggccgccatccaggtgttcgagaagatgaaccagacccacctgagcggcagagccgacgagcactgcgtgatgccccccccctag

SEQ ID NO: 37536 - DNA, 294 bp, Artificial Sequence
  derived and/or modified sequence
atggcctcaagcgcagagcttgatttcaatttacaggcactgctggagcaactgtctcaggatgagctgtcaaaattcaagagcctcatccgaactatctcccttggcaaagaacttcagacagtccctcagactgaggtggataaagccaacggcaaacagctcgtcgaaattttcacatcccactcatgctcatactgggccggcatggcagccatccaggtgttcgaaaagatgaatcaaactcacctatctggccgcgctgatgaacactgtgtgatgccgccaccatag

SEQ ID NO: 37537 - DNA, 294 bp, Artificial Sequence
  derived and/or modified sequence
atggccagcagcgctgagctggacttcaacctgcaggccctgctggagcagctgagccaggatgagctgagcaagttcaagagcctcatccgcaccatcagcctgggcaaggagctgcagacagtgccccagacagaggtggacaaggccaacgggaagcagctggtggagatcttcaccagccacagctgcagctactgggccggcatggccgccatccaggtgtttgagaagatgaaccagacccacctgagcggccgggcagatgagcactgtgtgatgcccccaccctag

SEQ ID NO: 37538 - DNA, 294 bp, Artificial Sequence
  derived and/or modified sequence
atggccagcagcgccgagctggacttcaacctgcaggccctgctggaacagctatcacaggacgagctgagtaaatttaaatctttgatacggaccataagtttggggaaggagctacaaaccgtgccccagaccgaagtggacaaggcaaatgggaaacaactcgtagaaatttttaccagtcactcctgctcttactgggccggtatggccgcgatacaggtgttcgaaaagatgaaccagacacacctctcaggacgggccgatgaacactgcgtaatgccccccccgtag

SEQ ID NO: 37539 - DNA, 294 bp, Artificial Sequence
  derived and/or modified sequence
atggctagttccgccgaactggacttcaacctccaggctttgcttgaacaattatcacaggatgaactgtcaaagtttaagtcattgatacgaaccatctcacttgggaaagaactgcagactgtcccccaaaccgaggtcgataaggcaaatgggaagcagctagtggaaatattcacgagtcatagttgttcctattgggcgggaatggctgctatccaggtgtttgaaaagatgaatcagacccaccttagcggtagggctgacgagcactgtgtcatgccccctccatag

SEQ ID NO: 37540 - DNA, 294 bp, Artificial Sequence
  derived and/or modified sequence
atggcatcttctgcagagctggacttcaacctgcaggctcttctggagcagctcagccaggatgagttgagcaagttcaagtctctgatcagaacaatctccctgggaaaggagctacagaccgtcccccagacagaggtagacaaggctaatgggaagcaactggtagaaatcttcaccagccactcctgcagctactgggcagggatggcagccatccaggtctttgaaaagatgaatcaaacgcatctgtctgggagagctgatgaacactgtgtgatgcccccaccttaa

SEQ ID NO: 37541 - DNA, 723 bp, Artificial Sequence
  derived and/or modified sequence
atggatgttcatggagaggctgccggggaggccggccaggaagggggcgagggcctccaggggggagccggacaatcagaggagggcccatctgctgagaaatgcagagtgtgtccctgcgtctgcagggagcggcatccacaggaggagcgacggtgcgaacttgccagtgacggtgtgccaaggcggaggtctggactgcagggcgcagattcctgtgattatgaggggggtgatcaggagtatggacctggagatcagtcccctgggcaggggccggaacatcatggcccggcagagggtctcctatcagatggacaagttcgggccgctggggctgaaccagggaggccttacatcggggacggggggctgcacgaactcggacaccacccagaccacgcagccggcgcaggcggccagccccatcatgccgaccggaggggcgagtggcctggcggggccggacctgcccaacctgcagcccgaggcaggctttgtcggggtcgagaactgtgcgcccagccaggaggacccgccgtgaccgaggtgggaagacttgaggaactagctgtcccgaggcgctgcgcaccaccacttccccgagatgtccttgagggaagctgtcctctcccgacggccagttgcctctgtgctgatccggccgggctgcgccctgccgcgactctgcgcctttcccctgcaagacccgcatggccctag

SEQ ID NO: 37542 - DNA, 723 bp, Artificial Sequence
  derived and/or modified sequence
atggatgtgcacggggaggccgccggggaggccggccaggagggcggggagggcctgcagggcggggccggccagagcgaggagggccccagcgctgagaagtgccgggtgtgcccctgtgtgtgccgggagcggcacccccaggaggagcggcgctgtgagctggccagtgatggagtgcccaggagaagaagtggcctgcagggcgctgacagctgtgactatgaaggaggagaccaggagtatggccctggggaccagagccctggccagggccctgagcaccacggccctgctgagggcctgctgagtgatggccaggtgcgggctgctggagctgagcccggccggccctacatcggagatggcggcctgcacgagctgggccaccacccagaccatgctgctggggccggcggccagccccaccacgccgacagaagaggagagtggccaggaggagctggccctgcccagcctgctgcccggggccgcctgtgccggggccgggagctgtgtgcccagcccggcggccctgctgtgacagaggtgggccgcctggaggagctggccgtgccccggcgctgtgccccacccctgcccagagatgtgctggagggcagctgccccctgcccacagccagctgcctgtgtgccgaccctgctggcctgcggcctgctgccaccctgcggctgagccctgcccggcctgcctggccctag

SEQ ID NO: 37543 - DNA, 723 bp, Artificial Sequence
  derived and/or modified sequence
atggacgtgcacggcgaggccgccggcgaggccggccaggagggcggtgaaggactgcagggcggcgcggggcagtcggaggagggtccgagtgcggagaagtgcagagtctgcccctgcgtgtgccgggagaggcacccgcaggaggagcgccgatgtgagcttgcttcagacggggtgccgcgcagaagatccggcctgcaaggggcagactcctgtgattacgagggaggtgaccaagaatatggacccggcgatcagtccccgggacaggggcctgaacatcacggccccgcagaaggattactgagcgacggccaagtaagggcagccggagccgagccgggacgaccgtatatcggcgatgggggccttcatgagctcgggcatcaccctgaccatgccgccggcgccggggggcagcctcatcacgccgacaggcgcggcgagtggccaggtggtgccggccccgctcagcccgccgcgagggggcggctgtgcagaggacgcgagctctgtgcacagcctggaggccccgctgtgactgaagtggggcggttggaggagctggccgtccctaggcgatgtgccccgccactaccgcgggatgttctggaggggagctgccccctccctactgcatcctgcttgtgcgctgatccagccgggttacggccagcggccaccctgagattaagccctgcgcgcccagcctggccctag

SEQ ID NO: 37544 - DNA, 723 bp, Artificial Sequence
  derived and/or modified sequence
atggatgtccatggggaagccgctggcgaagcaggacaggaaggcggagaagggctacaaggtggggctggtcaatctgaggagggcccttccgccgaaaaatgtcgggtttgcccttgtgtgtgccgggagaggcacccccaggaggagagaagatgcgaactggcgagtgatggagttcctagaaggcgaagtggcctgcaaggagcggattcgtgcgactacgagggaggggaccaggaatacggaccaggagaccagagccccggtcagggcccagagcaccatggcccagccgagggactgttatccgatggccaagtgcgcgcagcaggagctgaaccaggaagaccttacatcggagatggcggattacacgagctgggccatcatcctgaccacgccgctggggctgggggacagccgcaccacgctgacaggagaggggagtggcccggaggggcagggcctgcccagccggcagctaggggacggttgtgtcggggtagggagctgtgtgcccagcctggcggacccgctgttaccgaggttggcagactcgaggaattagcggttccgagacgctgcgcaccgcctcttcctcgggacgtactggaggggtcgtgccccctccctaccgctagctgcctgtgtgccgatccagctggtttgagacccgctgcaacgctgcgcttgtctcctgcgagaccagcatggccttag

SEQ ID NO: 37545 - DNA, 2332 bp, Artificial Sequence
  derived and/or modified sequence
ccggaagtggggcggcgaccccggaagtccccgccgggtgcagcttggtcggttcgatcgccgccgggacctgacaccgcccggagttggcgtcccttctccctctccgagtgctgctcctgtcattgtggccatggacgttcacggcgaagcagctggagaagctggccaagaaggcggagaaggactccaaggcggagcaggccaaagtgaagaaggcccttctgcagaaaaatgtagagtgtgcccgtgtgtatgccgagaacgccatccgcaagaagaacgaaggtgtgaactggcttcggatggcgtcccgcgtagacgcagtggcctccaaggtgcagacagctgtgactatgaagggggtgaccaagaatatggcccaggtgaccaaagccctggacaaggccctgagcaccatggacctgcagaaggtctcctcagtgatggacaggttcgagcagcaggtgcagaacctggacgtccatacatcggtgatggaggactccatgagctcggccaccaccctgaccacgccgcaggagcaggtggacagcctcatcatgcagatcgccgaggagaatggcctggaggtgctggaccagctcagccagctgcccgagggcgcctctgccgtgggcgagagctctgtgcgcagccaggaggaccagctgtcacggaggttggccgccttgaggaactagccgtgccccgccggtgtgcaccgcctctgccccgtgatgtgctggaaggctcctgtcctctccccaccgcgtcttgcctttgtgctgaccccgcggggctgcggccggcagccactctgcgtctctcacctgccaggcctgcgtggccttagggttgttcctgttcttttaggttgggcggtgggtctgtgtcctggtgttgagtttctgcaaatttctgggggtgatttctgtgactctgggcccacagcggggaggccaagaggggccctgtggactttcacccagcactgtgggggccttcagactctggggcagcagacatgctgcttcccatcagccagagggggtcagggctgccctgttgccaaacaactccctgaggcctctccgcaccacctcagcgggcaggaggtcccaccatgtggacagacatagcccaaggaggcaccacaggtctatgtgtgctgggggatgtcaggtgccacccaacgctgtcctggtggtatttacaatgacatcctcctcctccatcactccaggggtggtgtctcggccgcccctaccagctggctgagccccctggcctcctgcgctccctcacttccctcagttcccaaagctgcccagtccatggggacagaaccgtcactcagatccacattcaagtgtgcccaccctgcagtcttcatcctcactcagctgctgcctctggaggtgcctttggccacatgtgctgtgctgtttgtctcctcgacagggagcctgtccaccagcaggctgcggtcccagcgggtgcgtctgcagctcctccccttgggcagcctggttctcccggaggacctttccttggggccctgcttcatgacgatgctgcctgtgtcaccctctaccatctgtaaacaactgggtgccttccccgaccacaccccaatgccttcccagcttggaagccaaggcagctgatgaagggagctcaggagagccgtcttcagctgggctggggttggggctgctgtgaggaaaacctgccattgtggccctggagagtcaccagcagctcttgggaaggacttgctgggaggctgagagaggctttgggcacagcctgctgtcttttccatttcctaaagtttacttcattgtcttgaggcttccaggttttgtttttgtttttgccaaagtagaaaaggcaggtggtgggcggctggcagggagtgcgggtccccgcccctcttcagtcctgccctcccctcctcagtcctgcccaccccgtgcagcccatgctgaggctgcagtggtgtcgtgggtgttacgtgcaggaacgtggagaccctgacgtgggctcactgcgtttggttttcttttcagaacttgggagcccccagggaggggctagtgttggtaggtcctagacgtggttccctccagcctccccaaaatcaaccctggtgttgagagaacgtccttctgtccatcgtgggtaacagccttggggagggtgcagagctctgcagagccatgggccaggtggggctgcctcagtcctgtccccttgggcactgaggagaggggcccattcacctttctcctagaatgctgttgtaaataaacaaatggatccctgg

SEQ ID NO: 37546 - DNA, 723 bp, Artificial Sequence
  derived and/or modified sequence
atggacgtgcacggcgaggccgccggcgaggccggccaggagggcggcgagggcctgcagggcggcgccggccagagcgaggagggccccagcgccgagaagtgcagagtgtgcccctgcgtgtgcagagagagacacccccaggaggagagaagatgcgagctggccagcgacggcgtgcccagaagaagaagcggcctgcagggcgccgacagctgcgactacgagggcggcgaccaggagtacggccccggcgaccagagccccggccagggccccgagcaccacggccccgccgagggcctgctgagcgacggccaggtgagagccgccggcgccgagcccggcagaccctacatcggcgacggcggcctgcacgagctgggccaccaccccgaccacgccgccggcgccggcggccagccccaccacgccgacagaagaggcgagtggcccggcggcgccggccccgcccagcccgccgccagaggcagactgtgcagaggcagagagctgtgcgcccagcccggcggccccgccgtgaccgaggtgggcagactggaggagctggccgtgcccagaagatgcgccccccccctgcccagagacgtgctggagggcagctgccccctgcccaccgccagctgcctgtgcgccgaccccgccggcctgagacccgccgccaccctgagactgagccccgccagacccgcctggccctag

SEQ ID NO: 37547 - protein, 912 aa, Artificial Sequence
  derived and/or modified sequence
MIKFQMVTFKDVAVVFTEEELGLLDSVQRKLYRDVMLENFRNLLLVAHQPFKPDLISQLEREEKLLMVETETPRDGCSGRKNQQKMESIQEVTVSYFSPKELSSRQTWQQSAGGLIRCQDFLKVFQGKNSQLQEQGNSLGQVWAGIPVQISEDKNYIFTHIGNGSNYIKSQGYPSWRAHHSWRKMYLKESHNYQCRCQQISMKNHFCKCDSVSWLSHHNDKLEVHRKENYSCHDCGEDIMKVSLLNQESIQTEEKPYPCTGYRKAFSNDSSSEVHQQFHLEGKPYTYSSCGKGCNYSSLLHIHQNIEREDDIENSHLKSYQRVHTEEKPCKCGEYGENFNHCSPLNTYELIHTGEMSYRHNIYEKAFSHSLDLNSIFRVHTRDEPHEYEENENVFNQSSCLQVHQKIHTEEKLYTDIEYGKSFICSSNLDIQHRVHMEENSYNSEECGNGFSLASHFQDLQIVHTKEQPYKRYVCSNSFSHNLYLQGHPKIHIGEKPRKEHGNGFNWSSKLKDHQRVHTGQKPYKCNICGKGFNHRSVLNVHQRVHTGEKPYKCEECDKGFSRSSYLQAHQRVHTGEKPYKCEECGKGFSRNSYLQGHQRVHTGEKPYKCEECGKGFSRSSHLQGHQRVHTGEKPFKCEECGKGFSWSFNLQIHQRVHTGEKPYKCEECGKGFSKASTLLAHQRVHTGEKPYQCDECGKSFSQRSYLQSHQSVHSGERPYICEVCGKGFSQRAYLQGHQRVHTRVKPYKCEMCGKGFSQSSRLEAHRRVHTGGKPYKCEVCTKGFSESSRLQAHQRVHVEGRPYKCEQCGKGFSGYSSLQAHHRVHTGEKPYKCEVCGKGFSQRSNLQAHQRVHTGEKPYKCDACGKGFRWSSGLLIHQRVHSSDKFYKSEDYGKDYPSSENLHRNEDSVLF

SEQ ID NO: 37548 - protein, 913 aa, Artificial Sequence
  derived and/or modified sequence
MTKFQEMVTFKDVAVVFTEEELGLLDSVQRKLYRDVMLENFRNLLLVAHQPFKPDLISQLEREEKLLMVETETPRDGCSGRKNQQKMESIQEVTVSYFSPKELSSRQTWQQSAGGLIRCQDFLKVFQGKNSQLQEQGNSLGQVWAGIPVQISEDKNYIFTHIGNGSNYIKSQGYPSWRAHHSWRKMYLKESHNYQCRCQQISMKNHFCKCDSVSWLSHHNDKLEVHRKENYSCHDCGEDIMKVSLLNQESIQTEEKPYPCTGYRKAFSNDSSSEVHQQFHLEGKPYTYSSCGKGCNYSSLLHIHQNIEREDDIENSHLKSYQRVHTEEKPCKCGEYGENFNHCSPLNTYELIHTGEMSYRHNIYEKAFSHSLDLNSIFRVHTRDEPHEYEENENVFNQSSCLQVHQKIHTEEKLYTDIEYGKSFICSSNLDIQHRVHMEENSYNSEECGNGFSLASHFQDLQIVHTKEQPYKRYVCSNSFSHNLYLQGHPKIHIGEKPRKEHGNGFNWSSKLKDHQRVHTGQKPYKCNICGKGFNHRSVLNVHQRVHTGEKPYKCEECDKGFSRSSYLQAHQRVHTGEKPYKCEECGKGFSRNSYLQGHQRVHTGEKPYKCEECGKGFSRSSHLQGHQRVHTGEKPFKCEECGKGFSWSFNLQIHQRVHTGEKPYKCEECGKGFSKASTLLAHQRVHTGEKPYQCDECGKSFSQRSYLQSHQSVHSGERPYICEVCGKGFSQRAYLQGHQRVHTRVKPYKCEMCGKGFSQSSRLEAHRRVHTGGKPYKCEVCTKGFSESSRLQAHQRVHVEGRPYKCEQCGKGFSGYSSLQAHHRVHTGEKPYKCEVCGKGFSQRSNLQAHQRVHTGEKPYKCDACGKGFRWSSGLLIHQRVHSSDKFYKSEDYGKDYPSSENLHRNEDSVLF

SEQ ID NO: 37549 - protein, 907 aa, Artificial Sequence
  derived and/or modified sequence
MVTFKDVAVVFTEEELGLLDSVQRKLYRDVMLENFRNLLLVAHQPFKPDLISQLEREEKLLMVETETPRDGCSGRKNQQKMESIQEVTVSYFSPKELSSRQTWQQSAGGLIRCQDFLKVFQGKNSQLQEQGNSLGQVWAGIPVQISEDKNYIFTHIGNGSNYIKSQGYPSWRAHHSWRKMYLKESHNYQCRCQQISMKNHFCKCDSVSWLSHHNDKLEVHRKENYSCHDCGEDIMKVSLLNQESIQTEEKPYPCTGYRKAFSNDSSSEVHQQFHLEGKPYTYSSCGKGCNYSSLLHIHQNIEREDDIENSHLKSYQRVHTEEKPCKCGEYGENFNHCSPLNTYELIHTGEMSYRHNIYEKAFSHSLDLNSIFRVHTRDEPHEYEENENVFNQSSCLQVHQKIHTEEKLYTDIEYGKSFICSSNLDIQHRVHMEENSYNSEECGNGFSLASHFQDLQIVHTKEQPYKRYVCSNSFSHNLYLQGHPKIHIGEKPRKEHGNGFNWSSKLKDHQRVHTGQKPYKCNICGKGFNHRSVLNVHQRVHTGEKPYKCEECDKGFSRSSYLQAHQRVHTGEKPYKCEECGKGFSRNSYLQGHQRVHTGEKPYKCEECGKGFSRSSHLQGHQRVHTGEKPFKCEECGKGFSWSFNLQIHQRVHTGEKPYKCEECGKGFSKASTLLAHQRVHTGEKPYQCDECGKSFSQRSYLQSHQSVHSGERPYICEVCGKGFSQRAYLQGHQRVHTRVKPYKCEMCGKGFSQSSRLEAHRRVHTGGKPYKCEVCTKGFSESSRLQAHQRVHVEGRPYKCEQCGKGFSGYSSLQAHHRVHTGEKPYKCEVCGKGFSQRSNLQAHQRVHTGEKPYKCDACGKGFRWSSGLLIHQRVHSSDKFYKSEDYGKDYPSSENLHRNEDSVLF

SEQ ID NO: 37550 - protein, 913 aa, Artificial Sequence
  derived and/or modified sequence
LTVCQEMVTFKDVAVVFTEEELGLLDSVQRKLYRDVMLENFRNLLLVAHQPFKPDLISQLEREEKLLMVETETPRDGCSGRKNQQKMESIQEVTVSYFSPKELSSRQTWQQSAGGLIRCQDFLKVFQGKNSQLQEQGNSLGQVWAGIPVQISEDKNYIFTHIGNGSNYIKSQGYPSWRAHHSWRKMYLKESHNYQCRCQQISMKNHFCKCDSVSWLSHHNDKLEVHRKENYSCHDCGEDIMKVSLLNQESIQTEEKPYPCTGYRKAFSNDSSSEVHQQFHLEGKPYTYSSCGKGCNYSSLLHIHQNIEREDDIENSHLKSYQRVHTEEKPCKCGEYGENFNHCSPLNTYELIHTGEMSYRHNIYEKAFSHSLDLNSIFRVHTRDEPHEYEENENVFNQSSCLQVHQKIHTEEKLYTDIEYGKSFICSSNLDIQHRVHMEENSYNSEECGNGFSLASHFQDLQIVHTKEQPYKRYVCSNSFSHNLYLQGHPKIHIGEKPRKEHGNGFNWSSKLKDHQRVHTGQKPYKCNICGKGFNHRSVLNVHQRVHTGEKPYKCEECDKGFSRSSYLQAHQRVHTGEKPYKCEECGKGFSRNSYLQGHQRVHTGEKPYKCEECGKGFSRSSHLQGHQRVHTGEKPFKCEECGKGFSWSFNLQIHQRVHTGEKPYKCEECGKGFSKASTLLAHQRVHTGEKPYQCDECGKSFSQRSYLQSHQSVHSGERPYICEVCGKGFSQRAYLQGHQRVHTRVKPYKCEMCGKGFSQSSRLEAHRRVHTGGKPYKCEVCTKGFSESSRLQAHQRVHVEGRPYKCEQCGKGFSGYSSLQAHHRVHTGEKPYKCEVCGKGFSQRSNLQAHQRVHTGEKPYKCDACGKGFRWSSGLLIHQRVHSSDKFYKSEDYGKDYPSSENLHRNEDSVLF

SEQ ID NO: 37551 - protein, 930 aa, Artificial Sequence
  derived and/or modified sequence
MGLGPRSLPFSRKRKRKMTKFQEMVTFKDVAVVFTEEELGLLDSVQRKLYRDVMLENFRNLLLVAHQPFKPDLISQLEREEKLLMVETETPRDGCSGRKNQQKMESIQEVTVSYFSPKELSSRQTWQQSAGGLIRCQDFLKVFQGKNSQLQEQGNSLGQVWAGIPVQISEDKNYIFTHIGNGSNYIKSQGYPSWRAHHSWRKMYLKESHNYQCRCQQISMKNHFCKCDSVSWLSHHNDKLEVHRKENYSCHDCGEDIMKVSLLNQESIQTEEKPYPCTGYRKAFSNDSSSEVHQQFHLEGKPYTYSSCGKGCNYSSLLHIHQNIEREDDIENSHLKSYQRVHTEEKPCKCGEYGENFNHCSPLNTYELIHTGEMSYRHNIYEKAFSHSLDLNSIFRVHTRDEPHEYEENENVFNQSSCLQVHQKIHTEEKLYTDIEYGKSFICSSNLDIQHRVHMEENSYNSEECGNGFSLASHFQDLQIVHTKEQPYKRYVCSNSFSHNLYLQGHPKIHIGEKPRKEHGNGFNWSSKLKDHQRVHTGQKPYKCNICGKGFNHRSVLNVHQRVHTGEKPYKCEECDKGFSRSSYLQAHQRVHTGEKPYKCEECGKGFSRNSYLQGHQRVHTGEKPYKCEECGKGFSRSSHLQGHQRVHTGEKPFKCEECGKGFSWSFNLQIHQRVHTGEKPYKCEECGKGFSKASTLLAHQRVHTGEKPYQCDECGKSFSQRSYLQSHQSVHSGERPYICEVCGKGFSQRAYLQGHQRVHTRVKPYKCEMCGKGFSQSSRLEAHRRVHTGGKPYKCEVCTKGFSESSRLQAHQRVHVEGRPYKCEQCGKGFSGYSSLQAHHRVHTGEKPYKCEVCGKGFSQRSNLQAHQRVHTGEKPYKCDACGKGFRWSSGLLIHQRVHSSDKFYKSEDYGKDYPSSENLHRNEDSVLF

SEQ ID NO: 37552 - DNA, 3688 bp, Artificial Sequence
  derived and/or modified sequence
gtagtccaggaggtctcggtaggcagagccacttccgccccaggtacgctaggccgcggccttcgttcctcccagaaaggagatggtgacattcaaggatgttgctgtggtcttcactgaggaggagctggggctgctggactctgtccagaggaagctgtaccgagatgtgatgctggagaacttcaggaacctgctcttagtagcacatcagcccttcaagccagacctaatatcccagctggagagagaagaaaagcttttgatggtggagacagaaaccccaagagatggatgttcaggaaggaagaatcaacaaaagatggagagtattcaggaagtaacagtaagctacttttcccccaaagagctttcctcccgtcagacctggcaacaaagtgcaggtgggttaatcaggtgtcaagatttcctgaaagtttttcaagggaagaattctcagttgcaagaacaaggtaattccctcggccaggtttgggcaggaataccagttcagatttctgaagataagaactatatattcactcatatagggaatggctccaattatataaaaagtcaagggtatccatcttggagggcacatcattcttggaggaaaatgtatctgaaagagtcacataattatcagtgtagatgtcagcaaatttccatgaaaaatcatttctgtaagtgtgacagtgtcagttggctctcacatcacaatgataaactggaagtacacagaaaagaaaactacagctgccatgactgtggagaagatatcatgaaggtatcattacttaatcaggagtcaattcaaacagaggagaagccctatccatgtactgggtatagaaaagccttcagtaatgactccagctctgaggttcatcagcagttccacttggaagggaagccctatacatacagttcatgtggaaagggctgtaattatagttcacttcttcatattcatcaaaatattgagagagaagatgatattgagaattcacatctgaaatcctatcagagagtgcatacagaggagaaaccatgcaaatgtggtgaatatggtgagaacttcaatcactgttcccctcttaacacttatgaacttatccacacaggtgagatgtcctataggcacaacatttatgagaaagccttcagtcatagcttagaccttaatagtatttttagggtccatactagggatgaaccccatgaatatgaggaaaatgagaatgtctttaatcagagttcatgtcttcaagtccatcaaaaaatccacactgaagagaaactatacacagatatagagtatggaaagagtttcatttgtagttcaaatcttgacattcagcatagggttcatatggaagagaattcatataattctgaggagtgtggtaatggcttcagtctggcctcacattttcaggaccttcagatagtccacactaaggaacaaccatataaacgctatgtgtgtagtaacagcttcagccataatttatatcttcaaggtcatccaaaaattcacattggagagaaaccacgtaaggagcatgggaatggcttcaactggagctcaaaacttaaagatcatcagagagtccacactggacagaagccatacaaatgcaatatatgcggcaaaggtttcaatcatagatcagttctgaatgttcatcagagagtccacacaggagagaaaccttataaatgcgaggaatgtgataagggattcagtcggagttcatatcttcaagcccatcagagagtccacactggagaaaaaccttataaatgtgaggaatgtgggaaggggttcagtcgaaattcataccttcaaggccatcagagagttcacactggagaaaaaccatacaagtgtgaggagtgtgggaagggcttcagtcggagttcacaccttcaaggccatcagagagtccacactggagaaaaaccattcaaatgtgaggaatgtgggaaggggttcagttggagctttaatcttcaaattcatcagagggttcacacaggagaaaaaccctataaatgtgaagaatgtggtaaaggcttcagtaaggcctcaacacttttggcccatcagagggtccacacgggagagaagccataccaatgtgatgagtgtggtaagagtttcagtcagagatcataccttcagagtcatcagagtgtccattctggagaaagaccatatatatgtgaggtatgtggaaagggcttcagtcagagagcatatcttcaaggtcatcagagagtccacactagagtgaaaccgtataaatgtgagatgtgtgggaagggctttagtcagagttcgcgccttgaagcacatcggagggttcacacaggagggaaaccatacaaatgtgaggtgtgtacaaagggtttcagtgagagttcacgccttcaagcacaccaaagggttcatgtggaagggagaccctataaatgtgaacagtgtggtaagggtttcagtgggtattcaagtcttcaagcccatcacagagtccacacaggagagaaaccatacaaatgtgaggtatgtggaaagggcttcagtcagagatcaaatcttcaggctcaccagagagtccacacaggagagaaaccatacaaatgtgatgcatgtggtaagggtttccgttggagctcaggtcttctcattcatcaaagagtccatagtagtgataaattctataaaagcgaagactatggtaaggactacccttcatcagagaatctacacagaaatgaagattctgttttgttttgaagtcctcaaatgggagctgaaattttccagtcactagagttctttcagtagaaaaagaatttttaaaaattaaaatgtaatgttgctgcccaacttcaacattcataatggccaggagaccacacaacagagacatttaatgagaggggtttcacgagggattttgttagaactttaacatcagtcattgcacaggagctaaggcttataaaatatgagtatggtcaggaatttaataaaagtacagtgatgagcatgcctaaatccatgttctctagaatgtaagcttggtgaaagaagggactttgttcattgctagtctacaaaactaggacatttcataacgcaatgtaggtgctcagtactttttgctaaataactaaaagtatgtaaaggtaaaaggtttgaaatttttaagcgcattttttaaaacttaaaatgtatttggaggagaaatcctgcaagtaatcttaataaaatcatttcaagtaaatatttgaaatgtagaacaataagcattatgatgatctgaaataacattaatttgattgtaaccctattggggttagttcccaccctttgttccatcttgagcagagatgtgctgcatttcttaacgtttggtctctatacattataccatctgctgaagtttagctttgtgtgtgtgtatatgtacccatgtgtgcacttgaaatatcagtacaaactgataaacaatgtttctggttaatgttgcaaaaatggaacactgtattttacataattgattttctactcctgccctgtgaattaaggcagagttttactgtaatatttgcaagtatccaaaatggttactgatgacaaatactttttaataaatgtcaaaatcacaataaa

SEQ ID NO: 37553 - DNA, 2739 bp, Artificial Sequence
  derived and/or modified sequence
atgatcaagttccagatggtgaccttcaaggacgtggccgtggtgttcaccgaggaggagctgggcctgctggacagcgtgcagagaaagctgtacagagacgtgatgctggagaacttcagaaacctgctgctggtggcccaccagcccttcaagcccgacctgatcagccagctggagagagaggagaagctgctgatggtggagaccgagacccccagagacggctgcagcggcagaaagaaccagcagaagatggagagcatccaggaggtgaccgtgagctacttcagccccaaggagctgagcagcagacagacctggcagcagagcgccggcggcctgatcagatgccaggacttcctgaaggtgttccagggcaagaacagccagctgcaggagcagggcaacagcctgggccaggtgtgggccggcatccccgtgcagatcagcgaggacaagaactacatcttcacccacatcggcaacggcagcaactacatcaagagccagggctaccccagctggagagcccaccacagctggagaaagatgtacctgaaggagagccacaactaccagtgcagatgccagcagatcagcatgaagaaccacttctgcaagtgcgacagcgtgagctggctgagccaccacaacgacaagctggaggtgcacagaaaggagaactacagctgccacgactgcggcgaggacatcatgaaggtgagcctgctgaaccaggagagcatccagaccgaggagaagccctacccctgcaccggctacagaaaggccttcagcaacgacagcagcagcgaggtgcaccagcagttccacctggagggcaagccctacacctacagcagctgcggcaagggctgcaactacagcagcctgctgcacatccaccagaacatcgagagagaggacgacatcgagaacagccacctgaagagctaccagagagtgcacaccgaggagaagccctgcaagtgcggcgagtacggcgagaacttcaaccactgcagccccctgaacacctacgagctgatccacaccggcgagatgagctacagacacaacatctacgagaaggccttcagccacagcctggacctgaacagcatcttcagagtgcacaccagagacgagccccacgagtacgaggagaacgagaacgtgttcaaccagagcagctgcctgcaggtgcaccagaagatccacaccgaggagaagctgtacaccgacatcgagtacggcaagagcttcatctgcagcagcaacctggacatccagcacagagtgcacatggaggagaacagctacaacagcgaggagtgcggcaacggcttcagcctggccagccacttccaggacctgcagatcgtgcacaccaaggagcagccctacaagagatacgtgtgcagcaacagcttcagccacaacctgtacctgcagggccaccccaagatccacatcggcgagaagcccagaaaggagcacggcaacggcttcaactggagcagcaagctgaaggaccaccagagagtgcacaccggccagaagccctacaagtgcaacatctgcggcaagggcttcaaccacagaagcgtgctgaacgtgcaccagagagtgcacaccggcgagaagccctacaagtgcgaggagtgcgacaagggcttcagcagaagcagctacctgcaggcccaccagagagtgcacaccggcgagaagccctacaagtgcgaggagtgcggcaagggcttcagcagaaacagctacctgcagggccaccagagagtgcacaccggcgagaagccctacaagtgcgaggagtgcggcaagggcttcagcagaagcagccacctgcagggccaccagagagtgcacaccggcgagaagcccttcaagtgcgaggagtgcggcaagggcttcagctggagcttcaacctgcagatccaccagagagtgcacaccggcgagaagccctacaagtgcgaggagtgcggcaagggcttcagcaaggccagcaccctgctggcccaccagagagtgcacaccggcgagaagccctaccagtgcgacgagtgcggcaagagcttcagccagagaagctacctgcagagccaccagagcgtgcacagcggcgagagaccctacatctgcgaggtgtgcggcaagggcttcagccagagagcctacctgcagggccaccagagagtgcacaccagagtgaagccctacaagtgcgagatgtgcggcaagggcttcagccagagcagcagactggaggcccacagaagagtgcacaccggcggcaagccctacaagtgcgaggtgtgcaccaagggcttcagcgagagcagcagactgcaggcccaccagagagtgcacgtggagggcagaccctacaagtgcgagcagtgcggcaagggcttcagcggctacagcagcctgcaggcccaccacagagtgcacaccggcgagaagccctacaagtgcgaggtgtgcggcaagggcttcagccagagaagcaacctgcaggcccaccagagagtgcacaccggcgagaagccctacaagtgcgacgcctgcggcaagggcttcagatggagcagcggcctgctgatccaccagagagtgcacagcagcgacaagttctacaagagcgaggactacggcaaggactaccccagcagcgagaacctgcacagaaacgaggacagcgtgctgttctag

SEQ ID NO: 37554 - DNA, 2742 bp, Artificial Sequence
  derived and/or modified sequence
atgaccaagttccaggagatggtgaccttcaaggacgtggccgtggtgttcaccgaggaggagctgggcctgctggacagcgtgcagagaaagctgtacagagacgtgatgctggagaacttcagaaacctgctgctggtggcccaccagcccttcaagcccgacctgatcagccagctggagagagaggagaagctgctgatggtggagaccgagacccccagagacggctgcagcggcagaaagaaccagcagaagatggagagcatccaggaggtgaccgtgagctacttcagccccaaggagctgagcagcagacagacctggcagcagagcgccggcggcctgatcagatgccaggacttcctgaaggtgttccagggcaagaacagccagctgcaggagcagggcaacagcctgggccaggtgtgggccggcatccccgtgcagatcagcgaggacaagaactacatcttcacccacatcggcaacggcagcaactacatcaagagccagggctaccccagctggagagcccaccacagctggagaaagatgtacctgaaggagagccacaactaccagtgcagatgccagcagatcagcatgaagaaccacttctgcaagtgcgacagcgtgagctggctgagccaccacaacgacaagctggaggtgcacagaaaggagaactacagctgccacgactgcggcgaggacatcatgaaggtgagcctgctgaaccaggagagcatccagaccgaggagaagccctacccctgcaccggctacagaaaggccttcagcaacgacagcagcagcgaggtgcaccagcagttccacctggagggcaagccctacacctacagcagctgcggcaagggctgcaactacagcagcctgctgcacatccaccagaacatcgagagagaggacgacatcgagaacagccacctgaagagctaccagagagtgcacaccgaggagaagccctgcaagtgcggcgagtacggcgagaacttcaaccactgcagccccctgaacacctacgagctgatccacaccggcgagatgagctacagacacaacatctacgagaaggccttcagccacagcctggacctgaacagcatcttcagagtgcacaccagagacgagccccacgagtacgaggagaacgagaacgtgttcaaccagagcagctgcctgcaggtgcaccagaagatccacaccgaggagaagctgtacaccgacatcgagtacggcaagagcttcatctgcagcagcaacctggacatccagcacagagtgcacatggaggagaacagctacaacagcgaggagtgcggcaacggcttcagcctggccagccacttccaggacctgcagatcgtgcacaccaaggagcagccctacaagagatacgtgtgcagcaacagcttcagccacaacctgtacctgcagggccaccccaagatccacatcggcgagaagcccagaaaggagcacggcaacggcttcaactggagcagcaagctgaaggaccaccagagagtgcacaccggccagaagccctacaagtgcaacatctgcggcaagggcttcaaccacagaagcgtgctgaacgtgcaccagagagtgcacaccggcgagaagccctacaagtgcgaggagtgcgacaagggcttcagcagaagcagctacctgcaggcccaccagagagtgcacaccggcgagaagccctacaagtgcgaggagtgcggcaagggcttcagcagaaacagctacctgcagggccaccagagagtgcacaccggcgagaagccctacaagtgcgaggagtgcggcaagggcttcagcagaagcagccacctgcagggccaccagagagtgcacaccggcgagaagcccttcaagtgcgaggagtgcggcaagggcttcagctggagcttcaacctgcagatccaccagagagtgcacaccggcgagaagccctacaagtgcgaggagtgcggcaagggcttcagcaaggccagcaccctgctggcccaccagagagtgcacaccggcgagaagccctaccagtgcgacgagtgcggcaagagcttcagccagagaagctacctgcagagccaccagagcgtgcacagcggcgagagaccctacatctgcgaggtgtgcggcaagggcttcagccagagagcctacctgcagggccaccagagagtgcacaccagagtgaagccctacaagtgcgagatgtgcggcaagggcttcagccagagcagcagactggaggcccacagaagagtgcacaccggcggcaagccctacaagtgcgaggtgtgcaccaagggcttcagcgagagcagcagactgcaggcccaccagagagtgcacgtggagggcagaccctacaagtgcgagcagtgcggcaagggcttcagcggctacagcagcctgcaggcccaccacagagtgcacaccggcgagaagccctacaagtgcgaggtgtgcggcaagggcttcagccagagaagcaacctgcaggcccaccagagagtgcacaccggcgagaagccctacaagtgcgacgcctgcggcaagggcttcagatggagcagcggcctgctgatccaccagagagtgcacagcagcgacaagttctacaagagcgaggactacggcaaggactaccccagcagcgagaacctgcacagaaacgaggacagcgtgctgttctag

SEQ ID NO: 37555 - DNA, 2724 bp, Artificial Sequence
  derived and/or modified sequence
atggtgaccttcaaggacgtggccgtggtgttcaccgaggaggagctgggcctgctggacagcgtgcagagaaagctgtacagagacgtgatgctggagaacttcagaaacctgctgctggtggcccaccagcccttcaagcccgacctgatcagccagctggagagagaggagaagctgctgatggtggagaccgagacccccagagacggctgcagcggcagaaagaaccagcagaagatggagagcatccaggaggtgaccgtgagctacttcagccccaaggagctgagcagcagacagacctggcagcagagcgccggcggcctgatcagatgccaggacttcctgaaggtgttccagggcaagaacagccagctgcaggagcagggcaacagcctgggccaggtgtgggccggcatccccgtgcagatcagcgaggacaagaactacatcttcacccacatcggcaacggcagcaactacatcaagagccagggctaccccagctggagagcccaccacagctggagaaagatgtacctgaaggagagccacaactaccagtgcagatgccagcagatcagcatgaagaaccacttctgcaagtgcgacagcgtgagctggctgagccaccacaacgacaagctggaggtgcacagaaaggagaactacagctgccacgactgcggcgaggacatcatgaaggtgagcctgctgaaccaggagagcatccagaccgaggagaagccctacccctgcaccggctacagaaaggccttcagcaacgacagcagcagcgaggtgcaccagcagttccacctggagggcaagccctacacctacagcagctgcggcaagggctgcaactacagcagcctgctgcacatccaccagaacatcgagagagaggacgacatcgagaacagccacctgaagagctaccagagagtgcacaccgaggagaagccctgcaagtgcggcgagtacggcgagaacttcaaccactgcagccccctgaacacctacgagctgatccacaccggcgagatgagctacagacacaacatctacgagaaggccttcagccacagcctggacctgaacagcatcttcagagtgcacaccagagacgagccccacgagtacgaggagaacgagaacgtgttcaaccagagcagctgcctgcaggtgcaccagaagatccacaccgaggagaagctgtacaccgacatcgagtacggcaagagcttcatctgcagcagcaacctggacatccagcacagagtgcacatggaggagaacagctacaacagcgaggagtgcggcaacggcttcagcctggccagccacttccaggacctgcagatcgtgcacaccaaggagcagccctacaagagatacgtgtgcagcaacagcttcagccacaacctgtacctgcagggccaccccaagatccacatcggcgagaagcccagaaaggagcacggcaacggcttcaactggagcagcaagctgaaggaccaccagagagtgcacaccggccagaagccctacaagtgcaacatctgcggcaagggcttcaaccacagaagcgtgctgaacgtgcaccagagagtgcacaccggcgagaagccctacaagtgcgaggagtgcgacaagggcttcagcagaagcagctacctgcaggcccaccagagagtgcacaccggcgagaagccctacaagtgcgaggagtgcggcaagggcttcagcagaaacagctacctgcagggccaccagagagtgcacaccggcgagaagccctacaagtgcgaggagtgcggcaagggcttcagcagaagcagccacctgcagggccaccagagagtgcacaccggcgagaagcccttcaagtgcgaggagtgcggcaagggcttcagctggagcttcaacctgcagatccaccagagagtgcacaccggcgagaagccctacaagtgcgaggagtgcggcaagggcttcagcaaggccagcaccctgctggcccaccagagagtgcacaccggcgagaagccctaccagtgcgacgagtgcggcaagagcttcagccagagaagctacctgcagagccaccagagcgtgcacagcggcgagagaccctacatctgcgaggtgtgcggcaagggcttcagccagagagcctacctgcagggccaccagagagtgcacaccagagtgaagccctacaagtgcgagatgtgcggcaagggcttcagccagagcagcagactggaggcccacagaagagtgcacaccggcggcaagccctacaagtgcgaggtgtgcaccaagggcttcagcgagagcagcagactgcaggcccaccagagagtgcacgtggagggcagaccctacaagtgcgagcagtgcggcaagggcttcagcggctacagcagcctgcaggcccaccacagagtgcacaccggcgagaagccctacaagtgcgaggtgtgcggcaagggcttcagccagagaagcaacctgcaggcccaccagagagtgcacaccggcgagaagccctacaagtgcgacgcctgcggcaagggcttcagatggagcagcggcctgctgatccaccagagagtgcacagcagcgacaagttctacaagagcgaggactacggcaaggactaccccagcagcgagaacctgcacagaaacgaggacagcgtgctgttctag

SEQ ID NO: 37556 - DNA, 2742 bp, Artificial Sequence
  derived and/or modified sequence
ctgaccgtgtgccaggagatggtgaccttcaaggacgtggccgtggtgttcaccgaggaggagctgggcctgctggacagcgtgcagagaaagctgtacagagacgtgatgctggagaacttcagaaacctgctgctggtggcccaccagcccttcaagcccgacctgatcagccagctggagagagaggagaagctgctgatggtggagaccgagacccccagagacggctgcagcggcagaaagaaccagcagaagatggagagcatccaggaggtgaccgtgagctacttcagccccaaggagctgagcagcagacagacctggcagcagagcgccggcggcctgatcagatgccaggacttcctgaaggtgttccagggcaagaacagccagctgcaggagcagggcaacagcctgggccaggtgtgggccggcatccccgtgcagatcagcgaggacaagaactacatcttcacccacatcggcaacggcagcaactacatcaagagccagggctaccccagctggagagcccaccacagctggagaaagatgtacctgaaggagagccacaactaccagtgcagatgccagcagatcagcatgaagaaccacttctgcaagtgcgacagcgtgagctggctgagccaccacaacgacaagctggaggtgcacagaaaggagaactacagctgccacgactgcggcgaggacatcatgaaggtgagcctgctgaaccaggagagcatccagaccgaggagaagccctacccctgcaccggctacagaaaggccttcagcaacgacagcagcagcgaggtgcaccagcagttccacctggagggcaagccctacacctacagcagctgcggcaagggctgcaactacagcagcctgctgcacatccaccagaacatcgagagagaggacgacatcgagaacagccacctgaagagctaccagagagtgcacaccgaggagaagccctgcaagtgcggcgagtacggcgagaacttcaaccactgcagccccctgaacacctacgagctgatccacaccggcgagatgagctacagacacaacatctacgagaaggccttcagccacagcctggacctgaacagcatcttcagagtgcacaccagagacgagccccacgagtacgaggagaacgagaacgtgttcaaccagagcagctgcctgcaggtgcaccagaagatccacaccgaggagaagctgtacaccgacatcgagtacggcaagagcttcatctgcagcagcaacctggacatccagcacagagtgcacatggaggagaacagctacaacagcgaggagtgcggcaacggcttcagcctggccagccacttccaggacctgcagatcgtgcacaccaaggagcagccctacaagagatacgtgtgcagcaacagcttcagccacaacctgtacctgcagggccaccccaagatccacatcggcgagaagcccagaaaggagcacggcaacggcttcaactggagcagcaagctgaaggaccaccagagagtgcacaccggccagaagccctacaagtgcaacatctgcggcaagggcttcaaccacagaagcgtgctgaacgtgcaccagagagtgcacaccggcgagaagccctacaagtgcgaggagtgcgacaagggcttcagcagaagcagctacctgcaggcccaccagagagtgcacaccggcgagaagccctacaagtgcgaggagtgcggcaagggcttcagcagaaacagctacctgcagggccaccagagagtgcacaccggcgagaagccctacaagtgcgaggagtgcggcaagggcttcagcagaagcagccacctgcagggccaccagagagtgcacaccggcgagaagcccttcaagtgcgaggagtgcggcaagggcttcagctggagcttcaacctgcagatccaccagagagtgcacaccggcgagaagccctacaagtgcgaggagtgcggcaagggcttcagcaaggccagcaccctgctggcccaccagagagtgcacaccggcgagaagccctaccagtgcgacgagtgcggcaagagcttcagccagagaagctacctgcagagccaccagagcgtgcacagcggcgagagaccctacatctgcgaggtgtgcggcaagggcttcagccagagagcctacctgcagggccaccagagagtgcacaccagagtgaagccctacaagtgcgagatgtgcggcaagggcttcagccagagcagcagactggaggcccacagaagagtgcacaccggcggcaagccctacaagtgcgaggtgtgcaccaagggcttcagcgagagcagcagactgcaggcccaccagagagtgcacgtggagggcagaccctacaagtgcgagcagtgcggcaagggcttcagcggctacagcagcctgcaggcccaccacagagtgcacaccggcgagaagccctacaagtgcgaggtgtgcggcaagggcttcagccagagaagcaacctgcaggcccaccagagagtgcacaccggcgagaagccctacaagtgcgacgcctgcggcaagggcttcagatggagcagcggcctgctgatccaccagagagtgcacagcagcgacaagttctacaagagcgaggactacggcaaggactaccccagcagcgagaacctgcacagaaacgaggacagcgtgctgttctag

SEQ ID NO: 37557 - DNA, 2793 bp, Artificial Sequence
  derived and/or modified sequence
atgggcctgggccccagaagcctgcccttcagcagaaagagaaagagaaagatgaccaagttccaggagatggtgaccttcaaggacgtggccgtggtgttcaccgaggaggagctgggcctgctggacagcgtgcagagaaagctgtacagagacgtgatgctggagaacttcagaaacctgctgctggtggcccaccagcccttcaagcccgacctgatcagccagctggagagagaggagaagctgctgatggtggagaccgagacccccagagacggctgcagcggcagaaagaaccagcagaagatggagagcatccaggaggtgaccgtgagctacttcagccccaaggagctgagcagcagacagacctggcagcagagcgccggcggcctgatcagatgccaggacttcctgaaggtgttccagggcaagaacagccagctgcaggagcagggcaacagcctgggccaggtgtgggccggcatccccgtgcagatcagcgaggacaagaactacatcttcacccacatcggcaacggcagcaactacatcaagagccagggctaccccagctggagagcccaccacagctggagaaagatgtacctgaaggagagccacaactaccagtgcagatgccagcagatcagcatgaagaaccacttctgcaagtgcgacagcgtgagctggctgagccaccacaacgacaagctggaggtgcacagaaaggagaactacagctgccacgactgcggcgaggacatcatgaaggtgagcctgctgaaccaggagagcatccagaccgaggagaagccctacccctgcaccggctacagaaaggccttcagcaacgacagcagcagcgaggtgcaccagcagttccacctggagggcaagccctacacctacagcagctgcggcaagggctgcaactacagcagcctgctgcacatccaccagaacatcgagagagaggacgacatcgagaacagccacctgaagagctaccagagagtgcacaccgaggagaagccctgcaagtgcggcgagtacggcgagaacttcaaccactgcagccccctgaacacctacgagctgatccacaccggcgagatgagctacagacacaacatctacgagaaggccttcagccacagcctggacctgaacagcatcttcagagtgcacaccagagacgagccccacgagtacgaggagaacgagaacgtgttcaaccagagcagctgcctgcaggtgcaccagaagatccacaccgaggagaagctgtacaccgacatcgagtacggcaagagcttcatctgcagcagcaacctggacatccagcacagagtgcacatggaggagaacagctacaacagcgaggagtgcggcaacggcttcagcctggccagccacttccaggacctgcagatcgtgcacaccaaggagcagccctacaagagatacgtgtgcagcaacagcttcagccacaacctgtacctgcagggccaccccaagatccacatcggcgagaagcccagaaaggagcacggcaacggcttcaactggagcagcaagctgaaggaccaccagagagtgcacaccggccagaagccctacaagtgcaacatctgcggcaagggcttcaaccacagaagcgtgctgaacgtgcaccagagagtgcacaccggcgagaagccctacaagtgcgaggagtgcgacaagggcttcagcagaagcagctacctgcaggcccaccagagagtgcacaccggcgagaagccctacaagtgcgaggagtgcggcaagggcttcagcagaaacagctacctgcagggccaccagagagtgcacaccggcgagaagccctacaagtgcgaggagtgcggcaagggcttcagcagaagcagccacctgcagggccaccagagagtgcacaccggcgagaagcccttcaagtgcgaggagtgcggcaagggcttcagctggagcttcaacctgcagatccaccagagagtgcacaccggcgagaagccctacaagtgcgaggagtgcggcaagggcttcagcaaggccagcaccctgctggcccaccagagagtgcacaccggcgagaagccctaccagtgcgacgagtgcggcaagagcttcagccagagaagctacctgcagagccaccagagcgtgcacagcggcgagagaccctacatctgcgaggtgtgcggcaagggcttcagccagagagcctacctgcagggccaccagagagtgcacaccagagtgaagccctacaagtgcgagatgtgcggcaagggcttcagccagagcagcagactggaggcccacagaagagtgcacaccggcggcaagccctacaagtgcgaggtgtgcaccaagggcttcagcgagagcagcagactgcaggcccaccagagagtgcacgtggagggcagaccctacaagtgcgagcagtgcggcaagggcttcagcggctacagcagcctgcaggcccaccacagagtgcacaccggcgagaagccctacaagtgcgaggtgtgcggcaagggcttcagccagagaagcaacctgcaggcccaccagagagtgcacaccggcgagaagccctacaagtgcgacgcctgcggcaagggcttcagatggagcagcggcctgctgatccaccagagagtgcacagcagcgacaagttctacaagagcgaggactacggcaaggactaccccagcagcgagaacctgcacagaaacgaggacagcgtgctgttctag

SEQ ID NO: 37558 - DNA, 2739 bp, Artificial Sequence
  derived and/or modified sequence
atgatcaagtttcagatggtgacttttaaagacgtagccgtcgtgttcacggaggaagaactcgggttacttgactctgttcagagaaagttgtatcgggacgtaatgcttgagaatttcaggaatttactgctggtcgcacaccagccatttaaacctgatcttatttcacaactggagagggaggagaaactgctgatggttgaaactgaaacgccacgggatggctgttctggaaggaagaatcagcagaagatggagtctatacaggaagtgacagtgagctactttagtccgaaggaactgagttcgcgccagacttggcagcagagtgcaggcgggctgattagatgtcaggactttctcaaggtgtttcaggggaaaaactcacagttacaggaacaaggcaactcgctcggacaagtgtgggccggtattccagtgcagatctcagaagataaaaattatatatttactcatattggcaacggaagtaattacatcaaatcgcaagggtatcctagttggagagctcaccatagctggcgcaagatgtacctaaaagaaagccacaactaccagtgcagatgccagcagatctctatgaaaaaccacttttgtaaatgtgattctgttagttggctgagccaccacaatgataaactggaagtacaccgcaaggagaattattcttgccacgactgtggggaagacatcatgaaggtatccctgctcaaccaggaaagcattcagaccgaggagaagccttacccctgtacaggataccgcaaggctttcagcaacgactctagctctgaggttcatcaacaattccatctggaggggaagccttatacctactcatcctgtggcaaaggatgtaattactctagcctgctccatatccaccagaatattgaacgcgaggatgacatcgagaatagccacctcaaatcatatcagagagtccatacagaagaaaagccgtgtaagtgcggtgagtacggggagaattttaaccactgttctccgcttaatacttacgaactcattcacacaggggagatgtcctatagacacaacatctacgaaaaagcattttctcacagcctcgatttgaacagtatatttagggtccacacacgtgacgagcctcacgaatacgaggagaacgaaaatgtatttaaccagagctcttgtcttcaggtgcatcagaagattcacacagaagagaaattgtacaccgatatcgagtatggcaagtcttttatttgcagcagcaacctagacatccagcatcgggtgcacatggaagaaaattcttataattccgaggaatgcgggaacggctttagtctggcctcacacttccaggacctccagatcgttcatactaaggagcaaccctacaagcggtatgtctgctcaaatagcttttcacataacctctacttgcagggtcacccaaagatccatattggcgagaaaccacggaaagagcacggaaatgggttcaactggtcatctaaactcaaggatcaccagagagttcataccggtcagaagccttataaatgcaacatctgcggcaaaggcttcaatcaccgctcagtgctcaatgttcaccagagggttcatacgggggagaagccctacaagtgcgaggagtgtgataaggggtttagtcggagctcttatctgcaggcccatcagcgagtccacaccggcgagaagccctacaagtgcgaggaatgtggaaagggtttcagccgaaactcttacctgcaaggacatcaacgggtgcacactggggagaagccctacaagtgcgaagagtgcgggaagggattttcacggagctcccacctccagggacaccagcgagtacacaccggtgaaaagccttttaaatgcgaagagtgcgggaaaggatttagctggagctttaacctgcagatccaccagagagtgcatacgggcgaaaagccttacaaatgcgaagagtgtggaaagggcttctctaaggccagcacattgctagcccatcagcgagtgcacacaggggagaaaccgtatcaatgtgacgagtgtggaaagagcttttctcagaggtcctatttgcagagccaccaaagtgtccactctggagagagaccctatatctgcgaggtctgtgggaaagggttttcccagagagcttatttgcagggccatcaacgcgttcacacccgcgtgaagccgtacaagtgtgagatgtgtggcaaggggttctcccagagtagtagactggaggcccatagacgcgtgcatacagggggcaagccctacaaatgcgaggtgtgcaccaaaggtttctccgagtcctccaggttgcaagcccaccagcgcgtgcatgtcgaagggcgtccatacaagtgcgagcagtgcggtaaggggttctcagggtatagtagtctgcaggcccaccaccgggtccacacgggcgagaaaccgtataagtgtgaggtgtgcggcaaggggtttagccagcgttcaaatcttcaggcgcaccagcgagtccacaccggggaaaagccctacaaatgtgacgcttgtggaaaagggttcaggtggagcagcggcctgttaatccaccagcgcgtgcacagttcggacaagttttataaatccgaggactacgggaaggattacccctctagtgaaaacctgcacaggaatgaagattccgtactgttctag

SEQ ID NO: 37559 - DNA, 2742 bp, Artificial Sequence
  derived and/or modified sequence
atgaccaagtttcaggagatggttacattcaaggatgtggctgtggtgtttactgaagaggaactcgggctgctggactcagtccaacggaagctctatagggatgtgatgctagagaatttcaggaacctactgctggtggcacatcagccttttaaacctgacttgatttctcaattagaacgcgaagaaaagctcctgatggtggaaactgagactcctagggacggatgctccggacgcaagaatcagcagaagatggaatcgattcaggaggttaccgtcagttacttttcacctaaggagttatcttcgcggcaaacctggcaacagtcggcaggcgggctgatccggtgtcaagactttctgaaggtttttcagggcaaaaactcccagctacaagagcagggtaacagtttgggccaggtttgggcggggatccctgtccagatctccgaggataagaattatatcttcacccacattgggaatggatctaactatatcaaatcccagggctatccatcttggagggcacatcactcctggcggaagatgtacctgaaggagagccacaattatcagtgtaggtgccaacagatctccatgaagaatcatttctgcaagtgcgactctgtcagctggctgtcccatcacaacgataaactagaagttcatcgcaaggagaactactcatgtcacgattgcggggaagacataatgaaggtgagtctgctcaaccaggagagcatccagacggaagagaagccttatccctgcacggggtaccgtaaggcttttagcaacgactcgagcagcgaggtgcatcagcagtttcacctggagggcaagccctacacctactccagctgtggaaagggatgtaactacagcagcttactgcacatccaccagaacattgaaagagaggatgatatcgagaactcacatcttaaatcctaccagcgagtacacaccgaggagaaaccctgcaaatgcggcgaatacggggagaactttaatcattgttccccactgaacacttacgaactcattcacaccggagaaatgagctacaggcacaatatctacgaaaaggcattctcccattcactggatctcaatagtattttccgcgtccacactagggatgagcctcatgaatacgaagagaatgagaatgtgttcaaccagagttcatgtctccaggtccaccagaaaatccacacagaggagaagctgtacaccgacatcgagtacggcaaaagctttatctgctcctcgaatctggacattcagcatcgtgttcatatggaggaaaactcctacaattctgaagagtgcggaaacgggttctcactggcgtcacactttcaggaccttcaaatagtccacaccaaggaacagccatataaaagatatgtgtgttcaaattcattttctcacaacctgtaccttcaaggccaccccaagattcacataggggagaagcctcgaaaggaacacggcaatggatttaattggagtagtaaacttaaggaccaccaacgggtgcacacgggccagaagccctataaatgcaacatttgcgggaaagggttcaatcaccgatctgtgcttaatgttcaccagcgtgttcacactggggaaaagccttataaatgcgaggagtgcgacaagggcttctcgcggagtagctatctccaggcccaccaacgggtgcatacaggggagaaaccttataagtgtgaagaatgtggtaaagggttcagccggaactcctacctgcagggacaccaacgggtgcataccggagaaaaaccttacaagtgtgaggagtgcggtaaggggttctctcgatcctctcacctgcaaggacatcaacgtgtacataccggcgagaaaccgtttaagtgtgaagagtgcggcaaaggattcagctggagcttcaacctgcaaattcaccaaagggtgcatacaggggagaagccatataaatgcgaagaatgtgggaaaggatttagtaaagcctctaccctcttggcccaccaacgcgtgcataccggcgaaaaaccatatcagtgtgacgagtgtggaaagtctttctcgcaacgttcttatctacagtctcatcaaagtgtgcattccggggaaagaccctacatttgtgaggtatgtggcaagggtttctcacaaagggcctatcttcagggccaccagcgagtgcacacccgcgtgaaaccatacaaatgcgagatgtgtgggaagggctttagccagtcaagtaggttggaagcccacagacgtgtgcataccggcggcaaaccctataagtgtgaagtgtgtacaaaggggttcagcgagtcctcccggctgcaggcccaccagagggtgcatgtcgagggtcgaccttacaagtgcgagcaatgcggcaaggggtttagcggatacagctcactgcaagcccaccatagggtgcatactggggaaaaaccctacaagtgcgaagtgtgcggcaagggcttttcacagagaagcaacttacaagcccatcagagagtccacaccggggagaagccgtacaaatgcgatgcatgcgggaaggggtttcgttggagttccgggttactgattcaccagagagtccacagcagtgataagttctacaaatcagaagactatgggaaggattatccttcatccgagaacttgcatcgaaatgaggattccgtgctgttttag

SEQ ID NO: 37560 - DNA, 2724 bp, Artificial Sequence
  derived and/or modified sequence
atggtgacatttaaagatgtcgccgtcgtgttcactgaggaggaactcggcctgcttgatagcgtgcagcggaaactctaccgtgacgtcatgctggaaaattttcgtaatctgttactggtggcgcatcagcctttcaagcctgatctcatttcacaattagaacgggaggaaaagcttttgatggtggaaaccgagacgcctcgcgatggatgctcagggcggaaaaaccagcagaaaatggaaagtattcaggaagtgactgtaagttacttctcaccaaaggagctgagctcccgacaaacttggcagcagtccgccggaggattaattagatgccaagatttcctgaaagttttccagggtaagaacagccagctgcaagaacagggcaatagccttggacaggtgtgggccgggatccccgtgcagatttccgaggacaagaattacatcttcacacatattggaaatgggagcaattatattaagagccagggctatcctagctggcgagctcaccatagctggcgtaagatgtacctcaaggagagtcacaactatcaatgtcggtgtcagcaaattagcatgaaaaaccatttctgcaaatgtgacagcgtgtcatggctatcccaccacaatgataaactggaggtgcatcggaaagaaaactactcttgccacgattgcggcgaagatatcatgaaggtaagcctgcttaaccaggagagtatccaaacagaggagaaaccgtatccttgcaccgggtatcgcaaagctttctccaatgattccagcagcgaggttcatcagcagttccacctcgaaggtaagccctatacgtactcatcctgtggcaaaggatgtaattattctagcctgctgcacatccaccagaatattgagcgcgaggatgatatagagaacagccatttgaagtcctaccagagagtgcatacagaggagaaaccatgtaaatgcggcgagtatggggagaacttcaaccattgcagtcccctcaacacctacgagttgattcacaccggtgaaatgagctacagacacaatatctacgaaaaagctttttctcactcactcgacctgaattcaatctttagagtgcacactagagacgagccgcatgagtacgaggagaatgagaacgtcttcaatcagagttcatgtctgcaggtacaccagaagatccatacagaggaaaagttatatactgatatagagtatggtaaatctttcatttgctcatcaaacctggatattcaacatagagtgcacatggaagagaatagctacaacagtgaggagtgcgggaacggattcagtttggcctcccactttcaggacctgcaaatagtccataccaaggagcagccttacaaacgttacgtctgctccaactcgttctcccacaatttgtacctgcagggccacccgaagattcatatcggtgagaagccacgcaaagagcatgggaatggcttcaattggtcttcaaaactcaaagatcaccagagggtgcacactgggcagaaaccatataagtgtaacatctgtggaaaagggtttaaccatagatccgtgctgaacgtgcaccagagggtccacaccggcgaaaaaccttacaaatgcgaagaatgtgacaaaggattcagtagaagttcatacctccaggcccaccagagagtgcacaccggcgaaaagccttacaagtgcgaagagtgcggcaaaggcttctcccggaactcctacctacagggccaccaacgggtgcacaccggcgaaaaaccttacaagtgcgaggagtgtgggaaaggctttagccggagttctcatcttcaaggtcatcagagagtacacacgggggaaaagcccttcaaatgtgaggagtgcgggaaggggttctcatggagctttaacctgcagatccaccagcgagtccatactggtgagaagccttacaagtgcgaagagtgtggaaaaggtttcagtaaggcgagtacactgctcgcccaccaaagggtgcatactggggaaaagccatatcaatgcgacgagtgtgggaaatccttctctcagaggagttatctacagtctcaccagtcggtccattccggcgagcgaccctacatatgcgaggtttgcggaaaagggttctctcaaagggcatacctccagggacaccagcgagtgcatacccgggtaaagccctacaaatgtgaaatgtgcggcaagggatttagccagagcagcaggctggaagctcaccgtcgagtgcataccggaggtaaaccttacaagtgcgaggtgtgcacgaagggtttcagcgagagctctaggctacaggcccatcagagggtgcacgtggaaggtaggccatacaagtgtgaacaatgcggaaaagggttctcggggtatagctcgctgcaagcacaccacagagtccacaccggcgaaaaaccttacaaatgcgaggtgtgcggcaagggcttctctcagcggtccaacctgcaagcacatcagagggtgcatacaggcgagaagccttacaaatgtgacgcctgtggaaagggatttagatggtcctcaggtctgctaatacatcagagagtgcactcctcggacaaattctataagtccgaggactacggaaaggactacccaagttcggagaacctgcatcgcaacgaagactctgtcctattttag

SEQ ID NO: 37561 - DNA, 2742 bp, Artificial Sequence
  derived and/or modified sequence
ctgacagtatgccaggaaatggtgacgtttaaagacgtggccgttgtttttacggaagaagaactggggcttttggattctgtgcaacgaaagctttaccgcgacgtgatgcttgagaacttcaggaacctgctactagtcgcacaccagcccttcaagccagaccttatttcacagcttgaacgggaggaaaaattactgatggtggagactgaaacacctagagacggttgtagtggacggaaaaaccagcagaaaatggagagtattcaggaagtgactgtgtcttacttttcccctaaggaattatcaagtcggcaaacatggcagcaatctgctgggggtctcattaggtgtcaggattttctgaaagtcttccaaggcaaaaattcccagctgcaggaacagggcaactccctgggccaagtctgggctgggattccagttcagatctccgaagataagaactatattttcactcatatcggaaacggatcaaactacatcaaatcgcagggttaccccagctggcgggcccatcatagctggcgcaaaatgtacttaaaggaatcccacaattaccagtgtcgctgtcagcaaatcagcatgaaaaatcacttctgtaaatgtgactcggtcagttggctgagccatcataacgataagctggaagttcatcgcaaagaaaactactcctgccatgactgcggcgaagacatcatgaaggtgagtcttcttaaccaggaaagcatccagacggaggagaagccgtacccctgcactggttatagaaaagctttctccaacgattcatcttccgaagtacatcagcagttccatttggagggtaagccatatacatactcctcatgcggcaagggatgcaactacagtagcttacttcatattcatcaaaatattgagagggaggacgatatcgagaatagtcatctgaagagctatcagagggtgcacactgaggaaaagccatgtaagtgcggtgagtatggagagaacttcaaccattgctcccccctgaatacctatgagctgatccacactggcgagatgagttaccgacataacatatacgaaaaggccttctcccattccctcgatctgaattcaatcttccgggtccacacccgggacgagcctcatgagtacgaggaaaatgagaacgtctttaaccaatcctcttgcctgcaggtacaccagaaaatccacaccgaggagaaattatacactgatatcgaatacggaaaaagcttcatctgctcaagcaaccttgatatccagcatcgcgttcacatggaggaaaatagctacaatagcgaagagtgtggcaatggcttctcattggctagccactttcaggacctccagattgtacacaccaaggaacagccctacaagcgttacgtatgttcaaactcgtttagccacaatctctatctacagggacacccaaaaatccatataggtgaaaagcctagaaaggagcacggaaacggattcaattggtcaagtaaactgaaggatcaccagcgcgtgcacacagggcagaagccttacaaatgtaatatttgcgggaaaggctttaaccataggtctgtgctaaatgtacatcagcgcgtgcacacaggagaaaagccgtacaagtgcgaagaatgtgacaaggggttctcccggtctagttatctccaggcccatcaacgcgtgcataccggcgaaaaaccttacaagtgcgaggaatgtgggaagggcttctctcgcaactcctacctacagggccaccagcgagtgcacactggtgagaagccttataaatgcgaagaatgtggcaaaggcttctcaaggtccagccacttgcaagggcaccagcgggtgcatacgggggagaagccctttaaatgcgaagagtgcggcaagggtttctcctggtctttcaatttacagatccaccagagggtgcacaccggagaaaagccctataaatgcgaagagtgcggaaaagggttctcgaaagcatcgactctccttgcgcaccagcgagttcacaccggtgagaagccgtaccagtgtgatgagtgcggaaagagtttttctcaaagatcatatctgcagagtcaccagtcggtccactccggggagcggccgtatatctgcgaggtctgcggcaaaggcttttcgcaaagggcttatttacagggccatcagcgtgtgcacactcgtgtgaaaccgtacaaatgcgagatgtgcggcaaaggcttcagtcagagcagcaggctggaggctcacagaagagtccacacggggggaaaaccctacaagtgtgaggtttgtaccaaaggcttttctgaaagctcgaggttgcaggcccaccaacgtgtgcatgtggaaggtcgcccctacaaatgtgaacagtgtggcaagggcttttccggatacagctcgcttcaggcccatcaccgagtacacaccggcgagaaaccatataaatgtgaggtgtgcggtaaaggattctcacagagaagcaacctgcaagcacaccagagggtccacacaggagaaaaaccttataagtgtgacgcgtgcggcaaagggttcagatggtccagtggcctgctgatccaccaaagggtccattctagcgacaagttctataaatctgaggactacggaaaggactatccgtccagcgaaaacctgcatcgaaacgaggattctgtgctcttctag

SEQ ID NO: 37562 - DNA, 2793 bp, Artificial Sequence
  derived and/or modified sequence
atgggccttggtccgcgaagccttccatttagcagaaagaggaagagaaagatgaccaagtttcaagaaatggtcacatttaaggacgtggcggttgtcttcactgaggaggaacttggattgttggactctgtacagcggaaactgtaccgggatgtgatgctggaaaactttcgcaacttgctcctggtggcccaccaaccttttaagcccgaccttatctctcagctggaacgtgaggagaagctgctcatggtggagaccgaaacgcctcgtgacgggtgtagcggccgcaagaaccagcagaagatggagtccattcaggaagtcaccgtgtcttatttctctcctaaagagctgtcttctcgccaaacttggcagcagtctgcgggaggtttgatacgttgccaggattttctcaaggttttccagggcaaaaacagtcaactgcaagaacagggcaactctctcgggcaggtctgggcaggaattcccgtccagatttcagaggacaagaactatatctttacacacatcggtaatgggagcaactatattaagtcccagggctacccttcttggagagctcatcacagctggcgcaagatgtacctcaaggagtcgcacaattaccagtgccgttgccagcagatcagcatgaagaatcatttttgtaagtgcgactcggtatcttggttgagccaccacaacgataaactagaggtgcacaggaaggagaattacagttgccatgattgcggtgaggacatcatgaaggtgtcactgcttaatcaggaatctatacagacagaagagaaaccatatccctgtactggataccggaaagcctttagcaacgactcgtctagcgaggtccaccagcagtttcacctggagggcaaaccctacacatactcatcttgcggcaaaggctgtaattatagttcgcttcttcacatccatcagaacatcgaacgagaggacgacattgagaactctcacttgaaatcataccagcgcgtccacacagaggagaagccttgcaaatgtggcgaatacggggagaattttaaccactgctccccactcaatacatacgagctgatccacaccggcgagatgtcctataggcataatatttatgagaaggctttcagccactccctggatctcaacagcatttttagggtgcataccagggacgagccacatgagtacgaggagaacgaaaatgtctttaatcagtctagttgtctgcaggtgcaccagaagatccacactgaggagaaactgtacacagatattgagtacggcaaatcttttatctgctcatcaaacctggatatccagcatagggtccatatggaagaaaattcttacaatagcgaagaatgtggaaatgggttcagtctagctagtcatttccaagacttgcagatcgtccacacaaaggaacaaccctataagcggtatgtatgttcgaattcatttagtcataatctttacctgcagggacatccaaagattcatattggagaaaagcctagaaaggagcacggcaatggctttaattggtcatccaagctgaaagaccaccagcgggtgcacactggccagaaaccctataagtgtaacatctgtgggaagggatttaatcatcggagcgtgctaaatgttcaccagagagtgcataccggcgagaaaccatataagtgtgaagaatgcgacaaaggattcagtagaagttcgtacttacaagcacaccagcgggtccatacaggcgagaagccgtacaagtgtgaagagtgcggtaagggctttagcaggaattcatacttgcaaggacatcagcgggttcacacaggggagaagccttacaagtgcgaagagtgtggtaagggcttctctaggtcaagccacttgcaggggcaccagcgcgtgcatactggcgaaaagccatttaaatgcgaggaatgtgggaaggggttcagctggagttttaatctgcaaatccatcagcgggtccacaccggtgagaaaccctataaatgcgaggagtgtgggaaaggctttagcaaggcttcgactttactcgctcaccagagagttcacacaggagaaaagccttatcagtgtgatgaatgtggaaagagttttagccaacggtcatacctacagtctcatcagtctgtccatagcggggaaagaccctacatctgcgaggtgtgcgggaaggggttctcacagcgtgcttacttacagggccatcagcgggtgcatacacgggtcaagccttacaaatgcgagatgtgtgggaaaggtttttcccagtctagcaggctggaggcgcaccggcgtgtccacactgggggtaagccttacaagtgtgaagtgtgcaccaaaggttttagtgagtcctcgcgactacaggcccatcagcgtgtacacgttgagggccgtccttacaagtgtgaacaatgtggcaaaggctttagcgggtattcttcactacaggcacatcatagagtgcacactggagaaaagccctataagtgtgaggtgtgtggcaaaggattcagtcagagaagcaatctccaggctcaccagcgagttcacaccggcgagaaaccgtataagtgtgacgcttgtggcaaaggtttccgctggtccagtggcctgctgattcaccagagggtgcactcctctgacaaattctataagtccgaggactatggcaaagattatcccagttctgagaatctgcacagaaatgaagacagcgtgttattttag

SEQ ID NO: 37563 - DNA, 2739 bp, Artificial Sequence
  derived and/or modified sequence
atgatcaagttccagatggtgaccttcaaggatgtggccgtggtgttcacagaggaggagctgggcctgctggacagcgtgcagaggaagctgtacagagatgtgatgctggagaacttcaggaacctgctgctggtggcccaccagcccttcaagccagacctgatcagccagctggagcgggaggagaagctgctgatggtggagacagagaccccaagagatggctgcagcggcaggaagaaccagcagaagatggagagcatccaggaggtgacagtgtcctacttcagccccaaggagctgagcagccggcagacctggcagcagagcgctgggggcctcatccgctgccaggacttcctgaaggtgttccagggcaagaacagccagctgcaggagcagggcaacagcctgggccaggtgtgggccggcatccctgtgcagatcagcgaggacaagaactacatcttcacccacatcggaaatggcagcaactacatcaagagccagggctaccccagctggagggcccaccacagctggaggaagatgtacctgaaggagagccacaactaccagtgccgctgccagcagatctccatgaagaaccacttctgcaagtgtgacagcgtgtcctggctgagccaccacaatgacaagctggaggtgcacaggaaggagaactacagctgccacgactgtggggaggacatcatgaaggtgtccctgctgaaccaggagagcatccagacagaggagaagccctacccctgcaccggctacaggaaggccttcagcaatgacagcagcagcgaggtgcaccagcagttccacctggagggcaagccctacacctacagcagctgtgggaagggctgcaactacagcagcctgctgcacatccaccagaacatcgagagagaagatgacatcgagaacagccacctgaagagctaccagagggtgcacacagaggagaagccctgcaagtgtggggagtatggagagaacttcaaccactgcagccccctgaacacctatgagctgatccacactggagagatgagctaccgccacaacatctatgagaaggccttcagccacagcctggacctgaacagcatcttccgggtgcacaccagagatgagccccatgaatatgaggagaatgaaaatgtgttcaaccagagcagctgcctgcaggtgcaccagaagatccacacagaggagaagctgtacacagacattgaatatggcaagagcttcatctgcagcagcaacctggacatccagcaccgggtgcacatggaggagaacagctacaacagcgaggagtgtggaaatggcttcagcctggccagccacttccaggacctgcagatcgtgcacaccaaggagcagccctacaagagatatgtgtgcagcaacagcttcagccacaacctgtacctgcagggccaccccaagatccacatcggggagaagcccaggaaggagcacggcaatggcttcaactggagcagcaagctgaaggaccaccagagggtgcacacaggccagaagccctacaagtgcaacatctgtgggaagggcttcaaccacaggtctgtgctgaatgtgcaccagagggtgcacactggagagaagccctacaagtgtgaggagtgtgacaagggcttcagccgcagcagctacctgcaggcccaccagagggtgcacactggagagaagccctacaagtgtgaggagtgtgggaagggcttcagcagaaattcctacctgcagggccaccagagggtgcacactggagagaagccctacaagtgtgaggagtgtgggaagggcttcagccgcagcagccacctgcagggccaccagagggtgcacactggagagaagcccttcaagtgtgaggagtgtgggaagggcttctcctggagcttcaacctgcagatccaccagagggtgcacactggagagaagccctacaagtgtgaggagtgtgggaagggcttcagcaaggccagcaccctgctggcccaccagagggtgcacactggagagaagccctaccagtgtgatgaatgtgggaagagcttcagccagaggagctacctgcagagccaccagagcgtgcacagcggggagcggccctacatctgtgaggtgtgtgggaagggcttcagccagagggcctacctgcagggccaccagagggtgcacaccagggtgaagccctacaagtgtgagatgtgtgggaagggcttcagccagagcagccggctggaggcccacagaagagtgcacactggaggcaagccctacaagtgtgaggtgtgcaccaagggcttcagcgagagcagccggctgcaggcccaccagagggtgcacgtggagggccggccctacaagtgtgagcagtgtgggaagggcttcagcggctacagcagcctgcaggcccaccaccgggtgcacactggagagaagccctacaagtgtgaggtgtgtgggaagggcttcagccagaggagcaacctgcaggcccaccagagggtgcacactggagagaagccctacaagtgtgatgcctgtgggaagggcttccgctggagcagcggcctgctgatccaccagagggtgcacagcagtgacaagttctacaagtcagaagattatggcaaggactaccccagcagcgagaacctgcacagaaatgaagattctgtgctcttctag

SEQ ID NO: 37564 - DNA, 2742 bp, Artificial Sequence
  derived and/or modified sequence
atgaccaagttccaggagatggtgaccttcaaggatgtggccgtggtgttcacagaggaggagctgggcctgctggacagcgtgcagaggaagctgtacagagatgtgatgctggagaacttcaggaacctgctgctggtggcccaccagcccttcaagccagacctgatcagccagctggagcgggaggagaagctgctgatggtggagacagagaccccaagagatggctgcagcggcaggaagaaccagcagaagatggagagcatccaggaggtgacagtgtcctacttcagccccaaggagctgagcagccggcagacctggcagcagagcgctgggggcctcatccgctgccaggacttcctgaaggtgttccagggcaagaacagccagctgcaggagcagggcaacagcctgggccaggtgtgggccggcatccctgtgcagatcagcgaggacaagaactacatcttcacccacatcggaaatggcagcaactacatcaagagccagggctaccccagctggagggcccaccacagctggaggaagatgtacctgaaggagagccacaactaccagtgccgctgccagcagatctccatgaagaaccacttctgcaagtgtgacagcgtgtcctggctgagccaccacaatgacaagctggaggtgcacaggaaagaaaactacagctgccacgactgtggggaggacatcatgaaggtgtccctgctgaaccaggagagcatccagacagaggagaagccctacccctgcaccggctacaggaaggccttcagcaatgacagcagcagcgaggtgcaccagcagttccacctggagggcaagccctacacctacagcagctgtgggaagggctgcaactacagcagcctgctgcacatccaccagaacatcgagcgggaggatgacatcgagaacagccacctgaagagctaccagagggtgcacacagaggagaagccctgcaagtgtggggagtatggagagaacttcaaccactgcagccccctgaacacctatgagctgatccacactggagagatgagctaccgccacaacatctatgagaaggccttcagccacagcctggacctgaacagcatcttccgggtgcacaccagagatgagccccatgaatatgaagaaaatgaaaatgtgttcaaccagagcagctgcctgcaggtgcaccagaagatccacacagaggagaagctgtacacagacatcgagtatggcaagagcttcatctgcagcagcaacctggacatccagcaccgggtgcacatggaggagaacagctacaacagtgaagaatgtggaaatggcttcagcctggccagccacttccaggacctgcagatcgtgcacaccaaggagcagccctacaagcgctacgtgtgcagcaacagcttcagccacaacctgtacctgcagggccaccccaagatccacatcggggagaagcccaggaaggagcacggcaatggcttcaactggagcagcaagctgaaggaccaccagagggtgcacacaggccagaagccctacaagtgcaacatctgtgggaagggcttcaaccacaggtctgtgctgaatgtgcaccagagggtgcacactggagagaagccctacaagtgtgaagaatgtgacaagggcttcagccgcagcagctacctgcaggcccaccagagggtgcacactggagagaagccctacaagtgtgaagaatgtgggaagggcttcagcaggaacagctacctgcagggccaccagagggtgcacactggagagaagccctacaagtgtgaagaatgtgggaagggcttcagccgcagcagccacctgcagggccaccagagggtgcacactggagagaagcccttcaagtgtgaagaatgtgggaagggcttctcctggagcttcaacctgcagatccaccagagggtgcacactggagagaagccctacaagtgtgaagaatgtgggaagggcttcagcaaggccagcaccctgctggcccaccagagggtgcacactggagagaagccctaccagtgtgatgaatgtgggaagagcttcagccagaggagctacctgcagagccaccagagcgtgcacagcggggagcggccctacatctgtgaggtgtgtgggaagggcttcagccagagggcctacctgcagggccaccagagggtgcacaccagggtgaagccctacaagtgtgagatgtgtgggaagggcttcagccagagcagccggctggaggcccaccggcgggtgcacactggaggcaagccctacaagtgtgaggtgtgcaccaagggcttcagcgagagcagccggctgcaggcccaccagagggtgcacgtggagggccggccctacaagtgtgagcagtgtgggaagggcttcagcggctacagcagcctgcaggcccaccaccgggtgcacactggagagaagccctacaagtgtgaggtgtgtgggaagggcttcagccagaggagcaacctgcaggcccaccagagggtgcacactggagagaagccctacaagtgtgatgcctgtgggaagggcttccgctggagcagcggcctgctgatccaccagagggtgcacagcagtgacaagttctacaagtctgaggactatggcaaggactaccccagcagcgagaacctgcacagaaatgaagacagcgtgctcttctag

SEQ ID NO: 37565 - DNA, 2724 bp, Artificial Sequence
  derived and/or modified sequence
atggtgaccttcaaggatgtggccgtggtgttcacagaggaggagctgggcctgctggacagcgtgcagaggaagctgtacagagatgtgatgctggagaacttcaggaacctgctgctggtggcccaccagcccttcaagccagacctgatcagccagctggagcgggaggagaagctgctgatggtggagacagagaccccaagagatggctgcagcggcaggaagaaccagcagaagatggagagcatccaggaggtgacagtgtcctacttcagccccaaggagctgagcagccggcagacctggcagcagagcgctgggggcctcatccgctgccaggacttcctgaaggtgttccagggcaagaacagccagctgcaggagcagggcaacagcctgggccaggtgtgggccggcatccctgtgcagatcagcgaggacaagaactacatcttcacccacatcggaaatggcagcaactacatcaagagccagggctaccccagctggagggcccaccacagctggaggaagatgtacctgaaggagagccacaactaccagtgccgctgccagcagatctccatgaagaaccacttctgcaagtgtgacagcgtgtcctggctgagccaccacaatgacaagctggaggtgcacaggaaagaaaactacagctgccacgactgtggggaggacatcatgaaggtgtccctgctgaaccaggagagcatccagacagaggagaagccctacccctgcaccggctacaggaaggccttcagcaatgacagcagcagcgaggtgcaccagcagttccacctggagggcaagccctacacctacagcagctgtgggaagggctgcaactacagcagcctgctgcacatccaccagaacatcgagcgggaggatgacatcgagaacagccacctgaagagctaccagagggtgcacacagaggagaagccctgcaagtgtggggagtatggagagaacttcaaccactgcagccccctgaacacctatgagctgatccacactggagagatgagctaccgccacaacatctatgagaaggccttcagccacagcctggacctgaacagcatcttccgggtgcacaccagagatgagccccatgaatatgaagaaaatgaaaatgtgttcaaccagagcagctgcctgcaggtgcaccagaagatccacacagaggagaagctgtacacagacatcgagtatggcaagagcttcatctgcagcagcaacctggacatccagcaccgggtgcacatggaggagaacagctacaacagtgaagaatgtggaaatggcttcagcctggccagccacttccaggacctgcagatcgtgcacaccaaggagcagccctacaagcgctacgtgtgcagcaacagcttcagccacaacctgtacctgcagggccaccccaagatccacatcggggagaagcccaggaaggagcacggcaatggcttcaactggagcagcaagctgaaggaccaccagagggtgcacacaggccagaagccctacaagtgcaacatctgtgggaagggcttcaaccacaggtctgtgctgaatgtgcaccagagggtgcacactggagagaagccctacaagtgtgaagaatgtgacaagggcttcagccgcagcagctacctgcaggcccaccagagggtgcacactggagagaagccctacaagtgtgaagaatgtgggaagggcttcagcaggaacagctacctgcagggccaccagagggtgcacactggagagaagccctacaagtgtgaagaatgtgggaagggcttcagccgcagcagccacctgcagggccaccagagggtgcacactggagagaagcccttcaagtgtgaagaatgtgggaagggcttctcctggagcttcaacctgcagatccaccagagggtgcacactggagagaagccctacaagtgtgaagaatgtgggaagggcttcagcaaggccagcaccctgctggcccaccagagggtgcacactggagagaagccctaccagtgtgatgaatgtgggaagagcttcagccagaggagctacctgcagagccaccagagcgtgcacagcggggagcggccctacatctgtgaggtgtgtgggaagggcttcagccagagggcctacctgcagggccaccagagggtgcacaccagggtgaagccctacaagtgtgagatgtgtgggaagggcttcagccagagcagccggctggaggcccaccggcgggtgcacactggaggcaagccctacaagtgtgaggtgtgcaccaagggcttcagcgagagcagccggctgcaggcccaccagagggtgcacgtggagggccggccctacaagtgtgagcagtgtgggaagggcttcagcggctacagcagcctgcaggcccaccaccgggtgcacactggagagaagccctacaagtgtgaggtgtgtgggaagggcttcagccagaggagcaacctgcaggcccaccagagggtgcacactggagagaagccctacaagtgtgatgcctgtgggaagggcttccgctggagcagcggcctgctgatccaccagagggtgcacagcagtgacaagttctacaagtctgaggactatggcaaggactaccccagcagcgagaacctgcacagaaatgaagacagcgtgctcttctag

SEQ ID NO: 37566 - DNA, 2742 bp, Artificial Sequence
  derived and/or modified sequence
ctgactgtgtgccaggagatggtgaccttcaaggatgtggccgtggtgttcacagaggaggagctgggcctgctggacagcgtgcagaggaagctgtacagagatgtgatgctggagaacttcaggaacctgctgctggtggcccaccagcccttcaagccagacctgatcagccagctggagcgggaggagaagctgctgatggtggagacagagaccccaagagatggctgcagcggcaggaagaaccagcagaagatggagagcatccaggaggtgacagtgtcctacttcagccccaaggagctgagcagccggcagacctggcagcagagcgctgggggcctcatccgctgccaggacttcctgaaggtgttccagggcaagaacagccagctgcaggagcagggcaacagcctgggccaggtgtgggccggcatccctgtgcagatcagcgaggacaagaactacatcttcacccacatcggaaatggcagcaactacatcaagagccagggctaccccagctggagggcccaccacagctggaggaagatgtacctgaaggagagccacaactaccagtgccgctgccagcagatctccatgaagaaccacttctgcaagtgtgacagcgtgtcctggctgagccaccacaatgacaagctggaggtgcacaggaaagaaaactacagctgccacgactgtggggaggacatcatgaaggtgtccctgctgaaccaggagagcatccagacagaggagaagccctacccctgcaccggctacaggaaggccttcagcaatgacagcagcagcgaggtgcaccagcagttccacctggagggcaagccctacacctacagcagctgtgggaagggctgcaactacagcagcctgctgcacatccaccagaacatcgagcgggaggatgacatcgagaacagccacctgaagagctaccagagggtgcacacagaggagaagccctgcaagtgtggggagtatggagagaacttcaaccactgcagccccctgaacacctatgagctgatccacactggagagatgagctaccgccacaacatctatgagaaggccttcagccacagcctggacctgaacagcatcttccgggtgcacaccagagatgagccccatgaatatgaagaaaatgaaaatgtgttcaaccagagcagctgcctgcaggtgcaccagaagatccacacagaggagaagctgtacacagacatcgagtatggcaagagcttcatctgcagcagcaacctggacatccagcaccgggtgcacatggaggagaacagctacaacagtgaagaatgtggaaatggcttcagcctggccagccacttccaggacctgcagatcgtgcacaccaaggagcagccctacaagcgctacgtgtgcagcaacagcttcagccacaacctgtacctgcagggccaccccaagatccacatcggggagaagcccaggaaggagcacggcaatggcttcaactggagcagcaagctgaaggaccaccagagggtgcacacaggccagaagccctacaagtgcaacatctgtgggaagggcttcaaccacaggtctgtgctgaatgtgcaccagagggtgcacactggagagaagccctacaagtgtgaagaatgtgacaagggcttcagccgcagcagctacctgcaggcccaccagagggtgcacactggagagaagccctacaagtgtgaagaatgtgggaagggcttcagcaggaacagctacctgcagggccaccagagggtgcacactggagagaagccctacaagtgtgaagaatgtgggaagggcttcagccgcagcagccacctgcagggccaccagagggtgcacactggagagaagcccttcaagtgtgaagaatgtgggaagggcttctcctggagcttcaacctgcagatccaccagagggtgcacactggagagaagccctacaagtgtgaagaatgtgggaagggcttcagcaaggccagcaccctgctggcccaccagagggtgcacactggagagaagccctaccagtgtgatgaatgtgggaagagcttcagccagaggagctacctgcagagccaccagagcgtgcacagcggggagcggccctacatctgtgaggtgtgtgggaagggcttcagccagagggcctacctgcagggccaccagagggtgcacaccagggtgaagccctacaagtgtgagatgtgtgggaagggcttcagccagagcagccggctggaggcccaccggcgggtgcacactggaggcaagccctacaagtgtgaggtgtgcaccaagggcttcagcgagagcagccggctgcaggcccaccagagggtgcacgtggagggccggccctacaagtgtgagcagtgtgggaagggcttcagcggctacagcagcctgcaggcccaccaccgggtgcacactggagagaagccctacaagtgtgaggtgtgtgggaagggcttcagccagaggagcaacctgcaggcccaccagagggtgcacactggagagaagccctacaagtgtgatgcctgtgggaagggcttccgctggagcagcggcctgctgatccaccagagggtgcacagcagtgacaagttctacaagtctgaggactatggcaaggactaccccagcagcgagaacctgcacagaaatgaagacagcgtgctcttctag

SEQ ID NO: 37567 - DNA, 2793 bp, Artificial Sequence
  derived and/or modified sequence
atgggcctgggccccaggagcctgcccttcagcaggaagaggaagaggaagatgaccaagttccaggagatggtgaccttcaaggatgtggccgtggtgttcacagaggaggagctgggcctgctggacagcgtgcagaggaagctgtacagagatgtgatgctggagaacttcaggaacctgctgctggtggcccaccagcccttcaagccagacctgatcagccagctggagcgggaggagaagctgctgatggtggagacagagaccccaagagatggctgcagcggcaggaagaaccagcagaagatggagagcatccaggaggtgacagtgtcctacttcagccccaaggagctgagcagccggcagacctggcagcagagcgctgggggcctcatccgctgccaggacttcctgaaggtgttccagggcaagaacagccagctgcaggagcagggcaacagcctgggccaggtgtgggccggcatccctgtgcagatcagcgaggacaagaactacatcttcacccacatcggaaatggcagcaactacatcaagagccagggctaccccagctggagggcccaccacagctggaggaagatgtacctgaaggagagccacaactaccagtgccgctgccagcagatctccatgaagaaccacttctgcaagtgtgacagcgtgtcctggctgagccaccacaatgacaagctggaggtgcacaggaaggagaactacagctgccacgactgtggggaggacatcatgaaggtgtccctgctgaaccaggagagcatccagacagaggagaagccctacccctgcaccggctacaggaaggccttcagcaatgacagcagcagcgaggtgcaccagcagttccacctggagggcaagccctacacctacagcagctgtgggaagggctgcaactacagcagcctgctgcacatccaccagaacatcgagagagaagatgacatcgagaacagccacctgaagagctaccagagggtgcacacagaggagaagccctgcaagtgtggggagtatggagagaacttcaaccactgcagccccctgaacacctatgagctgatccacactggagagatgagctaccgccacaacatctatgagaaggccttcagccacagcctggacctgaacagcatcttccgggtgcacaccagagatgagccccatgaatatgaggagaatgaaaatgtgttcaaccagagcagctgcctgcaggtgcaccagaagatccacacagaggagaagctgtacacagacattgaatatggcaagagcttcatctgcagcagcaacctggacatccagcaccgggtgcacatggaggagaacagctacaacagcgaggagtgtggaaatggcttcagcctggccagccacttccaggacctgcagatcgtgcacaccaaggagcagccctacaagagatatgtgtgcagcaacagcttcagccacaacctgtacctgcagggccaccccaagatccacatcggggagaagcccaggaaggagcacggcaatggcttcaactggagcagcaagctgaaggaccaccagagggtgcacacaggccagaagccctacaagtgcaacatctgtgggaagggcttcaaccacaggtctgtgctgaatgtgcaccagagggtgcacactggagagaagccctacaagtgtgaggagtgtgacaagggcttcagccgcagcagctacctgcaggcccaccagagggtgcacactggagagaagccctacaagtgtgaggagtgtgggaagggcttcagcagaaattcctacctgcagggccaccagagggtgcacactggagagaagccctacaagtgtgaggagtgtgggaagggcttcagccgcagcagccacctgcagggccaccagagggtgcacactggagagaagcccttcaagtgtgaggagtgtgggaagggcttctcctggagcttcaacctgcagatccaccagagggtgcacactggagagaagccctacaagtgtgaggagtgtgggaagggcttcagcaaggccagcaccctgctggcccaccagagggtgcacactggagagaagccctaccagtgtgatgaatgtgggaagagcttcagccagaggagctacctgcagagccaccagagcgtgcacagcggggagcggccctacatctgtgaggtgtgtgggaagggcttcagccagagggcctacctgcagggccaccagagggtgcacaccagggtgaagccctacaagtgtgagatgtgtgggaagggcttcagccagagcagccggctggaggcccacagaagagtgcacactggaggcaagccctacaagtgtgaggtgtgcaccaagggcttcagcgagagcagccggctgcaggcccaccagagggtgcacgtggagggccggccctacaagtgtgagcagtgtgggaagggcttcagcggctacagcagcctgcaggcccaccaccgggtgcacactggagagaagccctacaagtgtgaggtgtgtgggaagggcttcagccagaggagcaacctgcaggcccaccagagggtgcacactggagagaagccctacaagtgtgatgcctgtgggaagggcttccgctggagcagcggcctgctgatccaccagagggtgcacagcagtgacaagttctacaagtcagaagattatggcaaggactaccccagcagcgagaacctgcacagaaatgaagattctgtgctcttctag

SEQ ID NO: 37568 - DNA, 2739 bp, Artificial Sequence
  derived and/or modified sequence
atgatcaagttccagatggtgaccttcaaggacgtggccgtggtgtttaccgaggaggagctgggcctgttggactctgtccagcgaaagctgtatcgggacgtcatgctcgagaatttccggaatctcttgctggtggcccatcaacctttcaaaccagatctgatctcacaactggagcgcgaagagaaactcctaatggttgagactgaaaccccccgcgatggttgctccggccggaaaaatcagcagaagatggaatcaattcaggaagttaccgtctcttacttctcacccaaagagctttcaagtcggcagacctggcaacaatccgcgggtggtttgatcagatgccaggatttcctgaaagttttccagggcaagaactcccagctgcaggaacaggggaatagcctggggcaggtctgggcggggattcccgtccaaataagcgaggacaaaaattacatttttactcatatcggtaatggcagcaactatattaagtctcaaggttatccaagttggagagcgcatcatagctggcgtaagatgtatttaaaggaatcccacaactatcagtgccggtgccaacagatttcaatgaaaaaccacttctgcaagtgtgattcagtctcctggctgtctcaccataacgataaacttgaggtgcatcgaaaggagaattacagttgtcatgactgcggggaggatataatgaaagtcagtctgctgaaccaggaatccatccagaccgaagaaaagccttatccttgcaccggctataggaaggcctttagcaatgattcatcgtcagaagttcaccaacagttccacctggagggtaaaccatacacttactcaagctgtggaaaaggctgcaattattccagcctgctgcatatccaccagaatatcgagcgagaagatgacattgagaattcccacctgaagtcctaccagcgggtccacactgaagagaaaccatgtaaatgcggtgaatacggcgagaacttcaatcactgctcacctttgaatacgtatgagttgattcatacgggcgagatgagctacaggcataacatttacgagaaggcttttagccacagtttggatctcaacagtattttccgtgtgcacacacgcgacgagccccacgaatatgaggagaacgagaatgttttcaatcaaagcagctgcctccaggtccaccagaaaatccacacagaagaaaagttgtataccgatattgagtatggtaaatcatttatctgcagttctaatttagacatccagcatagggttcatatggaagagaatagctacaacagtgaggagtgtggtaacggtttctctctggccagccatttccaggacctgcagattgtccatactaaggaacagccctataagcggtacgtgtgcagcaactcgttctcacataacctctatctgcagggccaccctaagatccacattggggaaaaacctcgtaaagagcacgggaatgggttcaattggagttcaaagctcaaggaccaccagagagtccacaccgggcaaaagccctataagtgcaacatctgcgggaagggcttcaatcatcggtcagtcctgaatgtgcaccagcgagtccacaccggggagaaaccttacaagtgcgaagaatgcgataagggtttttcccgctcatcttatctacaggcgcaccaacgagttcatacaggcgagaagccgtacaaatgtgaagaatgcgggaagggctttagtaggaattcatacttgcaggggcatcagcgggtgcacacaggcgagaagccttacaagtgcgaagagtgtggaaaggggttttcacgttcatcacatctccagggccatcagagagtacacacaggcgagaaacccttcaagtgtgaggagtgcgggaagggcttttcctggtctttcaacctgcagatacaccagcgggtccataccggtgagaagccatacaagtgtgaggaatgcgggaaggggttttccaaggcatcaaccttgctggcgcatcagagggtgcataccggggagaagccttaccagtgcgatgagtgcggtaagtcttttagccaacgctcataccttcagagtcaccagtcagtgcattctggagaaagaccttatatctgcgaagtgtgcggcaaaggatttagtcagcgtgcctacctccaaggacatcagagagtgcacacccgtgtgaagccttacaagtgcgagatgtgcggcaaaggctttagccagtcgagtcggcttgaggcacatagaagagtccacacagggggtaagccttataaatgcgaggtttgcaccaaaggcttctcagaaagcagccgtctacaggcccaccagagagtccacgtggaaggtcgtccctataaatgcgagcagtgcgggaaaggcttttcgggctactcttccttgcaggcacatcacagagtccacactggcgaaaaaccttacaaatgcgaggtttgtgggaagggctttagccagcgcagcaacctgcaggctcatcaaagagtgcacaccggggagaaaccctacaaatgtgatgcctgcggtaaaggattccggtggtccagcggattattaatccatcagagggtgcactcaagcgataaattttataaaagcgaagactacggcaaggactatcctagtagtgaaaatctccatcgcaatgaggattcggttctgttctag

SEQ ID NO: 37569 - DNA, 2742 bp, Artificial Sequence
  derived and/or modified sequence
atgaccaagttccaggagatggtgaccttcaaggacgtggccgtggttttcaccgaagaggaattaggattactcgattctgttcagcggaaactgtatcgggacgtcatgctcgagaactttcgaaacctacttcttgtagcgcaccagccatttaagcctgacctaattagccagcttgaacgcgaagaaaagctgcttatggtcgaaactgaaacccccagggacggctgcagcggcagaaagaaccagcaaaagatggagagcatacaggaagttacggtatcttattttagccccaaggaattaagctcccgtcaaacatggcagcagtccgctggaggcctgatccggtgccaggactttctgaaggtgttccaggggaagaactctcaactgcaagagcaaggtaactccctgggacaggtttgggccggtataccagtacagattagtgaggacaaaaactatatcttcacccacattggaaacggctcgaactacataaagagccagggttatccctcctggcgtgcacaccacagctggaggaagatgtatcttaaggaatcccataactaccaatgtagatgccagcagatcagcatgaaaaaccacttctgtaagtgtgattcagtgtcatggttgagccatcacaatgacaagctggaagtccatcggaaggagaactattcatgccacgactgtggagaagatataatgaaagttagcctattgaatcaggagtcaattcagacggaagaaaagccttatccctgtaccggctataggaaggcctttagcaacgattctagcagcgaggtccaccagcagtttcacctagagggcaaaccctatacttactcatcctgcggaaagggctgtaactactcatcactactgcacatccatcaaaacatagaaagggaggatgatatcgagaatagccacctgaaatcctatcagcgtgtacataccgaagagaagccctgcaaatgcggagagtatggcgagaatttcaatcactgttccccccttaatacatacgagttgatccacacaggtgaaatgtcatacaggcacaatatttacgaaaaagcatttagtcatagcctcgatctgaacagtatctttcgcgtccatacacgtgacgagccccatgaatacgaggaaaatgaaaatgtgttcaatcaatctagttgtttgcaagtccatcagaagatccacactgaagaaaagctgtataccgatatagagtacggaaaatcatttatctgttccagtaatctcgacattcagcatagggttcacatggaggagaactcctataactcagaggagtgcggtaacggctttagtcttgcaagtcactttcaggacctccagatcgtacatacgaaagagcagccctataagcgatacgtgtgttccaactcattcagtcacaatctgtatctgcaggggcacccgaaaatccacattggcgagaagccccgaaaggaacacgggaatggattcaactggtcctccaagctaaaggatcaccagcgggttcacacaggtcaaaagccatacaagtgtaacatctgtggaaagggcttcaatcacagatctgtccttaacgtgcaccagagagtgcacacaggggagaaaccttacaaatgtgaggaatgcgacaaagggttttcaagaagctcttatctgcaagctcatcagagagtgcatacaggtgaaaaaccttacaagtgcgaggagtgcggcaagggcttcagcaggaattcctacttacagggccaccagcgcgtgcacacaggggaaaaaccatacaagtgtgaggaatgcggaaaaggattctccagatcatctcacctccaaggacatcagagagtccatactggcgagaaaccgtttaaatgcgaagagtgtgggaagggtttcagttggtcttttaacctccaaattcatcagcgcgtccacacaggggagaagccgtacaaatgtgaggagtgcggtaagggattttctaaggcatccactctgcttgctcatcagcgtgtgcatacaggagaaaagccctatcagtgcgatgaatgtggcaagtctttcagtcagcggagttacctgcagagtcaccagtcagtccattctggcgagagaccttatatttgtgaggtgtgcggtaagggcttttcccaacgcgcttatcttcaaggacaccaacgcgttcacacgcgtgttaagccatacaaatgtgagatgtgcggaaaaggctttagtcagtcatcaaggctggaggcccacaggcgtgtccacacaggggggaaaccttacaagtgcgaggtgtgtaccaaagggttttccgagtcatctcggctgcaagctcatcaacgcgtgcacgtggaagggagaccctacaagtgtgaacagtgcgggaaggggttctccggctattcctccctgcaggcacaccaccgcgtacacaccggcgagaagccctacaaatgtgaagtttgtggcaaggggttctctcagaggtccaacctgcaggctcaccagcgcgtacacacaggggagaagccatacaaatgtgatgcatgtgggaagggcttccgctggtcatcagggctactcattcatcagagagtgcattcttcagacaaattctacaaatcagaggactacggaaaagattacccgtccagtgagaatctgcacaggaatgaagacagcgtcctattttag

SEQ ID NO: 37570 - DNA, 2724 bp, Artificial Sequence
  derived and/or modified sequence
atggtgaccttcaaggacgtggccgtggtgttcaccgaggaggagctggggctcctcgatagcgtgcagagaaagctctatcgtgacgtcatgctagaaaactttaggaatctcttgttggtcgcacaccagcctttcaagccagacttaatctcccagctggagagagaagagaagttactaatggtggaaacagaaacgcccagggacgggtgttcaggcaggaaaaaccaacagaagatggaatctattcaggaagtgaccgtcagttacttttcgccaaaagaactaagctcccggcagacctggcagcaatcagccggcgggctcattcgatgccaggatttcctcaaggtgttccagggaaagaactctcagctgcaggagcaaggtaatagcctcggacaggtttgggctgggatccccgtacagatctccgaggacaaaaactacatttttactcacatcggtaacggctcaaactacattaagtctcaggggtatccttcctggagagctcatcacagttggcggaagatgtacctcaaagagtcgcataactaccagtgccgctgtcagcaaattagtatgaaaaatcacttttgcaagtgcgactcagtctcctggttatcccaccataatgacaaactagaggtgcataggaaggaaaattattcttgccacgactgcggcgaggacatcatgaaggtgtctctgttaaatcaggaatctattcaaaccgaagagaagccttacccttgtacaggttatcgcaaagccttttccaacgactcatcctcagaggtccatcagcagttccacctcgagggaaagccctacacctacagttcgtgtggaaaaggttgtaattatagcagcctgctccatattcatcagaacatcgagagagaagatgatatcgaaaatagtcatctcaaatcttaccaaagagtccatactgaggagaagccatgtaaatgcggggaatacggggaaaattttaatcattgctcacctctgaacacttacgagctgattcatactggagagatgagttaccgtcacaacatctacgagaaggcgttctctcactccctggatctcaactcaattttccgagttcacacaagggacgagccccacgaatacgaagagaacgaaaacgtgttcaaccaatctagctgtctccaggtgcaccagaaaatccacactgaggaaaagctgtatacagatattgaatatggcaagtctttcatctgttccagcaatctggatatccaacaccgcgttcacatggaggagaactcgtataattccgaagagtgtggaaatggattctctctggccagccacttccaggacttgcagatcgttcacacgaaggagcagccatataagagatacgtgtgctctaacagtttcagtcacaacctgtacctgcagggccatccaaagatccacattggtgaaaagccccggaaggagcatggaaatggctttaactggagcagtaaacttaaagatcatcaacgcgtccataccgggcagaaaccgtacaagtgcaatatctgtgggaaggggttcaaccacagatcagtgttgaatgtgcaccagagagtgcataccggtgaaaagccatacaaatgcgaagagtgcgacaagggattcagtcgttctagttacctccaggcccatcagagagtccataccggcgaaaaaccctataagtgtgaagagtgtgggaaagggtttagcaggaactcctacctacaggggcaccagagggtgcacacaggcgagaagccatataaatgcgaggaatgcggcaaaggattctctcgctccagccacctgcagggccaccagagggtgcacaccggggagaagcccttcaaatgtgaggaatgcggcaaaggctttagctggtcgtttaacctgcagattcaccagcgcgtccacactggggagaagccctataaatgcgaagagtgtggaaaaggcttctcgaaagccagcaccctcctggcccaccaaagagtgcacactggagagaaaccataccagtgcgacgagtgtggtaagtcttttagccaaaggtcctatcttcagtcccaccagtccgtgcactctggagagagaccatatatctgtgaggtctgcgggaaaggattttcccagagagcttacctccagggccatcaaagagtccacactagggtaaagccgtacaaatgtgaaatgtgtggcaaagggttttctcagtcctcaaggctagaggcacaccgacgggttcacaccggtggcaaaccttacaagtgcgaggtttgtacaaaagggttcagcgagagtagtcggctccaagctcaccaacgagtccacgtggagggacgcccttacaagtgtgaacagtgtggaaaagggttttctggttattcctccctccaggcacatcacagggtgcacactggagaaaaaccttataagtgtgaggtatgtggaaagggtttttcgcagcggagtaatctccaagctcatcagcgggtccacacaggagaaaagccttataaatgtgacgcatgcggaaaaggttttcggtggtcgagtggattgctgatccaccaacgcgtacatagcagtgataagttctacaagtcagaggactatggcaaggattacccctcatccgagaatttacatcggaatgaagactcagtcctcttctag

SEQ ID NO: 37571 - DNA, 2742 bp, Artificial Sequence
  derived and/or modified sequence
ctgaccgtgtgccaggagatggtgaccttcaaggacgtggccgtggtgtttaccgaggaggagctgggcctgctagactccgtccagaggaaactctacagggacgtgatgttggaaaacttccgcaacctgctgctcgttgctcaccagccatttaagcccgatctgatctcccagcttgaacgcgaagaaaagcttcttatggttgagaccgaaacaccccgggacgggtgttctggcaggaagaatcaacagaagatggaaagcatccaggaggtgactgttagctatttctctcccaaagaactctcttcaagacaaacgtggcagcagagtgccggaggactcatacgctgccaggacttcctcaaggtgttccaaggaaagaacagccaattgcaggagcaaggcaactccctagggcaggtgtgggccgggattccggtgcagatatccgaagacaagaactatattttcacgcatattgggaacgggagcaattacataaaatcacaggggtacccatcgtggcgcgctcaccatagctggaggaagatgtatctcaaggaaagccacaattaccagtgccggtgccagcaaatctccatgaaaaaccacttctgtaagtgtgactctgtctcctggctaagccaccacaatgacaaactagaagtccacagaaaggagaattacagctgtcatgactgcggggaagatattatgaaggttagtctgctgaatcaggagtctatacagacagaagagaagccctacccctgcaccggatataggaaggctttctctaatgactccagtagcgaagtgcatcagcagtttcatctcgagggaaagccctacacatactccagctgtgggaagggctgcaactactcatctctgctgcatatccaccagaatatagagagagaagatgacattgaaaattcacatcttaaatcataccagcgggtgcatacggaggagaagccatgtaaatgcggggagtacggagagaatttcaaccactgtagccctttgaacacatatgagctcatacatacaggagagatgtcttatcgccacaacatctatgagaaagccttttcccattcactggatcttaattccattttccgggtacatactcgcgacgagcctcatgaatatgaggaaaacgaaaacgtctttaaccagtcatcatgcctgcaggtacatcagaagattcacactgaagagaaactgtacacggatatagaatacggaaaatcttttatctgctcgtcaaatctagacatccagcacagagtgcatatggaggaaaacagttacaactcagaggaatgcggcaatggttttagcctggcgagtcactttcaggacctgcaaatcgttcacaccaaagaacagccctacaagcgatacgtgtgtagcaactcttttagtcacaacctgtacctgcagggccaccctaagatccacatcggcgagaaaccgcggaaggagcacggcaacggctttaattggagttccaagctgaaggatcatcagagagtgcacacagggcaaaagccctacaaatgtaacatctgtgggaaagggtttaaccacagatccgtcctgaatgtccaccaacgagtgcatactggggagaaaccctacaagtgtgaggaatgcgataagggatttagccggagttcttacctccaggcccaccagcgggtccacaccggagaaaagccctataaatgcgaggaatgcggaaagggcttctccaggaactcatatcttcagggacaccagcgcgtccacaccggggaaaagccatacaaatgtgaagaatgcggaaaaggtttctccaggagttcacatctgcaggggcaccagagggtgcacaccggcgaaaaacccttcaaatgcgaggaatgtgggaagggattctcttggagcttcaatctgcagatccatcagcgagtgcacaccggagagaaaccctataaatgtgaggaatgtggcaaggggtttagcaaagcttccacactgctcgcacatcaacgggtacacactggcgagaaaccctatcagtgcgatgagtgcggcaagtctttcagccagcgaagctatttgcaaagccaccagtcagtccatagcggggagcgcccctacatttgtgaagtttgcggtaaaggcttcagccagcgcgcttaccttcaaggtcatcagcgcgtgcatactcgggtcaagccttacaagtgcgaaatgtgtgggaagggcttttctcagtcaagtaggctcgaggctcaccgtcgggtgcatactggaggcaagccatacaagtgcgaagtgtgcactaaggggtttagcgagagctccaggctgcaggcccaccagcgcgtgcatgttgagggaaggccttacaagtgtgagcagtgtgggaaaggctttagcggctactcaagcctgcaggcccaccacagagtgcatacaggggaaaagccgtataaatgcgaagtgtgcggaaaaggcttttcccaacggagtaacttgcaagcccaccagagagtccacacaggggagaaaccatacaagtgtgatgcttgcggaaagggatttcgatggagctctggcttattgatccatcagcgagtccacagcagtgataagttctacaagtcagaggattacggcaaggactacccaagctccgaaaatctccatcgcaacgaggattcagtactcttttag

SEQ ID NO: 37572 - DNA, 2793 bp, Artificial Sequence
  derived and/or modified sequence
atgggcctgggcccccggagcctgcccttcagccggaagcggaagcggaagatgaccaagttccaggagatggttacgtttaaggatgtggctgtggtattcaccgaagaagagcttgggcttttagacagcgtgcagcgcaagctgtatagagacgtgatgctcgagaattttagaaatttactgctggtcgctcaccagccattcaagccagacctgatatcacaactggaacgtgaggaaaaattgctcatggtagaaacagaaacaccgagagacggctgctcaggccgcaagaaccagcagaaaatggagtccatacaagaagtgacagtgtcctactttagccctaaggaactttcctctcgccaaacctggcagcagtcagccggaggactaataaggtgtcaggactttctgaaggtatttcagggtaaaaactcacaattgcaggaacagggcaactcattaggccaggtgtgggcagggattcctgtacagatcagcgaggacaaaaattatattttcactcacattggaaatggctccaactacatcaaaagccaggggtatccttcatggcgggcccaccattcctggagaaaaatgtacctgaaggagtctcataattatcagtgtcgctgccagcagatcagtatgaagaatcacttctgcaagtgcgatagcgtgagttggcttagccaccacaatgataaactggaggtgcacagaaaagaaaactacagctgtcacgactgcggggaggacataatgaaagtcagcttgctaaaccaggagtctattcagaccgaagagaaaccctacccatgcacggggtacagaaaagcattttcaaacgactcctcctcagaggtccatcaacagtttcacctcgaggggaagccctatacctatagctcatgcggaaaaggatgtaattattcatctctgttgcatattcaccaaaatattgagcgagaggacgatattgagaattcccatctgaaaagctaccagcgtgtgcacacagaagagaagccctgtaagtgcggtgagtacggtgaaaatttcaaccattgtagccctttgaacacctacgagctgatccacacaggcgagatgtcgtatagacataatatatacgaaaaagcatttagtcatagcctggatctcaacagcattttccgtgtccacacacgcgacgagccacacgagtacgaagaaaatgagaacgtctttaatcagagctcctgcctccaggttcatcagaaaatccacactgaggagaagctgtataccgacatcgagtacggcaagtcgttcatctgcagtagcaacctggatatccagcaccgagtccacatggaggaaaactcatacaactcggaggagtgtggaaacggatttagtctggcttcccattttcaagatcttcagattgtccatacgaaggaacagccttataaaaggtacgtatgtagcaactctttctcgcacaatctgtatctgcagggccatcccaagatccacattggtgaaaagccaagaaaagagcatggaaacggattcaattggagctctaagctcaaggatcaccaacgggtgcacaccgggcagaaaccatataaatgcaatatttgcgggaaaggcttcaatcacaggtcagtgctgaatgtacaccaacgagtacacactggcgagaagccttataagtgcgaggagtgtgacaagggcttttcacggtcatcatatctgcaagcccaccagagagtgcatacaggggagaaaccatacaaatgcgaggagtgcggaaagggattctctagaaactcttatctgcaggggcatcagagagtgcatacgggggagaagccctacaagtgcgaggagtgtggcaaagggttctctcgtagtagtcacctgcagggccaccagcgtgtacacaccggggaaaagccgttcaagtgcgaggagtgcgggaaaggcttcagttggtcttttaaccttcaaatccatcagcgcgtccatactggagaaaagccttacaaatgcgaagaatgtggtaaggggttctcaaaggcctctacactgcttgcccatcaaagagtgcacaccggagagaaaccctaccaatgcgatgaatgcggaaagagcttcagccaacgatcctacctgcagtcccatcaatcggtgcattcaggcgagagaccatacatctgtgaggtttgcggaaagggttttagccagcgcgcctatttgcaggggcatcagcgggtgcatactagagtcaagccctacaaatgtgaaatgtgcggcaagggattttcccaatcaagtaggttggaagctcaccgacgggtgcacactggagggaagccctacaagtgtgaggtgtgtactaagggattctccgaatcctccaggctgcaggctcatcaacgagtgcacgtggagggccggccttataagtgcgagcaatgcgggaaggggtttagcggatatagcagtcttcaggctcatcatcgtgtgcacactggcgagaagccttacaaatgtgaggtgtgcggaaagggcttctcccagcgctctaatctccaggctcaccaacgagtccacactggggagaaaccgtacaaatgtgacgcctgtgggaagggattcagatggtcatcggggctgctcatccatcaacgggtgcactcctcagacaagttctataagagtgaggattatgggaaagattacccctcttcagaaaacctgcatagaaatgaggactcggtactgttctag

SEQ ID NO: 37573 - DNA, 2739 bp, Artificial Sequence
  derived and/or modified sequence
atgatcaagtttcagatggtgacctttaaagatgtagccgtcgtatttacagaggaagagctcggcctgttagacagcgtgcagcggaagttgtatagagacgttatgcttgagaacttccgcaatttgctgctcgtcgcacatcaacctttcaagcccgacctgatctcccagctggagcgggaggaaaagttgttgatggtggagaccgagacgccgagagacggatgcagcggaaggaaaaatcaacagaaaatggagagtatccaggaggttacagtgagctacttttcccctaaggaactgtccagcagacagacatggcagcaatccgccggaggactgattcgctgccaggattttcttaaagtattccaggggaagaatagccaactgcaagaacagggaaactcccttggtcaggtgtgggccggtattccagtccagatctcagaggacaagaattacatctttacccatataggtaatggaagcaattacatcaagtctcaggggtacccttcatggagggcacaccacagttggagaaagatgtaccttaaggagtctcacaactatcaatgcagatgtcagcagataagcatgaagaaccacttttgcaaatgtgattctgtcagctggctgtcccaccataatgataagctcgaggttcatcggaaagagaactatagctgccatgattgcggtgaggacatcatgaaggtttcactgctgaaccaggagtccatccagacagaagaaaaaccctacccgtgtacggggtataggaaggcattcagtaacgattcatcctctgaagtgcatcagcagttccacctagaaggtaaaccttatacctattctagctgcggaaaagggtgtaactacagctcactacttcacatccatcagaatatcgaaagggaagacgacatcgagaatagtcacctaaagagctaccagcgggtgcataccgaggaaaagccatgtaagtgcggggagtatggggaaaattttaatcactgttcccctctgaacacatatgaattgatacacactggggaaatgtcttacagacataatatttatgaaaaggcgttttcccattcacttgacttaaactcaatattccgggtacacacacgggacgagccccatgaatatgaggagaatgagaatgtttttaaccaatcctcttgtctacaggtgcaccagaagattcacacagaggagaaactttacaccgatattgagtacggcaagagctttatctgtagctccaatttggacatccaacatagagtgcatatggaggaaaattcatacaattccgaagagtgcgggaacgggttcagccttgcatcacacttccaggaccttcagatcgttcatacaaaagagcagccttacaagagatacgtttgctccaacagttttagccataatctgtacctccagggccatccaaaaattcatataggagaaaagcctagaaaggaacatgggaatggcttcaattggtcctctaagctgaaggatcatcagcgagtgcacaccggccaaaagccatataaatgcaacatctgcgggaaaggatttaaccatcgtagtgtactcaatgtgcatcagcgcgtccacaccggggagaaaccttacaagtgcgaagagtgtgataagggattctcaaggagttcttatctgcaggcccaccagagggtgcacacgggagaaaagccctacaaatgtgaggagtgtgggaagggattctccagaaacagctatttgcaaggtcaccagagagttcacaccggagagaagccgtataaatgtgaggagtgtggcaaagggttctcacggagcagccatttgcagggccaccagcgggtccacaccggagagaagccctttaagtgcgaagagtgcggcaagggcttcagctggtcgtttaatctgcaaatacatcaacgcgtacatacgggagagaagccttataagtgtgaggaatgcggtaaaggtttctctaaggcctctaccctgctggcacatcaaagagtacacaccggagagaaaccatatcagtgtgacgagtgcggaaaatcgttttcccagcgaagctacttgcagagccatcagagtgtgcattctggtgagcgcccttatatatgcgaagtgtgtggtaagggcttcagtcagagggcgtacctgcagggacatcagcgggttcatacacgagtgaaaccctacaaatgtgagatgtgcggcaaaggctttagccaatcctcccgactggaggcacatcgaagggtgcatacagggggtaaaccatacaagtgtgaggtgtgcaccaagggtttcagcgagtccagcaggctgcaagctcaccaacgcgtccatgtggaagggagaccctataaatgcgaacaatgtggcaaaggtttttccggttatagctccctgcaggcgcaccacagggtgcacacaggggaaaaaccgtataaatgcgaagtgtgcggaaagggcttttctcaaaggtcaaatctccaagcacaccagcgcgttcacaccggagaaaaaccatacaagtgcgatgcctgcggcaaggggtttcgatggtcttctggcttgctgattcaccaacgggtgcatagctcagacaagttctacaagagcgaggattacggcaaagattatccaagctctgagaatctccatcgcaacgaggactccgtgcttttctag

SEQ ID NO: 37574 - DNA, 2742 bp, Artificial Sequence
  derived and/or modified sequence
atgaccaaatttcaggagatggttactttcaaggatgtcgcagtggtctttacagaagaggaactaggtcttctggatagtgtccagagaaagctctacagagacgtcatgttggaaaatttccggaaccttctgttagtggcccatcagccctttaagcccgatctgatttctcagctagagcgagaggagaagctgttaatggttgaaaccgaaacaccaagggacggttgctccgggagaaagaaccagcagaaaatggaatccatccaggaagtcactgttagctacttcagtcccaaagagctaagtagccgtcagacatggcagcagtccgccggaggcctaatccgctgtcaggattttctcaaagtctttcaaggaaagaactctcagttgcaagaacaggggaattccttaggtcaggtatgggcaggcatacctgtccagatttctgaggataaaaactacatttttacacatatcggtaatgggtccaactacataaaatcccagggctatccttcctggagagcccatcattcttggcgcaagatgtatctcaaggagtctcataattaccagtgccgttgccagcagatctccatgaagaaccacttttgcaagtgtgactccgtgtcttggttgagtcatcataatgacaagctggaagtgcatcgtaaggagaactacagttgccacgactgcggtgaagacatcatgaaggtgagtctcctgaatcaggaatcaatccaaactgaggagaagccttatccatgtacaggctaccggaaggcattctctaacgacagtagtagcgaagtgcatcaacagttccacctggagggaaagccctacacctactcttcttgtggcaagggctgcaattacagttctctgctgcacatccaccagaacattgagcgcgaggatgatattgagaactcgcacttgaaatcctatcagagagtccacaccgaagaaaaaccctgtaaatgcggcgagtatggagaaaatttcaaccattgttctccactgaatacatacgaactgattcatacgggggaaatgtcctacaggcataatatttatgagaaagcatttagccattcacttgacctgaattctatcttcagggtgcacacaagagacgagccccatgaatacgaagagaatgaaaatgtatttaaccagtcaagctgtctccaggtgcaccaaaaaattcacacagaggagaagctgtacaccgacatcgagtacgggaaatcttttatttgttccagcaatttagacattcaacaccgggtacatatggaggaaaattcctacaactcggaggagtgcggaaacggtttctctctggcaagtcattttcaggacctgcaaatcgtccatacaaaagagcaaccatacaaaaggtacgtgtgctccaattcttttagccacaacctttatctacagggacacccaaaaattcacatcggagaaaagccacggaaagaacacggaaatggattcaattggtcttctaagctgaaggatcaccagagggtccacaccggccaaaagccctacaagtgtaacatctgcggaaaggggttcaaccatcgatcagtgctgaacgtccatcaacgcgttcacaccggcgaaaaaccttataagtgcgaggaatgcgacaaaggcttttctcgttcctcctacctgcaggctcaccagagggtccacacaggcgaaaagccatacaaatgcgaagagtgcggtaagggcttttctagaaattcataccttcaggggcatcaacgggtgcacacaggcgaaaagccttataaatgcgaggagtgcggtaaagggttcagtagaagtagccacttacagggccatcagagggtccatacaggcgaaaaaccattcaaatgtgaggaatgtggaaagggcttctcgtggtcctttaacctgcagatacaccagagggtgcatacaggcgagaaaccttacaagtgcgaggaatgtggtaagggcttttccaaggcctccaccctgttggcacatcaacgagttcacacaggagaaaagccgtaccagtgtgacgaatgcggaaagtccttttctcagcgtagttatctgcagtcacatcagtccgtgcattctggcgaaaggccttatatctgcgaggtttgcggaaagggattttcacaaagggcctaccttcaggggcatcagagagtgcatacgcgggtcaagccatacaaatgtgagatgtgtggcaaagggttcagccagagcagtagactagaagctcataggagagtgcataccggaggaaagccatacaaatgcgaagtttgcaccaaaggcttcagcgagagctccagactgcaggcccaccagagggtccatgtggaaggacgcccatacaaatgcgaacagtgcggaaaaggcttttctgggtatagctccctgcaggctcatcaccgcgttcacactggagagaagccttataagtgcgaggtctgcggcaagggattctcccagcgctccaacctgcaagcccaccagcgggtccacaccggtgaaaaaccatataaatgtgacgcatgtggaaaaggattcaggtggtcgtcaggcctgctgatccaccagcgcgtgcacagctcagacaaattttacaaatctgaggattacgggaaggattacccttcttccgagaatttacaccgcaatgaggactcggtgctgttttag

SEQ ID NO: 37575 - DNA, 2724 bp, Artificial Sequence
  derived and/or modified sequence
atggtgacttttaaggacgtggctgttgtgtttacagaggaggagcttggactgctggatagtgtccaacgtaaactgtaccgggacgttatgctggagaatttccgaaatctgctcctcgtcgcccatcagccattcaagcctgatctcatcagccagctggaaagggaggagaagctcctcatggtagaaacagagactccgagagatggttgtagcggacggaagaatcaacaaaagatggagtctattcaagaggtgacagttagctacttctctccaaaggagctgtcctccagacaaacatggcagcagtcagcgggtggtttgatccgatgtcaagatttcctaaaggtcttccaggggaagaactcccagttgcaggaacaggggaatagcctggggcaggtttgggcgggaatccctgtccagatctcagaggataagaattatatttttacgcacatcggaaatgggtcaaattatatcaagtcacagggctaccccagctggcgggcacaccatagctggcggaaaatgtatttgaaggagtcgcataattaccagtgtagatgtcagcaaatctcaatgaagaaccacttttgcaaatgtgactctgtttcatggctatctcaccacaatgataagcttgaggtgcatagaaaggagaactattcgtgtcacgattgtggtgaggacatcatgaaagtctccctcttgaaccaggaatctatccagacagaggaaaagccctatccctgtacaggctataggaaagccttctcaaacgatagttcttcggaggttcaccagcagtttcatcttgagggtaaaccatacacatactcaagttgcggaaagggttgcaattattcctcactcctccatatccaccagaacattgaacgcgaagacgacatcgaaaattcacatctgaagagttaccagcgtgttcacaccgaggagaagccctgtaagtgcggcgagtatggcgagaactttaaccattgctcccctctgaacacctacgagctgattcatactggcgagatgagctacaggcacaacatttatgagaaagcttttagtcactctttagacctcaattccatcttccgtgttcatactcgagatgagccacacgagtatgaggagaacgaaaacgtgttcaatcaatcttcctgtttgcaggtccaccagaagatccacaccgaggagaagttgtataccgatatcgagtacgggaagtcctttatttgctcatcgaacctggatattcagcaccgcgtgcatatggaggagaactcctataattctgaggagtgcggcaacggtttctcacttgcctcccattttcaagacctccagattgtgcacacaaaagagcagccgtacaagcgatacgtgtgttccaattcctttagtcataatctgtacctccagggccatccgaagattcacatcggtgaaaaacctagaaaagagcacgggaacgggtttaactggtccagtaagctcaaggaccaccagagagtccacactggccaaaaaccctataagtgcaacatctgcggcaaaggattcaatcaccgcagcgttctcaatgtacaccagcgtgtccataccggcgagaagccttataagtgcgaggagtgtgacaaaggcttttctcgaagcagctatctgcaggcccatcagcgagttcatactggcgaaaagccttataagtgtgaggaatgcgggaagggtttttctcggaatagttatttgcagggccatcagagagtacataccggcgaaaagccctataagtgcgaagagtgcggtaagggcttttccagatcctctcatctacagggacatcagagagtacataccggcgagaaacctttcaagtgcgaggaatgcggcaaaggcttctcatggtctttcaacctgcagatccatcagagggtccacactggagagaaaccatataagtgcgaggaatgcggcaaaggattctcaaaggcttctaccctgctggcacatcagcgcgtgcacacaggggaaaagccttaccagtgcgacgaatgtggaaagtccttcagtcagagaagctacctccagtcccaccaatccgtccactctggcgagcgcccttatatttgcgaagtgtgtggcaagggattttctcaaagggcttatctgcagggccaccagcgagtccatacgagggttaagccatacaagtgcgaaatgtgtgggaaagggttcagtcaatcctcacgcttggaagctcatcgacgcgtgcataccgggggtaagccttacaagtgcgaagtctgcactaagggcttcagtgaatcatctagactacaggcacaccagcgcgtgcacgtggaaggcagaccttacaaatgtgagcaatgcggcaagggattttctggttacagcagtctgcaggctcaccatcgagttcacactggtgaaaaaccgtacaagtgcgaggtctgcgggaaaggtttcagccaaagatctaatttgcaggcccatcagagagttcacacgggagagaaaccatacaaatgtgacgcttgcggcaaagggttccggtggagctctggcttgctaatccatcagcgagttcactcatcagacaaattttacaagtccgaagactacggcaaagactatccttcatctgagaacctccaccgcaatgaggattctgtgcttttctag

SEQ ID NO: 37576 - DNA, 2742 bp, Artificial Sequence
  derived and/or modified sequence
ctgaccgtttgccaggaaatggtgacatttaaggacgtagcagtcgtgtttacggaagaggagctgggactcctcgattccgtccaacgtaaactgtatcgcgacgtgatgctcgagaacttcagaaatctgcttcttgttgcccatcagcctttcaagcccgaccttatcagtcagcttgagagagaagaaaaactgttaatggtagagaccgagactcctcgggatggctgtagcgggcgaaaaaatcagcaaaagatggagagcattcaggaagtgaccgtctcttacttcagtccaaaagagctgtcaagtaggcagacatggcagcagtctgccggtggacttattcgctgtcaggactttctgaaagtgtttcaggggaaaaactctcagctgcaagagcaggggaattcactcggccaggtttgggccggaatccctgtgcagatttcggaggataagaactatattttcacgcatataggcaacggctccaactatatcaaatcacaaggttacccgagctggagagcgcatcactcttggaggaagatgtacctcaaggagtcccataactaccaatgcaggtgtcagcagatctccatgaagaaccacttttgtaagtgtgattccgtgtcctggctgagtcaccataacgataagctggaggtacaccgcaaggagaactactcctgccacgactgcggagaggacattatgaaggtttcactgctgaatcaggaaagtatacagaccgaggagaagccctacccttgtacagggtaccgcaaggcctttagtaatgatagcagtagcgaagtccaccagcagttccacctagaaggaaagccatatacttattctagctgtggaaagggttgtaattactcatcgttgcttcatatccaccagaacattgaaagggaggacgacatcgaaaacagccacctgaagtcgtaccagcgagtccacacagaagagaaaccctgcaagtgtggcgaatatggggaaaatttcaatcactgtagtccgcttaacacctatgagcttatacatactggtgagatgtcctatagacacaacatctatgaaaaagcctttagtcactctctggacctaaatagcattttccgggtccacactcgagatgaaccccatgagtatgaggagaatgaaaacgtcttcaaccaatccagctgcctgcaagtccaccagaagatccacaccgaggagaagctgtacaccgatattgagtacggaaaaagcttcatctgtagctctaatctggacattcagcacagagttcacatggaggaaaattcctataattcagaagagtgcgggaacgggttcagcctggccagccatttccaggacttgcagatcgtgcacacaaaggagcagccctataaacgatatgtgtgctctaacagtttctcacataatctgtatctacagggacaccccaaaatccatatcggcgaaaagccaaggaaagagcacggtaacggatttaactggtctagtaaactcaaggatcaccagagggtccatacagggcagaagccatacaaatgtaacatatgtgggaaagggtttaatcatcggtcagtgttgaatgtgcatcagagggtgcatacaggcgagaaaccatacaagtgtgaggagtgcgataaggggttctccaggtcgagttacctgcaggcacaccagagggtccacaccggagagaaaccctataaatgtgaggaatgcgggaagggattttccaggaatagctacttgcaggggcaccagagagtgcatactggcgagaagccctacaagtgtgaggagtgtggaaagggattctctagatccagccacctccagggccaccagcgtgttcacacaggggaaaagcccttcaaatgcgaagaatgcggaaagggcttctcttggtcatttaacctccagatccaccagagagtgcatactggcgaaaagccctataaatgcgaagagtgtggcaagggcttttctaaagcgtcgacgttgcttgcacaccaacgtgtccacaccggtgagaaaccatatcagtgtgatgagtgcgggaagtctttttcacagcgcagctacctccaatctcatcaatccgtccacagtggggagagaccgtacatttgtgaagtgtgcggtaagggcttcagtcagcgggcttatttgcaaggtcaccagagggttcatactagagtgaaaccatacaagtgtgaaatgtgtgggaaaggcttctcccaatcttcaagacttgaggcacatcggagagttcacaccggaggaaagccgtataagtgtgaagtgtgcactaaggggttttcggagtcgtctcgcctgcaagctcatcaaagggtgcacgtggaggggagaccctataaatgtgagcagtgtggaaaggggttttccggttacagctctctgcaggcccaccacagagttcatacgggagaaaaaccttacaagtgcgaggtgtgcgggaaaggtttctcccaacgaagcaacctgcaggctcaccagagagtccataccggggagaaaccgtataaatgtgatgcctgtgggaagggttttagatggtctagcgggctgctgatccaccaacgcgttcatagctccgacaaattctacaagagtgaggattatggaaaagactacccaagttcagagaacttgcatcgcaatgaagactctgttctgttttag

SEQ ID NO: 37577 - DNA, 2793 bp, Artificial Sequence
  derived and/or modified sequence
atgggtttaggacctcgctctctcccttttagtcgaaagcgcaagcgcaaaatgacgaagtttcaagaaatggtgacgttcaaagacgtggccgtagtttttaccgaggaggagctgggacttttggacagtgtgcaacggaaactataccgcgatgtgatgcttgaaaattttaggaatctcctcctagttgctcatcagcccttcaagccagatttgatctcccaactagagcgggaggagaagctcttaatggtcgagaccgagacacccagagacggctgctccggccgtaaaaaccaacagaagatggaatccattcaggaggtgaccgtgtcttacttctctccgaaggagctgagcagccgccagacctggcagcaatccgctggagggctaataaggtgtcaggattttttgaaggtttttcagggcaaaaactctcaactccaggaacaggggaattctctcggacaggtctgggccggtatccccgttcagatctcagaagacaagaattacatctttacacacatagggaatggaagtaactacataaaatcacagggctatccgtcatggcgcgcacaccactcatggcgaaagatgtaccttaaggagtctcataactaccaatgccgatgtcagcagatctccatgaaaaatcacttctgcaagtgcgactcagttagctggctgtcacatcataacgacaagctagaagtacaccggaaagagaactacagctgtcatgattgtggggaggatattatgaaagtgtccttgctgaatcaggagagcatccagacggaggagaaaccctatccttgtaccggctataggaaagctttctcaaatgactcttccagcgaagtccatcagcagtttcatttagagggaaaaccctatacctattcatcatgcggaaaaggatgcaattactcatctctcttacatattcaccagaatatcgaaagggaggacgacatcgagaatagccatttgaaatcataccaaagagtgcatactgaggaaaaaccgtgcaagtgtggcgaatatggagaaaattttaaccactgcagcccactgaacacatacgaattaatacatacaggtgagatgagctatagacataacatatacgagaaggccttttcccatagtctcgacttgaacagcatttttagggttcatactagagacgagcctcacgaatacgaagagaacgagaacgttttcaaccagtcctcctgcctgcaggtgcaccaaaaaatccacaccgaggaaaaactttacacagacattgagtacggtaaatcgtttatttgctctagcaacttggatatccaacatcgggtgcatatggaggaaaacagctataattctgaggagtgtggtaatggcttcagtctcgcttctcattttcaggatttgcagatcgtgcatactaaggaacagccatataagcgttacgtctgttccaattcctttagccacaatttgtacctacaggggcacccaaagattcacatcggggagaaaccccgtaaggaacacgggaatggcttcaattggagcagcaaattgaaagatcatcagcgtgtgcatactggccaaaagccatacaaatgcaacatttgcggtaaagggttcaaccaccggagcgtgctgaatgtgcaccagagagtacataccggagagaaaccttacaagtgcgaggagtgtgacaaaggtttttctcggagctcctacttgcaggcccaccagcgggtccacacaggcgagaagccctacaaatgcgaggaatgtgggaagggattttctcggaattcatatctgcaggggcaccagcgcgttcacacgggcgagaagccatacaagtgcgaggaatgtggtaaggggttctcgaggtctagccatctacaggggcaccagcgagtgcacaccggggaaaagcccttcaaatgcgaggaatgtggaaagggcttcagttggtcattcaatctccagatacatcagcgcgtccacacaggcgaaaaaccatataagtgtgaggagtgcggtaagggattctccaaggcatcgacactcctcgcccatcagcgagtgcacactggagaaaaaccataccagtgcgacgaatgcggtaagtccttttctcagcgtagttacctgcaaagccatcaatcagtccactcaggggaaaggccatatatttgcgaagtttgcggaaagggattcagtcaaagggcctatctccagggccatcagcgggtgcatacccgcgtgaagccgtacaagtgtgagatgtgcgggaaagggttctctcaaagcagccggctggaagcccatcggagggtccataccggcggtaaaccttacaaatgtgaggtatgcaccaaaggcttttcagagtctagccggcttcaagcgcaccagagagtacatgtggaaggcaggccttacaagtgtgaacagtgtgggaaggggtttagcgggtattcgagcttacaggcccaccacagggtacatacaggcgagaaaccctataaatgcgaggtgtgcgggaagggattttctcagagatctaatcttcaagcccaccagagggtgcacactggggagaagccatataagtgcgatgcgtgtggaaagggctttcggtggtcttccggcctgctgatccaccagcgggttcacagttcggataagttttataagagcgaagactatggcaaagactatccgagtagtgagaatctccatcgcaatgaggatagtgtgttattctag

SEQ ID NO: 37578 - DNA, 2843 bp, Artificial Sequence
  derived and/or modified sequence
actggacgcacgctgcgggcgacattgtttgggacgctgggttctgcttttccagaatcctgccctttccaaaaggaagacggtatgattaagttccagatggtgacattcaaggatgttgctgtggtcttcactgaggaggagctggggctgctggactctgtccagaggaagctgtaccgagatgtgatgctggagaacttcaggaacctgctcttagtagcacatcagcccttcaagccagacctaatatcccagctggagagagaagaaaagcttttgatggtggagacagaaaccccaagagatggatgttcaggaaggaagaatcaacaaaagatggagagtattcaggaagtaacagtaagctacttttcccccaaagagctttcctcccgtcagacctggcaacaaagtgcaggtgggttaatcaggtgtcaagatttcctgaaagtttttcaagggaagaattctcagttgcaagaacaaggtaattccctcggccaggtttgggcaggaataccagttcagatttctgaagataagaactatatattcactcatatagggaatggctccaattatataaaaagtcaagggtatccatcttggagggcacatcattcttggaggaaaatgtatctgaaagagtcacataattatcagtgtagatgtcagcaaatttccatgaaaaatcatttctgtaagtgtgacagtgtcagttggctctcacatcacaatgataaactggaagtacacagaaaagaaaactacagctgccatgactgtggagaagatatcatgaaggtatcattacttaatcaggagtcaattcaaacagaggagaagccctatccatgtactgggtatagaaaagccttcagtaatgactccagctctgaggttcatcagcagttccacttggaagggaagccctatacatacagttcatgtggaaagggctgtaattatagttcacttcttcatattcatcaaaatattgagagagaagatgatattgagaattcacatctgaaatcctatcagagagtgcatacagaggagaaaccatgcaaatgtggtgaatatggtgagaacttcaatcactgttcccctcttaacacttatgaacttatccacacaggtgagatgtcctataggcacaacatttatgagaaagccttcagtcatagcttagaccttaatagtatttttagggtccatactagggatgaaccccatgaatatgaggaaaatgagaatgtctttaatcagagttcatgtcttcaagtccatcaaaaaatccacactgaagagaaactatacacagatatagagtatggaaagagtttcatttgtagttcaaatcttgacattcagcatagggttcatatggaagagaattcatataattctgaggagtgtggtaatggcttcagtctggcctcacattttcaggaccttcagatagtccacactaaggaacaaccatataaacgctatgtgtgtagtaacagcttcagccataatttatatcttcaaggtcatccaaaaattcacattggagagaaaccacgtaaggagcatgggaatggcttcaactggagctcaaaacttaaagatcatcagagagtccacactggacagaagccatacaaatgcaatatatgcggcaaaggtttcaatcatagatcagttctgaatgttcatcagagagtccacacaggagagaaaccttataaatgcgaggaatgtgataagggattcagtcggagttcatatcttcaagcccatcagagagtccacactggagaaaaaccttataaatgtgaggaatgtgggaaggggttcagtcgaaattcataccttcaaggccatcagagagttcacactggagaaaaaccatacaagtgtgaggagtgtgggaagggcttcagtcggagttcacaccttcaaggccatcagagagtccacactggagaaaaaccattcaaatgtgaggaatgtgggaaggggttcagttggagctttaatcttcaaattcatcagagggttcacacaggagaaaaaccctataaatgtgaagaatgtggtaaaggcttcagtaaggcctcaacacttttggcccatcagagggtccacacgggagagaagccataccaatgtgatgagtgtggtaagagtttcagtcagagatcataccttcagagtcatcagagtgtccattctggagaaagaccatatatatgtgaggtatgtggaaagggcttcagtcagagagcatatcttcaaggtcatcagagagtccacactagagtgaaaccgtataaatgtgagatgtgtgggaagggctttagtcagagttcgcgccttgaagcacatcggagggttcacacaggagggaaaccatacaaatgtgaggtgtgtacaaagggtttcagtgagagttcacgccttcaagcacaccaaagggttcatgtggaagggagaccctataaatgtgaacagtgtggtaagggtttcagtgggtattcaagtcttcaagcccatcacagagtccacacaggagagaaaccatacaaatgtgaggtatgtggaaagggcttcagtcagagatcaaatcttcaggctcaccagagagtccacacaggagagaaaccatacaaatgtgatgcatgtggtaagggtttccgttggagctcaggtcttctcattcatcaaagagtccatagtagtgataaattctataaaagcgaagactatggtaaggactacccttcatcagagaatctacacagaaatgaagattctgttttgttttgaagtcctcaaatgggagctga

SEQ ID NO: 37579 - DNA, 3735 bp, Artificial Sequence
  derived and/or modified sequence
gtagtccaggaggtctcggtaggcagagccacttccgccccaggtacgctaggccgcggccttcgttcctcccagaaaggtctctgcctttctctagaaaaagaaagagaaaaatgaccaaattccaggagatggtgacattcaaggatgttgctgtggtcttcactgaggaggagctggggctgctggactctgtccagaggaagctgtaccgagatgtgatgctggagaacttcaggaacctgctcttagtagcacatcagcccttcaagccagacctaatatcccagctggagagagaagaaaagcttttgatggtggagacagaaaccccaagagatggatgttcaggaaggaagaatcaacaaaagatggagagtattcaggaagtaacagtaagctacttttcccccaaagagctttcctcccgtcagacctggcaacaaagtgcaggtgggttaatcaggtgtcaagatttcctgaaagtttttcaagggaagaattctcagttgcaagaacaaggtaattccctcggccaggtttgggcaggaataccagttcagatttctgaagataagaactatatattcactcatatagggaatggctccaattatataaaaagtcaagggtatccatcttggagggcacatcattcttggaggaaaatgtatctgaaagagtcacataattatcagtgtagatgtcagcaaatttccatgaaaaatcatttctgtaagtgtgacagtgtcagttggctctcacatcacaatgataaactggaagtacacagaaaagaaaactacagctgccatgactgtggagaagatatcatgaaggtatcattacttaatcaggagtcaattcaaacagaggagaagccctatccatgtactgggtatagaaaagccttcagtaatgactccagctctgaggttcatcagcagttccacttggaagggaagccctatacatacagttcatgtggaaagggctgtaattatagttcacttcttcatattcatcaaaatattgagagagaagatgatattgagaattcacatctgaaatcctatcagagagtgcatacagaggagaaaccatgcaaatgtggtgaatatggtgagaacttcaatcactgttcccctcttaacacttatgaacttatccacacaggtgagatgtcctataggcacaacatttatgagaaagccttcagtcatagcttagaccttaatagtatttttagggtccatactagggatgaaccccatgaatatgaggaaaatgagaatgtctttaatcagagttcatgtcttcaagtccatcaaaaaatccacactgaagagaaactatacacagatatagagtatggaaagagtttcatttgtagttcaaatcttgacattcagcatagggttcatatggaagagaattcatataattctgaggagtgtggtaatggcttcagtctggcctcacattttcaggaccttcagatagtccacactaaggaacaaccatataaacgctatgtgtgtagtaacagcttcagccataatttatatcttcaaggtcatccaaaaattcacattggagagaaaccacgtaaggagcatgggaatggcttcaactggagctcaaaacttaaagatcatcagagagtccacactggacagaagccatacaaatgcaatatatgcggcaaaggtttcaatcatagatcagttctgaatgttcatcagagagtccacacaggagagaaaccttataaatgcgaggaatgtgataagggattcagtcggagttcatatcttcaagcccatcagagagtccacactggagaaaaaccttataaatgtgaggaatgtgggaaggggttcagtcgaaattcataccttcaaggccatcagagagttcacactggagaaaaaccatacaagtgtgaggagtgtgggaagggcttcagtcggagttcacaccttcaaggccatcagagagtccacactggagaaaaaccattcaaatgtgaggaatgtgggaaggggttcagttggagctttaatcttcaaattcatcagagggttcacacaggagaaaaaccctataaatgtgaagaatgtggtaaaggcttcagtaaggcctcaacacttttggcccatcagagggtccacacgggagagaagccataccaatgtgatgagtgtggtaagagtttcagtcagagatcataccttcagagtcatcagagtgtccattctggagaaagaccatatatatgtgaggtatgtggaaagggcttcagtcagagagcatatcttcaaggtcatcagagagtccacactagagtgaaaccgtataaatgtgagatgtgtgggaagggctttagtcagagttcgcgccttgaagcacatcggagggttcacacaggagggaaaccatacaaatgtgaggtgtgtacaaagggtttcagtgagagttcacgccttcaagcacaccaaagggttcatgtggaagggagaccctataaatgtgaacagtgtggtaagggtttcagtgggtattcaagtcttcaagcccatcacagagtccacacaggagagaaaccatacaaatgtgaggtatgtggaaagggcttcagtcagagatcaaatcttcaggctcaccagagagtccacacaggagagaaaccatacaaatgtgatgcatgtggtaagggtttccgttggagctcaggtcttctcattcatcaaagagtccatagtagtgataaattctataaaagcgaagactatggtaaggactacccttcatcagagaatctacacagaaatgaagattctgttttgttttgaagtcctcaaatgggagctgaaattttccagtcactagagttctttcagtagaaaaagaatttttaaaaattaaaatgtaatgttgctgcccaacttcaacattcataatggccaggagaccacacaacagagacatttaatgagaggggtttcacgagggattttgttagaactttaacatcagtcattgcacaggagctaaggcttataaaatatgagtatggtcaggaatttaataaaagtacagtgatgagcatgcctaaatccatgttctctagaatgtaagcttggtgaaagaagggactttgttcattgctagtctacaaaactaggacatttcataacgcaatgtaggtgctcagtactttttgctaaataactaaaagtatgtaaaggtaaaaggtttgaaatttttaagcgcattttttaaaacttaaaatgtatttggaggagaaatcctgcaagtaatcttaataaaatcatttcaagtaaatatttgaaatgtagaacaataagcattatgatgatctgaaataacattaatttgattgtaaccctattggggttagttcccaccctttgttccatcttgagcagagatgtgctgcatttcttaacgtttggtctctatacattataccatctgctgaagtttagctttgtgtgtgtgtatatgtacccatgtgtgcacttgaaatatcagtacaaactgataaacaatgtttctggttaatgttgcaaaaatggaacactgtattttacataattgattttctactcctgccctgtgaattaaggcagagttttactgtaatatttgcaagtatccaaaatggttactgatgacaaatactttttaataaatgtcaaaatcacaata

SEQ ID NO: 37580 - DNA, 3686 bp, Artificial Sequence
  derived and/or modified sequence
gtagtccaggaggtctcggtaggcagagccacttccgccccaggtacgctaggccgcggccttcgttcctcccagaaaggagatggtgacattcaaggatgttgctgtggtcttcactgaggaggagctggggctgctggactctgtccagaggaagctgtaccgagatgtgatgctggagaacttcaggaacctgctcttagtagcacatcagcccttcaagccagacctaatatcccagctggagagagaagaaaagcttttgatggtggagacagaaaccccaagagatggatgttcaggaaggaagaatcaacaaaagatggagagtattcaggaagtaacagtaagctacttttcccccaaagagctttcctcccgtcagacctggcaacaaagtgcaggtgggttaatcaggtgtcaagatttcctgaaagtttttcaagggaagaattctcagttgcaagaacaaggtaattccctcggccaggtttgggcaggaataccagttcagatttctgaagataagaactatatattcactcatatagggaatggctccaattatataaaaagtcaagggtatccatcttggagggcacatcattcttggaggaaaatgtatctgaaagagtcacataattatcagtgtagatgtcagcaaatttccatgaaaaatcatttctgtaagtgtgacagtgtcagttggctctcacatcacaatgataaactggaagtacacagaaaagaaaactacagctgccatgactgtggagaagatatcatgaaggtatcattacttaatcaggagtcaattcaaacagaggagaagccctatccatgtactgggtatagaaaagccttcagtaatgactccagctctgaggttcatcagcagttccacttggaagggaagccctatacatacagttcatgtggaaagggctgtaattatagttcacttcttcatattcatcaaaatattgagagagaagatgatattgagaattcacatctgaaatcctatcagagagtgcatacagaggagaaaccatgcaaatgtggtgaatatggtgagaacttcaatcactgttcccctcttaacacttatgaacttatccacacaggtgagatgtcctataggcacaacatttatgagaaagccttcagtcatagcttagaccttaatagtatttttagggtccatactagggatgaaccccatgaatatgaggaaaatgagaatgtctttaatcagagttcatgtcttcaagtccatcaaaaaatccacactgaagagaaactatacacagatatagagtatggaaagagtttcatttgtagttcaaatcttgacattcagcatagggttcatatggaagagaattcatataattctgaggagtgtggtaatggcttcagtctggcctcacattttcaggaccttcagatagtccacactaaggaacaaccatataaacgctatgtgtgtagtaacagcttcagccataatttatatcttcaaggtcatccaaaaattcacattggagagaaaccacgtaaggagcatgggaatggcttcaactggagctcaaaacttaaagatcatcagagagtccacactggacagaagccatacaaatgcaatatatgcggcaaaggtttcaatcatagatcagttctgaatgttcatcagagagtccacacaggagagaaaccttataaatgcgaggaatgtgataagggattcagtcggagttcatatcttcaagcccatcagagagtccacactggagaaaaaccttataaatgtgaggaatgtgggaaggggttcagtcgaaattcataccttcaaggccatcagagagttcacactggagaaaaaccatacaagtgtgaggagtgtgggaagggcttcagtcggagttcacaccttcaaggccatcagagagtccacactggagaaaaaccattcaaatgtgaggaatgtgggaaggggttcagttggagctttaatcttcaaattcatcagagggttcacacaggagaaaaaccctataaatgtgaagaatgtggtaaaggcttcagtaaggcctcaacacttttggcccatcagagggtccacacgggagagaagccataccaatgtgatgagtgtggtaagagtttcagtcagagatcataccttcagagtcatcagagtgtccattctggagaaagaccatatatatgtgaggtatgtggaaagggcttcagtcagagagcatatcttcaaggtcatcagagagtccacactagagtgaaaccgtataaatgtgagatgtgtgggaagggctttagtcagagttcgcgccttgaagcacatcggagggttcacacaggagggaaaccatacaaatgtgaggtgtgtacaaagggtttcagtgagagttcacgccttcaagcacaccaaagggttcatgtggaagggagaccctataaatgtgaacagtgtggtaagggtttcagtgggtattcaagtcttcaagcccatcacagagtccacacaggagagaaaccatacaaatgtgaggtatgtggaaagggcttcagtcagagatcaaatcttcaggctcaccagagagtccacacaggagagaaaccatacaaatgtgatgcatgtggtaagggtttccgttggagctcaggtcttctcattcatcaaagagtccatagtagtgataaattctataaaagcgaagactatggtaaggactacccttcatcagagaatctacacagaaatgaagattctgttttgttttgaagtcctcaaatgggagctgaaattttccagtcactagagttctttcagtagaaaaagaatttttaaaaattaaaatgtaatgttgctgcccaacttcaacattcataatggccaggagaccacacaacagagacatttaatgagaggggtttcacgagggattttgttagaactttaacatcagtcattgcacaggagctaaggcttataaaatatgagtatggtcaggaatttaataaaagtacagtgatgagcatgcctaaatccatgttctctagaatgtaagcttggtgaaagaagggactttgttcattgctagtctacaaaactaggacatttcataacgcaatgtaggtgctcagtactttttgctaaataactaaaagtatgtaaaggtaaaaggtttgaaatttttaagcgcattttttaaaacttaaaatgtatttggaggagaaatcctgcaagtaatcttaataaaatcatttcaagtaaatatttgaaatgtagaacaataagcattatgatgatctgaaataacattaatttgattgtaaccctattggggttagttcccaccctttgttccatcttgagcagagatgtgctgcatttcttaacgtttggtctctatacattataccatctgctgaagtttagctttgtgtgtgtgtatatgtacccatgtgtgcacttgaaatatcagtacaaactgataaacaatgtttctggttaatgttgcaaaaatggaacactgtattttacataattgattttctactcctgccctgtgaattaaggcagagttttactgtaatatttgcaagtatccaaaatggttactgatgacaaatactttttaataaatgtcaaaatcacaata

SEQ ID NO: 37581 - DNA, 3622 bp, Artificial Sequence
  derived and/or modified sequence
cttactgtgtgccaggagatggtgacattcaaggatgttgctgtggtcttcactgaggaggagctggggctgctggactctgtccagaggaagctgtaccgagatgtgatgctggagaacttcaggaacctgctcttagtagcacatcagcccttcaagccagacctaatatcccagctggagagagaagaaaagcttttgatggtggagacagaaaccccaagagatggatgttcaggaaggaagaatcaacaaaagatggagagtattcaggaagtaacagtaagctacttttcccccaaagagctttcctcccgtcagacctggcaacaaagtgcaggtgggttaatcaggtgtcaagatttcctgaaagtttttcaagggaagaattctcagttgcaagaacaaggtaattccctcggccaggtttgggcaggaataccagttcagatttctgaagataagaactatatattcactcatatagggaatggctccaattatataaaaagtcaagggtatccatcttggagggcacatcattcttggaggaaaatgtatctgaaagagtcacataattatcagtgtagatgtcagcaaatttccatgaaaaatcatttctgtaagtgtgacagtgtcagttggctctcacatcacaatgataaactggaagtacacagaaaagaaaactacagctgccatgactgtggagaagatatcatgaaggtatcattacttaatcaggagtcaattcaaacagaggagaagccctatccatgtactgggtatagaaaagccttcagtaatgactccagctctgaggttcatcagcagttccacttggaagggaagccctatacatacagttcatgtggaaagggctgtaattatagttcacttcttcatattcatcaaaatattgagagagaagatgatattgagaattcacatctgaaatcctatcagagagtgcatacagaggagaaaccatgcaaatgtggtgaatatggtgagaacttcaatcactgttcccctcttaacacttatgaacttatccacacaggtgagatgtcctataggcacaacatttatgagaaagccttcagtcatagcttagaccttaatagtatttttagggtccatactagggatgaaccccatgaatatgaggaaaatgagaatgtctttaatcagagttcatgtcttcaagtccatcaaaaaatccacactgaagagaaactatacacagatatagagtatggaaagagtttcatttgtagttcaaatcttgacattcagcatagggttcatatggaagagaattcatataattctgaggagtgtggtaatggcttcagtctggcctcacattttcaggaccttcagatagtccacactaaggaacaaccatataaacgctatgtgtgtagtaacagcttcagccataatttatatcttcaaggtcatccaaaaattcacattggagagaaaccacgtaaggagcatgggaatggcttcaactggagctcaaaacttaaagatcatcagagagtccacactggacagaagccatacaaatgcaatatatgcggcaaaggtttcaatcatagatcagttctgaatgttcatcagagagtccacacaggagagaaaccttataaatgcgaggaatgtgataagggattcagtcggagttcatatcttcaagcccatcagagagtccacactggagaaaaaccttataaatgtgaggaatgtgggaaggggttcagtcgaaattcataccttcaaggccatcagagagttcacactggagaaaaaccatacaagtgtgaggagtgtgggaagggcttcagtcggagttcacaccttcaaggccatcagagagtccacactggagaaaaaccattcaaatgtgaggaatgtgggaaggggttcagttggagctttaatcttcaaattcatcagagggttcacacaggagaaaaaccctataaatgtgaagaatgtggtaaaggcttcagtaaggcctcaacacttttggcccatcagagggtccacacgggagagaagccataccaatgtgatgagtgtggtaagagtttcagtcagagatcataccttcagagtcatcagagtgtccattctggagaaagaccatatatatgtgaggtatgtggaaagggcttcagtcagagagcatatcttcaaggtcatcagagagtccacactagagtgaaaccgtataaatgtgagatgtgtgggaagggctttagtcagagttcgcgccttgaagcacatcggagggttcacacaggagggaaaccatacaaatgtgaggtgtgtacaaagggtttcagtgagagttcacgccttcaagcacaccaaagggttcatgtggaagggagaccctataaatgtgaacagtgtggtaagggtttcagtgggtattcaagtcttcaagcccatcacagagtccacacaggagagaaaccatacaaatgtgaggtatgtggaaagggcttcagtcagagatcaaatcttcaggctcaccagagagtccacacaggagagaaaccatacaaatgtgatgcatgtggtaagggtttccgttggagctcaggtcttctcattcatcaaagagtccatagtagtgataaattctataaaagcgaagactatggtaaggactacccttcatcagagaatctacacagaaatgaagattctgttttgttttgaagtcctcaaatgggagctgaaattttccagtcactagagttctttcagtagaaaaagaatttttaaaaattaaaatgtaatgttgctgcccaacttcaacattcataatggccaggagaccacacaacagagacatttaatgagaggggtttcacgagggattttgttagaactttaacatcagtcattgcacaggagctaaggcttataaaatatgagtatggtcaggaatttaataaaagtacagtgatgagcatgcctaaatccatgttctctagaatgtaagcttggtgaaagaagggactttgttcattgctagtctacaaaactaggacatttcataacgcaatgtaggtgctcagtactttttgctaaataactaaaagtatgtaaaggtaaaaggtttgaaatttttaagcgcattttttaaaacttaaaatgtatttggaggagaaatcctgcaagtaatcttaataaaatcatttcaagtaaatatttgaaatgtagaacaataagcattatgatgatctgaaataacattaatttgattgtaaccctattggggttagttcccaccctttgttccatcttgagcagagatgtgctgcatttcttaacgtttggtctctatacattataccatctgctgaagtttagctttgtgtgtgtgtatatgtacccatgtgtgcacttgaaatatcagtacaaactgataaacaatgtttctggttaatgttgcaaaaatggaacactgtattttacataattgattttctactcctgccctgtgaattaaggcagagttttactgtaatatttgcaagtatccaaaatggttactgatgacaaatactttttaataaatgtcaaaatcacaata

SEQ ID NO: 37582 - DNA, 3174 bp, Artificial Sequence
  derived and/or modified sequence
gaaagtgaggtcatcattcctttcaggaagttgagtgaggcctgagacagcaatgtttcgtttagcctggcggcggccctccttatcttcaagaagagcatccgcggctagcagtggaagatggggttgggccccaggtctctgcctttctctagaaaaagaaagagaaaaatgaccaaattccaggagatggtgacattcaaggatgttgctgtggtcttcactgaggaggagctggggctgctggactctgtccagaggaagctgtaccgagatgtgatgctggagaacttcaggaacctgctcttagtagcacatcagcccttcaagccagacctaatatcccagctggagagagaagaaaagcttttgatggtggagacagaaaccccaagagatggatgttcaggaaggaagaatcaacaaaagatggagagtattcaggaagtaacagtaagctacttttcccccaaagagctttcctcccgtcagacctggcaacaaagtgcaggtgggttaatcaggtgtcaagatttcctgaaagtttttcaagggaagaattctcagttgcaagaacaaggtaattccctcggccaggtttgggcaggaataccagttcagatttctgaagataagaactatatattcactcatatagggaatggctccaattatataaaaagtcaagggtatccatcttggagggcacatcattcttggaggaaaatgtatctgaaagagtcacataattatcagtgtagatgtcagcaaatttccatgaaaaatcatttctgtaagtgtgacagtgtcagttggctctcacatcacaatgataaactggaagtacacagaaaagaaaactacagctgccatgactgtggagaagatatcatgaaggtatcattacttaatcaggagtcaattcaaacagaggagaagccctatccatgtactgggtatagaaaagccttcagtaatgactccagctctgaggttcatcagcagttccacttggaagggaagccctatacatacagttcatgtggaaagggctgtaattatagttcacttcttcatattcatcaaaatattgagagagaagatgatattgagaattcacatctgaaatcctatcagagagtgcatacagaggagaaaccatgcaaatgtggtgaatatggtgagaacttcaatcactgttcccctcttaacacttatgaacttatccacacaggtgagatgtcctataggcacaacatttatgagaaagccttcagtcatagcttagaccttaatagtatttttagggtccatactagggatgaaccccatgaatatgaggaaaatgagaatgtctttaatcagagttcatgtcttcaagtccatcaaaaaatccacactgaagagaaactatacacagatatagagtatggaaagagtttcatttgtagttcaaatcttgacattcagcatagggttcatatggaagagaattcatataattctgaggagtgtggtaatggcttcagtctggcctcacattttcaggaccttcagatagtccacactaaggaacaaccatataaacgctatgtgtgtagtaacagcttcagccataatttatatcttcaaggtcatccaaaaattcacattggagagaaaccacgtaaggagcatgggaatggcttcaactggagctcaaaacttaaagatcatcagagagtccacactggacagaagccatacaaatgcaatatatgcggcaaaggtttcaatcatagatcagttctgaatgttcatcagagagtccacacaggagagaaaccttataaatgcgaggaatgtgataagggattcagtcggagttcatatcttcaagcccatcagagagtccacactggagaaaaaccttataaatgtgaggaatgtgggaaggggttcagtcgaaattcataccttcaaggccatcagagagttcacactggagaaaaaccatacaagtgtgaggagtgtgggaagggcttcagtcggagttcacaccttcaaggccatcagagagtccacactggagaaaaaccattcaaatgtgaggaatgtgggaaggggttcagttggagctttaatcttcaaattcatcagagggttcacacaggagaaaaaccctataaatgtgaagaatgtggtaaaggcttcagtaaggcctcaacacttttggcccatcagagggtccacacgggagagaagccataccaatgtgatgagtgtggtaagagtttcagtcagagatcataccttcagagtcatcagagtgtccattctggagaaagaccatatatatgtgaggtatgtggaaagggcttcagtcagagagcatatcttcaaggtcatcagagagtccacactagagtgaaaccgtataaatgtgagatgtgtgggaagggctttagtcagagttcgcgccttgaagcacatcggagggttcacacaggagggaaaccatacaaatgtgaggtgtgtacaaagggtttcagtgagagttcacgccttcaagcacaccaaagggttcatgtggaagggagaccctataaatgtgaacagtgtggtaagggtttcagtgggtattcaagtcttcaagcccatcacagagtccacacaggagagaaaccatacaaatgtgaggtatgtggaaagggcttcagtcagagatcaaatcttcaggctcaccagagagtccacacaggagagaaaccatacaaatgtgatgcatgtggtaagggtttccgttggagctcaggtcttctcattcatcaaagagtccatagtagtgataaattctataaaagcgaagactatggtaaggactacccttcatcagagaatctacacagaaatgaagattctgttttgttttgaagtcctcaaatgggagctgaaattttccagtcactagagttctttcagtagaaaaagaatttttaaaaattaaaatgtaatgttgctgcccaacttcaacattcataatggccaggagaccacacaacagagacatttaatgagaggggtttcacgagggattttgttagaactttaacatcagtcattgcacaggagctaaggcttataaaatatgagtatggtcaggaatttaataaaagtacagtgatgagcatgcct

SEQ ID NO: 37583 - protein, 95 aa, Artificial Sequence
  derived and/or modified sequence
MERMLPLLALGLLAAGFCPAVLCHPNSPLDEENLTQENQDRGTHVDLGLASANVDFAFSLYKHPHRWSIRLCLMYLRRAQKHLLPQQSKSPSFLH

SEQ ID NO: 37584 - protein, 423 aa, Artificial Sequence
  derived and/or modified sequence
MERMLPLLALGLLAAGFCPAVLCHPNSPLDEENLTQENQDRGTHVDLGLASANVDFAFSLYKQLVLKAPDKNVIFSPLSISTALAFLSLGAHNTTLTEILKGLKFNLTETSEAEIHQSFQHLLRTLNQSSDELQLSMGNAMFVKEQLSLLDRFTEDAKRLYGSEAFATDFQDSAAAKKLINDYVKNGTRGKITDLIKDLDSQTMMVLVNYIFFKAKWEMPFDPQDTHQSRFYLSKKKWVMVPMMSLHHLTIPYFRDEELSCTVVELKYTGNASALFILPDQDKMEEVEAMLLPETLKRWRDSLEFREIGELYLPKFSISRDYNLNDILLQLGIEEAFTSKADLSGITGARNLAVSQVVHKAVLDVFEEGTEASAATAVKITLLSALVETRTIVRFNRPFLMIIVPTDTQNIFFMSKVTNPKQA

SEQ ID NO: 37585 - protein, 448 aa, Artificial Sequence
  derived and/or modified sequence
MKIHYSRQTALESTSYIQLPEAELRMERMLPLLALGLLAAGFCPAVLCHPNSPLDEENLTQENQDRGTHVDLGLASANVDFAFSLYKQLVLKAPDKNVIFSPLSISTALAFLSLGAHNTTLTEILKGLKFNLTETSEAEIHQSFQHLLRTLNQSSDELQLSMGNAMFVKEQLSLLDRFTEDAKRLYGSEAFATDFQDSAAAKKLINDYVKNGTRGKITDLIKDLDSQTMMVLVNYIFFKAKWEMPFDPQDTHQSRFYLSKKKWVMVPMMSLHHLTIPYFRDEELSCTVVELKYTGNASALFILPDQDKMEEVEAMLLPETLKRWRDSLEFREIGELYLPKFSISRDYNLNDILLQLGIEEAFTSKADLSGITGARNLAVSQVVHKAVLDVFEEGTEASAATAVKITLLSALVETRTIVRFNRPFLMIIVPTDTQNIFFMSKVTNPKQA

SEQ ID NO: 37586 - protein, 305 aa, Artificial Sequence
  derived and/or modified sequence
MERMLPLLALGLLAAGFCPAVLCHPNSPLDEENLTQENQDRGTHVDLGLASANVDFAFSLYKQLVLKAPDKNVIFSPLSISTALAFLSLGAHNTTLTEILKGLKFNLTETSEAEIHQSFQHLLRTLNQSSDELQLSMGNAMFVKEQLSLLDRFTEDAKRLYGSEAFATDFQDSAAAKKLINDYVKNGTRGKITDLIKDLDSQTMMVLVNYIFFKAKWEMPFDPQDTHQSRFYLSKKKWVMVPMMSLHHLTIPYFRDEELSCTVVELKYTGNASALFILPDQDKMEEVEAMLLPETLKRWRDSLEF

SEQ ID NO: 37587 - protein, 725 aa, Artificial Sequence
  derived and/or modified sequence
MESGRGSSTPPGPIAALGMPDTGPGSSSLGKLQALPVGPRAHCGDPVSLAAAGDGSPDIGPTGELSGSLKIPNRDSGIDSPSSSVAGENFPCEEGLEAGPSPTVLGAHAEMALDSQVPKVTPQEEADSDVGEEPDSENTPQKADKDAGLAQHSGPQKLLHIAQELLHTEETYVKRLHLLDQVFCTRLTDAGIPPEVIMGIFSNISSIHRFHGQFLLPELKTRITEEWDTNPRLGDILQKLAPFLKMYGEYVKNFDRAVGLVSTWTQRSPLFKDVVHSIQKQEVCGNLTLQHHMLEPVQRVPRYELLLKDYLKRLPQDAPDRKDAERSLELISTAANHSNAAIRKVEKMHKLLEVYEQLGGEEDIVNPANELIKEGQIQKLSAKNGTPQDRHLFLFNSMILYCVPKLRLMGQKFSVREKMDISGLQVQDIVKPNTAHTFIITGRKRSLELQTRTEEEKKEWIQIIQATIEKHKQNSETFKAFGGAFSQDEDPSLSPDMPITSTSPVEPVVTTEGSSGAAGLEPRKLSSKTRRDKEKQSCKSCGETFNSITKRRHHCKLCGAVICGKCSEFKAENSRQSRVCRDCFLTQPVAPESTEKTPTADPQPSLLCGPLRLSESGETWSEVWAAIPMSDPQVLHLQGGSQDGRLPRTIPLPSCKLSVPDPEERLDSGHVWKLQWAKQSWYLSASSAELQQQWLETLSTAAHGDTAQDSPGALQLQVPMGAAAP

SEQ ID NO: 37588 - protein, 328 aa, Artificial Sequence
  derived and/or modified sequence
MILYCVPKLRLMGQKFSVREKMDISGLQVQDIVKPNTAHTFIITGRKRSLELQTRTEEEKKEWIQIIQATIEKHKQNSETFKAFGGAFSQDEDPSLSPDMPITSTSPVEPVVTTEGSSGAAGLEPRKLSSKTRRDKEKQSCKSCGETFNSITKRRHHCKLCGAVICGKCSEFKAENSRQSRVCRDCFLTQPVAPESTEKTPTADPQPSLLCGPLRLSESGETWSEVWAAIPMSDPQVLHLQGGSQDGRLPRTIPLPSCKLSVPDPEERLDSGHVWKLQWAKQSWYLSASSAELQQQWLETLSTAAHGDTAQDSPGALQLQVPMGAAAP

SEQ ID NO: 37589 - DNA, 3303 bp, Artificial Sequence
  derived and/or modified sequence
gagcactcaggagactgtgtgtggtgggggtgctccaccatagagctggtcggcatccacagccaccaggacgctgccagagcccaggcctgcgccacgccctgcccagaggcacacctgcctgctcaaggcaaccagggcaggctcaaggcagccagggccagctcactgtgtgcctgtcactgtgtgaagcctgcttcttctttatttcgcttagcaagtgaggcaggagcatgtaaagctgctggcagaggaatatctaatttacctcctaaatggctctactttgaacctgctgggcaaggaagagattttcaaggaaaccatctaccgtgtgcaagctcctgccggccaaccccagaccccagcacggagccaggcgcctgtgcccgccgaccctcagcatcctcctcagaaaggctggtggcatcaggaagcccctggccagcctccacctgagcccagtgagctcagctttaaggatggagtcaggcagggggtcctcaacccctccaggacccattgctgccctagggatgccagacactgggcctggcagttcctccctagggaagcttcaggcgctccctgttgggcccagagcccactgtggggaccctgtcagcctggctgcagcaggggacggctctccagacataggccccacgggagagctgagtggtagcttaaagatccccaaccgggacagcgggatcgacagtccctcctccagtgtggctggagagaactttccctgcgaggagggcttggaggctggcccaagccccactgtactgggggcgcacgcagagatggccctggacagccaggtcccgaaggtcaccccccaggaggaggcggacagcgacgtgggtgaggaacctgactctgagaacaccccccagaaggctgacaaggatgccggcctggcccagcactctggcccccagaagcttctccacattgcccaggagctcctgcacaccgaggagacctatgtgaagcggctgcacctgctggaccaggttttctgcaccaggctgacggatgcggggatccctccagaagtcatcatgggcatattctctaacatctcctccatccaccgcttccacgggcagttcctgctgccggagctgaagacgcggatcacggaggagtgggacacaaacccacggctcggggacatcctgcagaagctggccccattcctgaagatgtacggcgagtatgtcaagaactttgaccgagccgtagggctggtgagcacgtggacccagcgctccccactgtttaaagacgtcgtccacagcatccagaagcaggaggtatgcgggaacctgacgctgcagcaccacatgctggagcccgtgcagagggtcccccggtacgagctgctgctcaaggactatctgaagaggctcccgcaggacgccccagaccggaaggatgcggagaggtccttggagctcatctccacagccgccaaccactccaatgctgccattcggaaagtggagaaaatgcacaagctcttggaggtgtacgagcagctgggtggggaagaagacattgtcaacccggccaatgaactgatcaaggagggccaaatccagaaactgtcagccaagaacggcaccccccaggaccgccacctcttcctgttcaacagcatgatcctttactgtgtgcccaagctgcggctcatgggccagaagttcagcgtccgggagaagatggacatctcaggcctccaggtgcaggatatcgtcaagccaaacacagcacatacattcatcataacaggaagaaaaaggtccctggagctgcagacgcggacagaggaagagaagaaagaatggattcagatcatccaggccaccatcgagaagcacaaacagaacagcgaaaccttcaaggcttttggtggcgccttcagccaggatgaggaccccagcctctctccagacatgcctatcacgagcaccagccctgtggagcctgtggtgaccaccgaaggcagttcgggtgcagcagggctcgagcccagaaaactatcctctaagaccagacgtgacaaggagaagcagagctgtaagagctgtggtgagaccttcaactccatcaccaagaggaggcatcactgcaagctgtgtggggcggtcatctgtgggaagtgctccgagttcaaggccgagaacagccggcagagccgtgtctgcagagattgtttcctgacacagccagtggcccctgagagcacagagaagacacccactgcagacccccagcccagcctgctctgcggccccctgcggctgtcagagagcggtgagacctggagcgaggtgtgggccgccatccccatgtcagatccccaggtgctgcacctgcagggaggcagccaggacggccggctgccccgcaccatccctctccccagctgcaaactgagtgtgccggaccctgaggagaggctggactcggggcatgtgtggaagctgcagtgggccaagcagtcctggtacctgagcgcctcctccgcagagctgcagcagcagtggctggaaaccctaagcactgctgcccatggggacacggcccaggacagcccgggggccctgcagcttcaggtccctatgggcgcagctgctccgtgagctgagtctcccactgccctgcacaccaccacattggacctgtgctgtcctgggaggtggtgttggaggccccatgaagagcgccctggactgctgagggtgggccaacagcccagagctcaggacacttggctttggggggaaggaaactgaggcccagagaggggcaaccactggccaagggtcacccagcaagttttggctaagagcctggcctccagccccagcagtgtggcccagagcaggggccgactgccaaagtaaccatcatccatatgggccgtgtggtgatgctggcccggaaggcagaaagaggcagcatgggcactgccagggacagccacatcctgctggtctgcagcgtggtccaccccgcctctgcccagcctgtctacaccgtgtgagctgaatcgtgacttgcttcccacctcctttctctgtcctctcctgaggttctgcctgcagcccccaggaggtgggcctgccccatcctagctggactcatggttcctaaataaccacgctcagaagctctgctaggacttaccccagccactgagtggcaggcgcatgagatttgtggctgttcctgatgctagtggcacacagtgcttatctgcataaataaacactggccaccagc

SEQ ID NO: 37590 - DNA, 3321 bp, Artificial Sequence
  derived and/or modified sequence
tgcctgtgggtgccgcggaccttcggggcgggccagggaggcgggaccgctcctcagaaccccaggggcttcagtcctgggctgattggcgcgggaagcacagcccggccctccaggtccccaaggagaccccagcctcctgctgcccactgtgagcgacctccccggggctcctctggaagcggctccggcaagtatcgagtttgcctgtgcggagctgggggagcctccggctttcctgtttgctttgttaattattttcgtccccagaggaaggcgtacctcctaaatggctctactttgaacctgctgggcaaggaagagattttcaaggaaaccatctaccgtgtgcaagctcctgccggccaaccccagaccccagcacggagccaggcgcctgtgcccgccgaccctcagcatcctcctcagaaaggctggtggcatcaggaagcccctggccagcctccacctgagcccagtgagctcagctttaaggatggagtcaggcagggggtcctcaacccctccaggacccattgctgccctagggatgccagacactgggcctggcagttcctccctagggaagcttcaggcgctccctgttgggcccagagcccactgtggggaccctgtcagcctggctgcagcaggggacggctctccagacataggccccacgggagagctgagtggtagcttaaagatccccaaccgggacagcgggatcgacagtccctcctccagtgtggctggagagaactttccctgcgaggagggcttggaggctggcccaagccccactgtactgggggcgcacgcagagatggccctggacagccaggtcccgaaggtcaccccccaggaggaggcggacagcgacgtgggtgaggaacctgactctgagaacaccccccagaaggctgacaaggatgccggcctggcccagcactctggcccccagaagcttctccacattgcccaggagctcctgcacaccgaggagacctatgtgaagcggctgcacctgctggaccaggttttctgcaccaggctgacggatgcggggatccctccagaagtcatcatgggcatattctctaacatctcctccatccaccgcttccacgggcagttcctgctgccggagctgaagacgcggatcacggaggagtgggacacaaacccacggctcggggacatcctgcagaagctggccccattcctgaagatgtacggcgagtatgtcaagaactttgaccgagccgtagggctggtgagcacgtggacccagcgctccccactgtttaaagacgtcgtccacagcatccagaagcaggaggtatgcgggaacctgacgctgcagcaccacatgctggagcccgtgcagagggtcccccggtacgagctgctgctcaaggactatctgaagaggctcccgcaggacgccccagaccggaaggatgcggagaggtccttggagctcatctccacagccgccaaccactccaatgctgccattcggaaagtggagaaaatgcacaagctcttggaggtgtacgagcagctgggtggggaagaagacattgtcaacccggccaatgaactgatcaaggagggccaaatccagaaactgtcagccaagaacggcaccccccaggaccgccacctcttcctgttcaacagcatgatcctttactgtgtgcccaagctgcggctcatgggccagaagttcagcgtccgggagaagatggacatctcaggcctccaggtgcaggatatcgtcaagccaaacacagcacatacattcatcataacaggaagaaaaaggtccctggagctgcagacgcggacagaggaagagaagaaagaatggattcagatcatccaggccaccatcgagaagcacaaacagaacagcgaaaccttcaaggcttttggtggcgccttcagccaggatgaggaccccagcctctctccagacatgcctatcacgagcaccagccctgtggagcctgtggtgaccaccgaaggcagttcgggtgcagcagggctcgagcccagaaaactatcctctaagaccagacgtgacaaggagaagcagagctgtaagagctgtggtgagaccttcaactccatcaccaagaggaggcatcactgcaagctgtgtggggcggtcatctgtgggaagtgctccgagttcaaggccgagaacagccggcagagccgtgtctgcagagattgtttcctgacacagccagtggcccctgagagcacagagaagacacccactgcagacccccagcccagcctgctctgcggccccctgcggctgtcagagagcggtgagacctggagcgaggtgtgggccgccatccccatgtcagatccccaggtgctgcacctgcagggaggcagccaggacggccggctgccccgcaccatccctctccccagctgcaaactgagtgtgccggaccctgaggagaggctggactcggggcatgtgtggaagctgcagtgggccaagcagtcctggtacctgagcgcctcctccgcagagctgcagcagcagtggctggaaaccctaagcactgctgcccatggggacacggcccaggacagcccgggggccctgcagcttcaggtccctatgggcgcagctgctccgtgagctgagtctcccactgccctgcacaccaccacattggacctgtgctgtcctgggaggtggtgttggaggccccatgaagagcgccctggactgctgagggtgggccaacagcccagagctcaggacacttggctttggggggaaggaaactgaggcccagagaggggcaaccactggccaagggtcacccagcaagttttggctaagagcctggcctccagccccagcagtgtggcccagagcaggggccgactgccaaagtaaccatcatccatatgggccgtgtggtgatgctggcccggaaggcagaaagaggcagcatgggcactgccagggacagccacatcctgctggtctgcagcgtggtccaccccgcctctgcccagcctgtctacaccgtgtgagctgaatcgtgacttgcttcccacctcctttctctgtcctctcctgaggttctgcctgcagcccccaggaggtgggcctgccccatcctagctggactcatggttcctaaataaccacgctcagaagctctgctaggacttaccccagccactgagtggcaggcgcatgagatttgtggctgttcctgatgctagtggcacacagtgcttatctgcataaataaacactggccaccagcagtg

SEQ ID NO: 37591 - DNA, 1342 bp, Artificial Sequence
  derived and/or modified sequence
aaatgtcacatcaatgccatgagatgagtctggctcctttagctcaccatgtgggtttgagagattcatccatgttggtgaatgtatcagtagctcattcaaaagatttggtttggctggacgtggtggctcatacctgtaatcccagcactttgggaggctgagttcaacagcatgatcctttactgtgtgcccaagctgcggctcatgggccagaagttcagcgtccgggagaagatggacatctcaggcctccaggtgcaggatatcgtcaagccaaacacagcacatacattcatcataacaggaagaaaaaggtccctggagctgcagacgcggacagaggaagagaagaaagaatggattcagatcatccaggccaccatcgagaagcacaaacagaacagcgaaaccttcaaggcttttggtggcgccttcagccaggatgaggaccccagcctctctccagacatgcctatcacgagcaccagccctgtggagcctgtggtgaccaccgaaggcagttcgggtgcagcagggctcgagcccagaaaactatcctctaagaccagacgtgacaaggagaagcagagctgtaagagctgtggtgagaccttcaactccatcaccaagaggaggcatcactgcaagctgtgtggggcggtcatctgtgggaagtgctccgagttcaaggccgagaacagccggcagagccgtgtctgcagagattgtttcctgacacagccagtggcccctgagagcacagagaagacacccactgcagacccccagcccagcctgctctgcggccccctgcggctgtcagagagcggtgagacctggagcgaggtgtgggccgccatccccatgtcagatccccaggtgctgcacctgcagggaggcagccaggacggccggctgccccgcaccatccctctccccagctgcaaactgagtgtgccggaccctgaggagaggctggactcggggcatgtgtggaagctgcagtgggccaagcagtcctggtacctgagcgcctcctccgcagagctgcagcagcagtggctggaaaccctaagcactgctgcccatggggacacggcccaggacagcccgggggccctgcagcttcaggtccctatgggcgcagctgctccgtgagctgagtctcccactgccctgcacaccaccacattggacctgtgctgtcctgggaggtggtgttggaggccccatgaagagcgccctggactgctgagggtgggccaacagcccagagctcaggacacttggctttggggggaaggaaactgaggcccagagaggggcaaccactggccaa

SEQ ID NO: 37592 - DNA, 2178 bp, Artificial Sequence
  derived and/or modified sequence
atggagtcaggccgcggctcgtcaacccccccaggacctatcgccgcactggggatgcctgatacaggacctggttctagcagcctggggaagttgcaggcactaccggtggggccacgagcacactgcggagaccctgtgtccctcgcagcggccggcgacgggtctcctgatattggacctactggcgagctgtctggcagcttgaagattccaaatcgggattctgggatcgattcaccctcttcttcagtggccggcgagaacttcccttgtgaggaaggtctggaggctggcccctcccccaccgttctcggcgctcatgccgagatggcactggattcacaggtgcccaaggtgaccccacaggaggaagccgattcagatgtgggcgaggagccggactccgaaaatacgccacaaaaagccgataaagatgcaggcctggcgcagcatagtggcccccagaagctccttcatattgcccaggagcttctgcatacggaagaaacttatgtgaagcgcttgcacctgcttgatcaggtcttctgtaccagactcaccgacgcgggcataccacccgaagtgattatgggaatcttttctaacattagctctatccaccggtttcatgggcagtttctcctccccgagctcaagactcgcattaccgaagagtgggacacaaacccaaggttaggagatattctccagaagttagctcccttcctgaagatgtacggagaatatgtcaaaaattttgacagggctgtgggactggtgagcacctggacacagagatctccactgttcaaggacgttgtgcacagtatacagaaacaggaggtgtgtggcaacttgactctgcagcatcacatgttggaacccgtgcagcgggtaccacgttatgagttgctgctgaaggattacttgaagaggctccctcaggacgcgccagatcggaaggatgcagagcgatccttggaactgattagtaccgctgccaatcactcaaatgccgctatcagaaaggtagagaaaatgcataaactgctcgaagtttacgagcagctcggaggagaagaggacatcgtgaaccccgctaacgagctgatcaaggaaggacagatacaaaaactgtcagccaagaacggcactcctcaagatagacacctgttcctgtttaactcaatgatcctatactgcgttcccaagctcagattaatgggccaaaaatttagtgtcagagagaagatggacattagcgggctgcaagttcaggacatcgtaaaacctaatactgcccacacctttatcataacaggtcgaaagagatcactagaacttcaaaccaggaccgaggaagagaaaaaggagtggatccagatcattcaggctactatcgaaaaacataaacagaatagcgagaccttcaaagctttcggaggcgctttttcccaggacgaagatccgtcactttccccagacatgccaataacttcaacaagcccggtggagccagtcgtcaccacagaagggagctccggtgccgccggacttgaaccaaggaagctgtcaagcaagacccgcagggataaagagaaacagtcttgcaagagttgcggggagaccttcaattctattacgaaacgccgacaccattgtaaattgtgcggagctgtgatttgtggaaagtgctctgaattcaaagctgagaatagtaggcagagtagggtctgcagagactgttttttaacccagcctgtggccccagaatccaccgagaagaccccgacagcggatcctcagccatcccttttgtgtggcccgctccgtttgagtgagagcggagagacatggtctgaggtatgggccgcaattcctatgtcagacccccaggtgttgcacctgcagggaggtagccaggacggccggctgccacggaccatcccattgccttcctgcaagcttagcgtgcctgatcctgaggaacgactggacagtgggcacgtatggaagttacagtgggctaagcagagctggtacctatcggcaagtagtgctgaacttcagcagcaatggctggaaaccctgtcgaccgccgctcacggcgataccgcacaggattcacccggagcattacagctgcaagtcccgatgggcgctgctgccccttag

SEQ ID NO: 37593 - DNA, 2178 bp, Artificial Sequence
  derived and/or modified sequence
atggaatcaggccgggggtcttcaacgcctcccggcccaattgccgcacttgggatgcctgacacaggaccaggatcctcatccttaggaaagcttcaggccttgccagtaggtccccgggcccattgtggcgaccccgtgtccctcgccgcagccggagacggcagtccagacattggaccaacgggggagctttctggatcactcaagatacccaatagggattcaggaatcgattccccaagttcttcggtggcaggcgaaaactttccttgcgaagaaggcctggaggcgggaccaagtccaacagttctcggtgcacatgccgagatggctctcgattcccaggtccctaaagtgactccccaggaggaggccgatagtgatgtgggtgaagaaccagactcagagaatactccccagaaggctgataaagatgccggtcttgcccaacactctggaccccagaagctgcttcacatagcccaggagttgttgcacacagaggagacctacgttaagcggctccacttactcgaccaggtcttttgtacaaggctgacggacgctgggataccgccagaagtgatcatgggaatcttctccaacatctcctctattcacaggttccatggccaatttttgttgcctgagttaaaaacgagaattactgaggaatgggacaccaacccgagactcggagatattctgcagaagctggccccgtttctgaaaatgtacggtgagtacgttaagaactttgaccgcgccgtgggtctggtgtccacctggacccagaggtcacctcttttcaaagatgtcgttcactcaattcagaaacaagaggtgtgcggcaacctgacccttcagcaccatatgctcgagccggtacagagagtgccgcggtatgaactgctgctaaaggattacctcaagagattgccacaggacgcaccggaccgtaaagatgccgaaaggagcctggaactgatttctacagctgctaaccactcaaacgctgcaattagaaaggtggagaagatgcataaactgctcgaagtctacgagcaactagggggggaagaagacattgtgaaccctgcgaatgagcttattaaggagggtcaaattcaaaagctgtcggcgaagaacggaacccctcaagaccggcaccttttcctgttcaatagcatgattctatactgcgtacccaagctgcggctgatgggccagaagttcagtgtccgagaaaaaatggatataagtggtctgcaagtgcaggacattgtgaagcctaacacggcccacacatttatcattaccggcaggaaacgctctctcgagctccagactcgtacagaggaggaaaagaaggaatggatccagataattcaggctaccattgagaagcacaaacagaactctgagactttcaaggcctttggcggcgccttctcacaagatgaggatcccagcctaagtccagatatgcccataacctccactagtcccgtggagcctgttgtcactactgaaggctcttcaggtgctgccggcctcgaaccccgcaagctatcaagcaagacccgcagagataaggagaagcagtcttgtaagtcttgtggtgaaacatttaactccataactaaacgcagacatcactgcaagctttgcggcgctgtgatttgcgggaaatgctcagagttcaaagccgagaactctagacagtctcgcgtgtgtagagactgctttcttacacaacctgtggctcctgagtcaaccgaaaaaacacccactgcagatcctcagccaagtttgctgtgcggtcccctccgacttagtgagtcgggtgaaacttggtccgaggtgtgggccgcaatccccatgagtgatccccaggttctacacttgcaggggggaagtcaggacggaagactgccccggaccattccattgccttcttgtaagctgagcgtgcctgaccccgaagaacgtctggactccggacatgtatggaaactgcagtgggccaaacagagttggtacctgtccgcttcaagtgcggaactgcagcagcaatggctagagacactttcaaccgcggctcatggagatactgctcaggattctcctggagccctacaacttcaagtgccgatgggtgcagccgccccgtag

SEQ ID NO: 37594 - DNA, 987 bp, Artificial Sequence
  derived and/or modified sequence
atgattctatattgtgtgcccaagctgcgcctgatgggtcagaaattttccgtgcgggagaaaatggacattagcggactgcaggtccaggacatcgtcaagcccaataccgcccataccttcattattactgggagaaagcggtctttagagttgcagacccgcaccgaggaggaaaaaaaggaatggattcaaattattcaggctacaattgagaagcataaacaaaattctgaaacattcaaagcctttgggggagcattctcccaggatgaggatccttccttgtccccagacatgccaatcacctcaacatctcctgtggaacccgttgtgacaactgagggatcatccggtgccgccgggctggaacctaggaaattgtccagcaaaaccaggcgagataaggaaaaacagagctgcaagtcttgcggggagacttttaacagtattaccaaacggagacaccactgcaagctatgcggggccgtgatctgtggaaaatgttcagagttcaaggcagagaactcaaggcagagccgcgtctgtcgagattgctttctgacccagcctgtcgcacccgagagcactgagaagactcctaccgccgaccctcaaccctctctgctttgcggaccattgagattatccgagtctggggaaacctggtcagaagtgtgggccgctatacccatgagcgacccacaggtgcttcaccttcagggaggttctcaggatggccggcttccacgaacaattcccttgccaagttgtaagctgagcgtccccgaccccgaggagagactcgattctgggcatgtctggaaacttcaatgggctaagcagagctggtatctgtctgcttcaagcgccgaactgcagcagcagtggctggaaacactttcgaccgccgctcacggagatacagcccaggactctcccggagctctacaactgcaggtgcctatgggcgccgccgctccctag

SEQ ID NO: 37595 - DNA, 2178 bp, Artificial Sequence
  derived and/or modified sequence
atggagagcggccggggcagcagcaccccacctggccccatcgccgccctgggcatgccagacaccggccctggcagcagcagcctgggcaagctgcaggccctgcctgtgggcccccgggcccactgtggggaccctgtgtccctggccgctgctggagatggcagcccagacatcggccccaccggggagctgagcggcagcctgaagatccccaacagagacagcggcatcgacagccccagcagctctgtggccggggagaacttcccctgtgaggagggcctggaggccggccccagccccaccgtgctgggcgcccatgctgagatggccctggacagccaggtgcccaaggtgaccccccaggaggaggccgacagtgatgtgggggaggagccagacagcgagaacaccccccagaaggctgacaaggatgctggcctggcccagcacagcggcccccagaagctgctgcacatcgcccaggagctgctgcacacagaggagacctacgtgaagaggctgcacctgctggaccaggtgttctgcacccggctgacagatgctggcatccccccagaggtgatcatgggcatcttcagcaacatcagcagcatccaccgcttccacggccagttcctgctgcctgagctgaagacccgcatcacagaggagtgggacaccaacccccggctgggggacatcctgcagaagctggcccccttcctgaagatgtatggagaatatgtgaagaactttgacagagctgtgggcctggtgtccacctggacccagaggagccccctcttcaaggatgtggtgcacagcatccagaagcaggaggtgtgtggcaacctgaccctgcagcaccacatgctggagcctgtgcagagggtgcccaggtatgagctgctgctgaaggactacctgaagaggctgccccaggatgccccagacaggaaggatgctgagaggagcctggagctgatcagcacagctgccaaccacagcaatgctgccatcaggaaggtggagaagatgcacaagctgctggaggtgtatgagcagctgggcggggaggaggacatcgtgaacccagccaatgaactcatcaaggagggccagatccagaagctgagcgccaagaatggcaccccccaggacagacacctgttcctgttcaacagcatgatcctgtactgtgtgcccaagctgcggctgatgggccagaagttctctgtgcgggagaagatggacatcagcggcctgcaggtgcaggacatcgtgaagcccaacacagcccacaccttcatcatcactggaaggaagaggagcctggagctgcagaccaggacagaggaggagaagaaggagtggatccagatcatccaggccaccatcgagaagcacaagcagaacagcgagaccttcaaggcctttggaggagccttcagccaggatgaggaccccagcctgagcccagacatgcccatcaccagcaccagccctgtggagcctgtggtgaccacagagggcagcagtggagctgctggcctggagcccaggaagctgagcagcaagacccggcgggacaaggagaagcagagctgcaagagctgtggggagaccttcaacagcatcaccaagagaagacaccactgcaagctgtgtggggccgtcatctgtgggaaatgttctgagttcaaggccgagaacagccggcagagccgggtgtgccgggactgcttcctgacccagcctgtggcccctgagagcacagagaagacccccacagctgacccccagcccagcctgctgtgtggccccctgcggctgtctgagagcggggagacctggagcgaggtgtgggccgccatccccatgtctgacccccaggtgctgcacctgcagggcggcagccaggacggccgcctgcccaggaccatccccctgcccagctgcaagctgtctgtgcctgaccctgaggagcggctggacagcggccacgtgtggaagctgcagtgggccaagcagagctggtacctgagcgccagcagcgctgagctgcagcagcagtggctggagaccctgagcacagctgcccatggagacacagcccaggacagccctggggccctgcagctgcaggtgcccatgggcgctgctgccccctag

SEQ ID NO: 37596 - DNA, 987 bp, Artificial Sequence
  derived and/or modified sequence
atgatcctgtactgtgtgcccaagctgcggctgatgggccagaagttctctgtgcgggagaagatggacatcagcggcctgcaggtgcaggacatcgtgaagcccaacacagcccacaccttcatcatcaccggcaggaagaggagcctggagctgcagaccaggacagaggaggagaagaaggagtggatccagatcatccaggccaccatcgagaagcacaagcagaacagcgagaccttcaaggccttcggcggggccttcagccaggatgaggaccccagcctgagcccagacatgcccatcaccagcaccagccctgtggagcctgtggtgaccacagagggcagcagcggggctgctggcctggagcccaggaagctgagcagcaagacccggcgggacaaggagaagcagagctgcaagagctgtggggagaccttcaacagcatcaccaagaggaggcaccactgcaagctgtgtggggctgtgatctgtgggaagtgcagcgagttcaaggccgagaacagccggcagagccgggtgtgccgggactgcttcctgacccagcctgtggcccctgagagcacagagaagacccccacagctgacccccagcccagcctgctgtgtggccccctgcggctgtctgagagcggggagacctggagcgaggtgtgggccgccatccccatgtctgacccccaggtgctgcacctgcagggcggcagccaggacggccgcctgcccaggaccatccccctgcccagctgcaagctgtctgtgcctgaccctgaggagcggctggacagcggccacgtgtggaagctgcagtgggccaagcagagctggtacctgagcgccagcagcgctgagctgcagcagcagtggctggagaccctgagcacagctgcccacggggacacagcccaggacagccctggggccctgcagctgcaggtgcccatgggcgccgccgccccctag

SEQ ID NO: 37597 - DNA, 2178 bp, Artificial Sequence
  derived and/or modified sequence
atggagagcggccggggcagcagcaccccccccggccccatcgccgctctcggaatgcctgacactggaccagggagcagctctctgggaaaactccaggctctgcctgtgggccccagggctcactgcggcgatcctgttagccttgctgcagctggcgacggctcaccggacatcgggccaacgggagagctgtcaggctcactgaagattcccaatagagactctgggattgactcgcccagctccagcgtcgcaggcgagaattttccatgcgaggagggcctggaggcgggccctagtccaacagtgctgggcgcccacgccgagatggccttagacagccaggtaccaaaagttacgccccaggaagaagctgatagcgacgtcggcgaggaacccgactcagaaaacactcctcagaaagcagacaaagacgccgggttggcccagcattcaggaccccagaagttattgcacattgcccaagagctcctccatactgaagaaacatatgtcaaaagacttcatcttctggaccaggtattctgtactagactgactgacgctggcattccgccggaggttatcatggggatctttagcaacatttcatccatccacagattccacggtcaattccttcttccggagcttaagactaggattacagaagaatgggacactaacccgcggttaggagatattctccagaaattggcaccttttctgaaaatgtacggtgaatacgtgaaaaatttcgatagagcggtaggactggtgtcaacctggactcagcgttcacccctctttaaggatgtggtccatagtatccagaagcaagaggtgtgcgggaacctcactttgcagcaccacatgcttgaaccagtacagcgggtgccacggtacgaactcctcctgaaggactacttgaaaagactgccacaggatgcacctgacaggaaagacgctgagaggtcgctggagctgatcagtacagctgcgaaccacagcaatgccgcaatcagaaaggttgagaaaatgcacaagctccttgaggtctatgaacaactgggcggggaggaggatatagttaatccagcaaacgaactcatcaaggaggggcagatacagaagcttagtgcaaagaatggtactccacaggaccggcacctcttccttttcaatagcatgattctttactgcgtgccaaagctcaggttgatgggccaaaaattcagcgtaagggaaaaaatggacatcagtggtctacaggttcaggatattgttaagcccaacactgcccatacattcattatcaccggacgtaagaggtctctggagctgcaaacgagaactgaggaggagaagaaggagtggatccaaatcatccaagctacgattgaaaaacacaagcagaatagtgaaacattcaaagctttcggcggcgctttttcgcaagatgaggaccctagtttaagtcccgatatgcctataacttccacctcacccgttgagcccgtggtgactacggagggcagctccggagccgccggccttgaacccaggaagctgagtagcaagacacgtagggacaaggaaaagcagagctgtaaatcttgcggcgaaactttcaacagtatcacgaagagaagacatcactgtaagttatgcggcgcagtcatctgcggcaagtgtagtgagttcaaagcggaaaacagtcggcagtctcgggtctgcagggattgcttcctgacgcagcccgtcgcccctgagtccacggaaaagaccccgacggcagatccacagccatctctgctctgtgggcccctcaggcttagcgaatcaggggagacctggtccgaagtatgggccgcaattcctatgagcgatccccaggtgttacatctgcagggagggagccaggacggacggctgcctcgtacaatccccctaccttcctgcaaactgtctgtccccgacccagaggaacggctggatagcgggcacgtttggaagctgcagtgggcgaaacagtcctggtacctgagcgcatcgtccgctgaactccagcagcagtggctcgagaccttgtccaccgccgcgcacggcgacaccgcacaggactccccaggcgcattacagttgcaggtgccgatgggggccgccgccccgtag

SEQ ID NO: 37598 - DNA, 2178 bp, Artificial Sequence
  derived and/or modified sequence
atggagagcggccggggcagcagcaccccccccggccccatcgccgctctgggcatgccagacacgggcccaggaagcagctcactgggcaaacttcaggccttacctgtgggacctcgggcccactgtggcgatcctgtgagcctcgccgctgccggtgatggatctccggatatcgggcctaccggggagctctccgggagtttgaagatccctaatagggattcaggaatcgacagtcccagtagctctgtcgcaggcgaaaacttcccatgcgaagagggactggaagctgggccttcccctacagttctgggagcacacgccgagatggctctggactcccaggtgcctaaagttactccgcaggaggaagcagattcggatgttggggaagagcctgactctgagaacacgccccaaaaggctgataaggatgctggactggctcaacacagtgggccacagaagctgttgcacattgctcaggagctgctgcataccgaagaaacctatgttaagaggctgcacttgctggatcaggtcttctgtaccaggctgacggatgctggcatcccacccgaagttatcatgggaatcttttccaatatatcctcaatccaccgctttcacggacagttcttactgcccgaattgaagaccagaatcaccgaggaatgggacactaatccccgtttaggggacattttgcagaagctggcacccttccttaagatgtacggagagtacgttaaaaacttcgacagggcagtgggactggtgtctacatggacccagcggagtccactcttcaaggacgtggtgcactctattcagaaacaagaggtgtgcggtaacctgactctgcaacatcacatgcttgaacccgtacagcgagttcctagatacgagctgctcctgaaggactacctaaagagactgccgcaagatgcgccagacagaaaggatgcggaacggtctctggagctgatctccacagctgccaaccattcgaatgccgccatcagaaaagttgagaagatgcataaattattggaggtgtatgaacagttgggaggcgaggaggacatcgttaaccccgccaatgagttgattaaggagggacaaattcagaagctgagcgctaaaaatggcacaccccaggatcggcatctgttcctgttcaacagtatgattttatactgtgttcccaaattgcgccttatgggccagaagttttctgtacgggagaagatggatatttctgggcttcaggtccaggatatcgtgaaacctaatacagcccacacattcattattacaggaagaaaacgctctctggagttgcagacacggaccgaggaggagaagaaagaatggatccaaatcatccaggctaccatcgaaaagcataaacaaaattctgagacttttaaggcatttggaggggccttctcacaggacgaggaccccagtctgtcgccagatatgcccattacttccacctcccctgtggaaccggtggtgaccaccgaaggctcctccggagccgcaggtctagaaccccgaaaactgtcttctaaaacacggagagacaaggagaagcagtcttgtaagagctgtggagagaccttcaactcgattaccaagcggaggcaccactgcaagctctgtggcgctgtgatttgcggaaagtgttcagagttcaaagccgagaatagtcggcagtctcgagtctgtcgcgattgtttcctgacccagccggtggcacccgaatccacagagaagacccctactgcagaccctcaacctagtttgctgtgcggtcccctccggctctctgagagcggcgagacttggagcgaagtctgggcagcaatccccatgtctgacccacaggtacttcatctgcagggtggttctcaggacggtaggctcccccgcacaatccccctaccatcatgcaaactttcagtgcccgaccccgaagaacgcctggattccggccatgtctggaagttgcagtgggcaaaacaaagctggtatttatccgcttctagcgctgaattacagcagcaatggctcgagacgcttagcaccgcagcccacggggatactgcccaggactcacccggcgcgctccaactacaggtgcccatgggggcagccgccccgtag

SEQ ID NO: 37599 - DNA, 987 bp, Artificial Sequence
  derived and/or modified sequence
atgatcctgtactgcgtgcccaagctgcggctgatgggccagaagttttccgtgcgggagaagatggacatttctggcttgcaggtgcaagacattgtaaaacctaatacagctcatacatttatcataacaggcaggaaaagatccctggagctccagactcggactgaagaagagaagaaagagtggattcagatcattcaggcgactatcgagaaacataaacagaattctgaaaccttcaaagctttcggaggcgccttcagccaagacgaagacccgagcctctccccggatatgccaatcacatccaccagtcctgttgagcccgtcgttaccacagagggatcatccggagcggctgggctcgagccaaggaagctttcctcgaagacccggcgggacaaggagaagcagagctgcaagtcatgtggagagacatttaactcaatcaccaaacgccgccaccactgcaagttgtgcggcgcagtaatatgcggaaaatgttcggagtttaaagcagagaattctaggcagtctagggtttgtcgggactgttttctcactcagccagtggcccctgagtcgacagaaaaaactccgactgcagaccctcaaccgagtctgctgtgtgggccactgcggctctcggagagcggggagacctggtctgaagtctgggccgccattccaatgagcgacccacaggtgctgcatttacagggaggctcccaggatggaagactccctcgtaccatccccctgccatcctgcaagctctccgtaccagaccccgaggagcggctggactccggccacgtgtggaagcttcagtgggcgaagcagagttggtatctctccgcgagcagcgcggaacttcagcagcaatggctagagacactttcgacggcagcacacggcgacacagcccaagacagccccggagcccttcagcttcaagtccccatgggcgcggcggctccctag

SEQ ID NO: 37600 - DNA, 2178 bp, Artificial Sequence
  derived and/or modified sequence
atggagtccggccgaggaagctctactccacctggccctatcgccgcacttggaatgcccgacaccgggcctggtagcagcagcctgggtaagctgcaggcattgccagtgggccctagagctcattgtggcgatccagttagcctcgccgcagctggcgacgggtcccccgacatcggaccgactggcgaattgtcaggatctcttaaaatccctaacagggactctggaatcgatagtcctagtagcagtgtggccggtgaaaatttcccttgtgaggaagggcttgaagcgggtccaagtccaacagtgcttggggcacatgctgagatggctcttgactcccaggtgccgaaagtgacacctcaggaggaggcagactctgacgttggcgaggaacctgactccgagaataccccccaaaaggcagacaaagatgctgggctggctcagcattcaggccctcagaaactcttgcacattgcccaggagttgctccacacagaagagacctatgtcaagcgtctccatttgcttgatcaggttttttgcacccgcttgaccgatgcaggaatcccacccgaagtcattatgggcatcttctcaaatatctccagcatacatcgcttccacggccaattcttgctgccagaactgaagacacgaatcaccgaggaatgggacacgaaccccagacttggggatattctccagaaactggcacctttcctcaaaatgtatggagagtatgttaaaaacttcgatagggccgttgggctcgtctctacttggacccaacgctctcccctgttcaaggatgtggtccacagtatccaaaagcaagaggtgtgtgggaaccttactctgcaacatcacatgctggaacctgtgcaaagagtccctcgatatgaactcttactgaaggactacctgaagcggttaccccaagacgcaccagataggaaagatgccgaacggagtctggagttgatttccaccgctgccaaccacagtaacgcagcaatcagaaaggtggaaaagatgcacaagctgctagaagtgtatgaacagcttggcggtgaggaagacatagttaaccccgcaaacgaattaatcaaggagggacagatacaaaaactttctgctaaaaacggtactccccaagacagacatctgtttttatttaacagtatgatactgtactgcgtcccaaagctgaggcttatgggtcagaagttttcggtgcgagagaagatggatatttctggactgcaagtgcaggatattgtcaagcccaataccgcacacaccttcattattactggcaggaagcgctcattagagctgcagacccgcacagaagaagagaaaaaggaatggatccagataattcaagcgacaatcgagaagcacaagcagaactccgagacatttaaggctttcgggggtgccttttctcaggacgaggatccgtctctgtctcccgatatgcccatcacctctacctctccggtcgagcccgtcgtcactaccgaggggtccagcggggcagccggtctagagccacgcaagcttagcagcaagacccgcagagataaggaaaagcagtcgtgcaagagttgtggggagaccttcaacagcatcactaaaagaaggcatcactgcaagctgtgtggggctgtgatctgtggaaagtgcagcgagttcaaagccgagaactcacgtcaatcgcgggtttgtcgcgattgcttcctcacgcaaccagttgcccctgagagtaccgagaagacccctactgccgacccccaaccatcgctcctctgcggacccctgcgcttgtctgaaagcggtgaaacctggtcagaggtctgggccgctatcccaatgtctgacccacaggtcctccatttacaggggggtagccaagatggaaggctgccgaggactattccactgcccagttgcaaactgtccgtccctgacccggaggagcgcctcgactctgggcatgtgtggaagttgcaatgggctaagcaaagttggtatttgtctgcttcttcggccgaactgcagcaacagtggctggaaacgctaagtaccgctgctcacggggatacagcccaagatagcccaggggctttacagcttcaggtgccaatgggcgctgcggctccttag

SEQ ID NO: 37601 - DNA, 2178 bp, Artificial Sequence
  derived and/or modified sequence
atggagtccggcagagggtccagcactccacccggtcccatcgctgccctgggtatgccagatacggggcctggcagtagtagtctcggcaaactacaggccctcccagttggacccagagctcactgtggcgaccccgtgtccctcgcagctgccggagacgggagccccgacataggcccaacgggagaattgtcagggtctctgaagatcccaaacagggatagcggaatagatagtccctcttcctcagtggcgggagagaacttcccgtgcgaagagggcctcgaggcaggaccgtccccgaccgtgctgggcgcacatgctgagatggcactggactcccaagtgccaaaggtcacaccgcaggaggaagcagattcagatgtaggggaggaaccagattcagagaataccccacaaaaagccgacaaggacgccggtctggcccagcacagcggaccgcagaagttgctgcacattgcccaggagttacttcacactgaggagacttatgttaagcggttgcatctgttagaccaggtattttgtacacgcctgaccgacgctggcattcctccggaagtgattatggggatcttcagcaacatttcaagtatccaccggttccatggacagttcctccttcccgaactcaaaacaagaattaccgaggagtgggacactaacccgaggctaggcgatattctccagaagttggccccttttctcaaaatgtatggagaatatgttaagaatttcgaccgagctgtcggcctcgtcagcacttggacccaacggtcccctctgttcaaagatgtggtgcattctattcagaagcaggaggtatgcggcaatttgactctccagcatcatatgttggagcctgtacagagggttcccaggtatgagctcctgctgaaggactatctaaaacggctcccccaggatgctcccgataggaaggacgctgagcgatcactggagctgatctctaccgcggcaaatcactccaacgccgctatcagaaaagtggagaaaatgcataagctcctggaagtctatgaacagctgggtggagaagaggatatcgttaaccctgcaaacgaactcattaaggaaggccagatccagaaactgtctgctaaaaacggcacccctcaggaccgacacttatttcttttcaactccatgattttgtactgtgtgccaaaactgcggctgatggggcaaaagttctccgttagagagaagatggacatctccggcctgcaggtccaggacattgtgaaaccaaatactgctcatacttttatcattactggacgcaagcgctcgcttgaacttcagactagaactgaagaggagaagaaagagtggatccagatcattcaggccactattgaaaagcacaagcaaaacagcgaaacatttaaagcatttggtggcgctttcagccaggatgaggatccgagcctgagccctgatatgcccatcacttccacaagtcctgtagagcccgtggttaccaccgagggttcctccggagccgctggtctggagccacgtaagctgtcctcgaagaccagacgagacaaagagaaacagagttgtaagtcatgcggagagacttttaattcaattaccaagcgtagacaccactgcaagctgtgcggcgctgtaatttgcggcaagtgttcagagtttaaggcagaaaatagtcgccagtctagggtatgccgcgattgcttcctgacacagcccgtggccccagagtcgactgagaaaacccccactgccgatccccaaccgtcactgttgtgcggtccactgaggctctccgaatcaggtgagacatggtcggaagtctgggctgcgatcccaatgagtgatcctcaggtgctgcatctgcaaggcggtagtcaggatggcagactcccgagaactattccgctgccttcctgtaaacttagtgtgccggaccccgaggaacgacttgacagcggtcacgtttggaaacttcagtgggcgaaacaaagctggtatctctctgcctcctctgcagaattacagcagcagtggcttgaaacgttatcgaccgcagcccatggagatacggcacaggactctcctggcgcactacaactccaagttcctatgggtgctgctgcaccatag

SEQ ID NO: 37602 - DNA, 987 bp, Artificial Sequence
  derived and/or modified sequence
atgatcctgtactgtgtccccaagttacggctcatggggcagaaatttagcgtcagagagaagatggatatatccggcttacaggtgcaggacatcgtcaagcctaacaccgcccacacattcattataacaggaagaaagcggagcctcgagctccaaacgcgcaccgaagaggaaaaaaaggaatggatccaaatcattcaggccacgattgagaaacataaacagaatagcgagacattcaaagccttcgggggtgcattcagccaggacgaggacccctccctttcccctgatatgccgataacctcaacctctcctgtcgagcctgtcgttaccactgaaggcagttccggcgctgccggattggagccaaggaagttgtcgagcaaaaccagacgcgataaggaaaaacagagttgcaaaagttgcggagagacgtttaatagtatcaccaagcgcagacatcattgtaagctctgcggggctgtgatctgcgggaagtgcagtgagttcaaggccgaaaactcccggcaatcacgagtgtgcagggattgcttcttaacccagccagtagcgccagagtctaccgaaaaaacccctactgccgatcctcagccctccttgttgtgcggacccttacggttgtctgaaagcggcgagacttggagcgaggtctgggctgcgattccaatgtccgaccctcaggtcctgcacctgcaggggggatctcaagatggccgtctcccacggaccatccctctgccaagctgtaagctcagcgtgccggaccctgaagagcggttggactccgggcatgtgtggaaactgcagtgggctaagcagagctggtatctgtccgcctcctctgccgagctccagcagcaatggctcgagacactaagcactgcagcccacggagacaccgcacaggactcgcctggcgcacttcaattgcaggttccaatgggagccgctgccccttag

SEQ ID NO: 37603 - DNA, 2178 bp, Artificial Sequence
  derived and/or modified sequence
atggagagcggcagaggcagcagcaccccccccggccccatcgccgccctgggcatgcccgacaccggccccggcagcagcagcctgggcaagctgcaggccctgcccgtgggccccagagcccactgcggcgaccccgtgagcctggccgccgccggcgacggcagccccgacatcggccccaccggcgagctgagcggcagcctgaagatccccaacagagacagcggcatcgacagccccagcagcagcgtggccggcgagaacttcccctgcgaggagggcctggaggccggccccagccccaccgtgctgggcgcccacgccgagatggccctggacagccaggtgcccaaggtgaccccccaggaggaggccgacagcgacgtgggcgaggagcccgacagcgagaacaccccccagaaggccgacaaggacgccggcctggcccagcacagcggcccccagaagctgctgcacatcgcccaggagctgctgcacaccgaggagacctacgtgaagagactgcacctgctggaccaggtgttctgcaccagactgaccgacgccggcatcccccccgaggtgatcatgggcatcttcagcaacatcagcagcatccacagattccacggccagttcctgctgcccgagctgaagaccagaatcaccgaggagtgggacaccaaccccagactgggcgacatcctgcagaagctggcccccttcctgaagatgtacggcgagtacgtgaagaacttcgacagagccgtgggcctggtgagcacctggacccagagaagccccctgttcaaggacgtggtgcacagcatccagaagcaggaggtgtgcggcaacctgaccctgcagcaccacatgctggagcccgtgcagagagtgcccagatacgagctgctgctgaaggactacctgaagagactgccccaggacgcccccgacagaaaggacgccgagagaagcctggagctgatcagcaccgccgccaaccacagcaacgccgccatcagaaaggtggagaagatgcacaagctgctggaggtgtacgagcagctgggcggcgaggaggacatcgtgaaccccgccaacgagctgatcaaggagggccagatccagaagctgagcgccaagaacggcaccccccaggacagacacctgttcctgttcaacagcatgatcctgtactgcgtgcccaagctgagactgatgggccagaagttcagcgtgagagagaagatggacatcagcggcctgcaggtgcaggacatcgtgaagcccaacaccgcccacaccttcatcatcaccggcagaaagagaagcctggagctgcagaccagaaccgaggaggagaagaaggagtggatccagatcatccaggccaccatcgagaagcacaagcagaacagcgagaccttcaaggccttcggcggcgccttcagccaggacgaggaccccagcctgagccccgacatgcccatcaccagcaccagccccgtggagcccgtggtgaccaccgagggcagcagcggcgccgccggcctggagcccagaaagctgagcagcaagaccagaagagacaaggagaagcagagctgcaagagctgcggcgagaccttcaacagcatcaccaagagaagacaccactgcaagctgtgcggcgccgtgatctgcggcaagtgcagcgagttcaaggccgagaacagcagacagagcagagtgtgcagagactgcttcctgacccagcccgtggcccccgagagcaccgagaagacccccaccgccgacccccagcccagcctgctgtgcggccccctgagactgagcgagagcggcgagacctggagcgaggtgtgggccgccatccccatgagcgacccccaggtgctgcacctgcagggcggcagccaggacggcagactgcccagaaccatccccctgcccagctgcaagctgagcgtgcccgaccccgaggagagactggacagcggccacgtgtggaagctgcagtgggccaagcagagctggtacctgagcgccagcagcgccgagctgcagcagcagtggctggagaccctgagcaccgccgcccacggcgacaccgcccaggacagccccggcgccctgcagctgcaggtgcccatgggcgccgccgccccctag

SEQ ID NO: 37604 - DNA, 987 bp, Artificial Sequence
  derived and/or modified sequence
atgatcctgtactgcgtgcccaagctgagactgatgggccagaagttcagcgtgagagagaagatggacatcagcggcctgcaggtgcaggacatcgtgaagcccaacaccgcccacaccttcatcatcaccggcagaaagagaagcctggagctgcagaccagaaccgaggaggagaagaaggagtggatccagatcatccaggccaccatcgagaagcacaagcagaacagcgagaccttcaaggccttcggcggcgccttcagccaggacgaggaccccagcctgagccccgacatgcccatcaccagcaccagccccgtggagcccgtggtgaccaccgagggcagcagcggcgccgccggcctggagcccagaaagctgagcagcaagaccagaagagacaaggagaagcagagctgcaagagctgcggcgagaccttcaacagcatcaccaagagaagacaccactgcaagctgtgcggcgccgtgatctgcggcaagtgcagcgagttcaaggccgagaacagcagacagagcagagtgtgcagagactgcttcctgacccagcccgtggcccccgagagcaccgagaagacccccaccgccgacccccagcccagcctgctgtgcggccccctgagactgagcgagagcggcgagacctggagcgaggtgtgggccgccatccccatgagcgacccccaggtgctgcacctgcagggcggcagccaggacggcagactgcccagaaccatccccctgcccagctgcaagctgagcgtgcccgaccccgaggagagactggacagcggccacgtgtggaagctgcagtgggccaagcagagctggtacctgagcgccagcagcgccgagctgcagcagcagtggctggagaccctgagcaccgccgcccacggcgacaccgcccaggacagccccggcgccctgcagctgcaggtgcccatgggcgccgccgccccctag

SEQ ID NO: 37605 - protein, 829 aa, Artificial Sequence
  derived and/or modified sequence
MAQPGPASQPDVSLQQRVAELEKINAEFLRAQQQLEQEFNQKRAKFKELYLAKEEDLKRQNAVLQAAQDDLGHLRTQLWEAQAEMENIKAIATVSENTKQEAIDEVKRQWREEVASLQAVMKETVRDYEHQFHLRLEQERTQWAQYRESAEREIADLRRRLSEGQEEENLENEMKKAQEDAEKLRSVVMPMEKEIAALKDKLTEAEDKIKELEASKVKELNHYLEAEKSCRTDLEMYVAVLNTQKSVLQEDAEKLRKELHEVCHLLEQERQQHNQLKHTWQKANDQFLESQRLLMRDMQRMEIVLTSEQLRQVEELKKKDQEDDEQQRLNKRKDHKKADVEEEIKIPVVCALTQEESSAQLSNEEEHLDSTRGSVHSLDAGLLLPSGDPFSKSDNDMFKDGLRRAQSTDSLGTSGSLQSKALGYNYKAKSAGNLDESDFGPLVGADSVSENFDTASLGSLQMPSGFMLTKDQERAIKAMTPEQEETASLLSSVTQGMESAYVSPSGYRLVSETEWNLLQKEVHNAGNKLGRRCDMCSNYEKQLQGIQIQEAETRDQVKKLQLMLRQANDQLEKTMKDKQELEDFIKQSSEDSSHQISALVLRAQASEILLEELQQGLSQAKRDVQEQMAVLMQSREQVSEELVRLQKDNDSLQGKHSLHVSLQQAEDFILPDTTEALRELVLKYREDIINVRTAADHVEEKLKAEILFLKEQIQAEQCLKENLEETLQLEIENCKEEIASISSLKAELERIKVEKGQATVEQLMFEEKNKAQRLQTELDVSEQVQRDFVKLSQTLQVQLERIRQADSLERIRAILNDTKLTDINQLPET

SEQ ID NO: 37606 - DNA, 2490 bp, Artificial Sequence
  derived and/or modified sequence
atggcacagccgggaccagcaagccagcctgacgtcagcttgcagcagagggtcgccgaactggagaaaattaatgctgaatttctgagggcccagcagcaattggagcaggagtttaatcagaagcgagccaaattcaaggaactataccttgcaaaagaagaagacctgaagcggcagaatgccgtgttgcaggcagctcaagacgaccttggccatctgcgcacccagctgtgggaagcccaggccgaaatggagaatataaaagccatcgccactgtcagcgagaataccaagcaggaggccatcgatgaagtgaagcggcagtggcgagaggaagtcgcctccctgcaggctgttatgaaggagactgtgagggactacgaacatcagttccacctgcgcttggaacaagagcggacacaatgggctcagtatcgagagagcgctgaaagggagattgctgacttgcgaagacggctgtcagagggccaagaagaggagaatctggaaaacgagatgaaaaaagctcaggaggacgcagagaagttgagatccgtcgttatgccaatggaaaaagaaattgctgccctgaaagacaaacttacagaggcagaagataagattaaagagttggaggcatccaaagtgaaggagctgaaccattatctcgaagcagaaaagtcttgtaggaccgacctggagatgtacgttgccgtgttgaacacgcagaaatccgtgttgcaggaggatgctgaaaagctgcgcaaggagctacacgaggtttgccacctactggaacaagagcgccagcagcacaaccagcttaagcatacatggcagaaagccaatgatcagtttctggagtcacaacggttgctgatgcgtgatatgcagcggatggaaatcgttcttacttccgagcagctgcggcaggtggaggaactgaagaagaaagatcaggaggacgacgaacagcagcggttaaacaaaaggaaggaccataagaaggccgacgtggaagaggaaataaaaattcctgtcgtttgtgctctgactcaggaagaatcctccgcgcagctgtccaacgaggaggaacacctagacagcacaaggggctctgttcactccctggacgcaggactcctcctaccatccggagaccccttttcaaaatccgataacgatatgttcaaggacggtctccgcagagcgcagagtaccgactcattaggaacctcagggagcttacagtcaaaagccctcggatacaactacaaagctaagagtgccggaaatcttgatgaatcagattttgggcctcttgtcggcgcagacagtgtgtcggagaacttcgatacagcctctcttggctctcttcagatgccgagcggcttcatgcttaccaaggaccaggagagggcaattaaagcaatgacccctgaacaggaagagaccgcgagcctgctgtcctcagtgacccaagggatggagagcgcttacgttagcccaagcgggtaccgtttagtgagcgaaactgaatggaacctgttacaaaaagaagtgcacaatgccgggaacaaactgggacgccgctgcgatatgtgctctaactacgaaaaacaactgcaggggatccagatccaagaggctgaaacgagggaccaagttaaaaaactgcaacttatgcttaggcaggccaacgaccagctggaaaagacaatgaaagataagcaggaattagaggattttatcaagcagtcctctgaggattcctcacatcagatctcagccctggtactaagagcccaggcatcagaaatattactggaggaactgcaacaagggctttcccaggcaaaaagggatgtgcaagagcagatggccgttctgatgcagtcccgcgagcaggtgtcggaagagttagttagactgcaaaaggacaacgacagcctgcaggggaagcacagcttgcacgtgagtctgcagcaagccgaagacttcattctgcctgacaccaccgaggctttgagggagttggtcctaaagtaccgggaagacattataaacgttcgaactgctgctgaccacgtggaggagaagctgaaggccgagatactgtttttgaaagagcagatccaagccgagcagtgcctaaaagaaaatttagaggaaactttgcagctggagattgaaaactgcaaggaggagattgccagtatcagcagcctgaaagcagaacttgagcgtattaaagtggaaaaaggtcaggccaccgtggaacaattgatgttcgaagagaaaaataaagcgcaacgcctacagaccgaacttgatgtaagcgaacaggtacaacgtgacttcgtgaagctcagccaaacactgcaggtacagctggaacgaattagacaggctgactccctcgagcgcatccgggccatcctgaacgatacaaagctgacagacattaatcagctacctgagacctag

SEQ ID NO: 37607 - DNA, 2490 bp, Artificial Sequence
  derived and/or modified sequence
atggcacagccaggcccggctagtcagccggacgtgagcctgcagcagcgcgttgcagaactggagaagattaatgccgagttcctccgcgctcagcaacagttagagcaagaatttaaccagaagcgggccaagtttaaagagttatatctcgctaaggaggaggatctgaagaggcagaacgccgtgttgcaggccgcgcaggatgatttaggccacttaagaacccagctttgggaagcccaggccgagatggagaacattaaagccattgctactgtgtctgaaaacaccaagcaggaagccatcgatgaggtgaaacggcaatggcgagaagaggtggctagcctccaggccgtcatgaaagagactgtgcgggactatgaacaccagttccatctcagactcgaacaggaaaggacacaatgggcccagtaccgggagtcagcggagagagagatcgcagatctacgccggaggctttcagagggacaagaagaggagaatttagagaacgaaatgaaaaaagcccaggaggatgcagagaaattgcgcagcgtagttatgccaatggagaaggaaatcgcagctctcaaagacaagttaactgaggcagaggacaagattaaagagttagaggcaagcaaggtgaaggagctcaatcactacctagaggctgaaaagagctgcagaacagatctcgaaatgtatgtagcggtacttaatacacagaagtctgtgctacaggaagatgctgagaaactgcggaaagagctccatgaggtctgccacttgctcgagcaggaacgccagcagcacaatcagctcaagcacacatggcagaaagccaatgaccaattcctcgaatctcaacgcctcctgatgcgggacatgcagcgtatggagatcgtgcttacctcagagcagctgcgccaggtggaagaactgaagaaaaaggaccaggaagacgacgaacagcagaggctaaacaaacggaaggaccacaaaaaggcggacgtggaggaggaaataaagatccctgttgtctgcgccctcacccaggaggagtccagcgctcaactctcaaatgaggaggagcacctggacagcacacgcggcagtgtgcatagtctggatgcggggctgttactgccatcaggtgatcctttctctaaaagtgacaacgatatgttcaaggacgggctcaggcgcgcccagtccactgacagcctgggaacatccggcagccttcagtccaaggccctgggatataattataaggccaaatccgcagggaacctcgacgagagtgattttggtccactcgtcggggccgactctgtgagtgagaatttcgacacagccagcttggggtcacttcaaatgccttccggatttatgttgaccaaggatcaggagcgcgcaatcaaggctatgactcccgagcaggaagaaaccgcgtccctcctgtcctcagtgacccaaggcatggagtcagcctatgttagccccagtgggtaccggctggtttcagagactgagtggaatctgctgcagaaagaggtgcataacgccggcaataagctcgggcggcgatgtgatatgtgctccaactacgaaaagcagttacagggtatacagattcaggaagcagagactcgcgaccaggttaaaaaacttcagctcatgctgagacaagccaacgaccagcttgagaaaaccatgaaggataagcaagaactggaggattttattaagcagagtagcgaggactcttcacatcagatttccgcattggtgctaagggctcaggcctccgagatcctcctggaggagctgcagcagggcctctcacaggcaaagcgggacgtacaagagcaaatggccgtgttgatgcagagcagggaacaagtgagtgaggagctcgtgaggctccaaaaagataatgactccctccaaggaaagcatagtctgcacgtttccctacagcaagcggaggacttcatactgccagatactacagaggcgctcagagagttggtgttgaagtaccgcgaagatattattaatgtgagaaccgccgccgaccacgtcgaagagaaactgaaagctgagatcttgttcctgaaagagcagatacaggcggaacagtgcctaaaagaaaacttagaagagactctgcaactcgagatcgaaaactgcaaggaagagattgcttcaatctcctcccttaaggcagagctggagcggatcaaagtggaaaaaggacaagctactgtggaacagctcatgtttgaggagaaaaataaggcgcagcggctgcagaccgaactggacgtgagcgaacaagtccagcgcgacttcgtcaaactaagccagacccttcaagttcagctggaacgcattcgccaggccgactcactggaacgtattagagctatcctgaacgatacaaagctcacggacatcaatcaactgccggaaacctag

SEQ ID NO: 37608 - DNA, 2151 bp, Artificial Sequence
  derived and/or modified sequence
atggcacagccgggtcctgcctcacaaccggatgtttccctgcaacagcgcgtagcagagctggagaaaataaacgccgaattcctaagagcacagcagcagctagaacaggagttcaaccagaagcgggctaagttcaaggaactataccttgcaaaggaagaggacttgaaacgtcagaacgctgtgctgcaggcggcacaggatgacctgggccacttaagaacacagctgtgggaagcgcaggctgagatggagaatattaaagctatagctacggtctctgaaaatactaaacaagaagcaatcgatgaagtaaaacgccagtggcgcgaggaagtggccagtcttcaggctgttatgaaggaaacagtgcgcgactacgagcaccagtttcacttgcggctggagcaggagcgaactcagtgggcgcagtacagggaatccgccgaacgggagatcgcagatctgagaaggaggctgagcgaaggccaagaggaagaaaacctggagaatgaaatgaaaaaggcccaagaggacgccgaaaaacttagaagtgtggtcatgccaatggaaaaggaaattgcggcgctcaaggataagcttaccgaggccgaggacaagattaaggagctggaggcctccaaggtgaaagaactgaaccattatctggaagctgagaagtcgtgccgcacagacctggagatgtacgtggccgtgctgaatactcagaaatctgttctccaggaggacgcagagaagctcaggaaagagctgcatcaggaacggcagcagcacaatcagctcaaacatacatggcagaaagctaatgatcagtttctggaaagccagcgtttgctaatgcgggatatgcagagaatggaaattgtgctgacatccgagcagctccgccaggtcgaagagctcaaaaaaaaggatcaggaagatgacgagcagcagcggttgaataaacgcaaagatcataaaaaagccgatgtggaggaggaaattaagatccccgtggtctgcgcgctaacacaggaggaatccagcgcccagctgagcaatgaagaggagcacctcgatagcacccgcggtagtgttcactccctcgatgccggacttttgttgcctagcggcgacccctttagcaagtcagataacgatatgtttaaagatggactgcgccgagcccagtcaacagattccctgggtacaagcgggagcttgcaaagcaaggcactggggtacaattataaagccaaaagcgccggaaatttggacgaatcggattttggcccgctcgttggggccgatagcgtttccgaaaactttgacactgcctccctgggatcactgcagatgccttctgggttcatgttgactaaggatcaggaacgggctattaaggccatgacccctgaacaagaggaaaccgcaagcctcctcagctccgtaacccaaggtatggagagcgcctatgtttccccgagtggctacaggctggttagtgagacagagtggaatctcctgcagaaggaagtgcacaacgccgggaacaaactgggccgcaggtgcgacatgtgcagtaactatgaaaagcagctgcagggaatccagatacaggaagccgagactagagatcaggtaaaaaaacttcagctcatgctgagacaggccaacgaccagttagaaaaaacaatgaaggacaagcaagaactggaagatttcattaaacagagctctgaagattcttctcaccagatctccgcattggtgcttagagctcaggcatcagaaattctgctggaggagctgcagcaaggcctgtcacaggccaagcgagatgtgcaagaacaaatggcggtgttgatgcagtcccgcgaacaggtaagtgaggagctcgtgcgcctgcagaaggacaatgactctctgcagggtaaacactcgcttcacgtgtcacttcagcaggccgaagattttatcctccccgataccacagaggctcttagggagctagtgctgaagtaccgggaggatatcattaatgtacgcacagccgcagaccacgtcgaagaaaaactcaaagctgaaatattgttcttgaaggagcagatccaagccgagcagtgtctgaagaagaagaaatag

SEQ ID NO: 37609 - DNA, 2490 bp, Artificial Sequence
  derived and/or modified sequence
atggcccagcccggccctgccagccagccagatgtgtccctgcagcagagggtggccgagctggagaagatcaatgctgagttcctgcgggcccagcagcagctggagcaggagttcaaccagaagagggccaagttcaaggagctgtacctggccaaggaggaggacctgaagaggcagaatgctgtgctgcaggccgcccaggatgacctgggccacctgcggacccagctgtgggaggcccaggccgagatggagaacatcaaggccatcgccaccgtgtctgagaacaccaagcaggaggccattgatgaggtgaagaggcagtggagggaggaggtggccagcctgcaggccgtgatgaaggagaccgtgcgggactatgagcaccagttccacctgcggctggagcaggagaggacccagtgggcccagtaccgggagagcgctgagcgggagattgctgacctgcggcggcggctgtctgagggccaggaggaggagaacctggagaatgagatgaagaaggcccaggaggatgctgagaagctgcggtctgtggtgatgcccatggagaaggagattgctgccctgaaggacaagctgacagaagctgaggacaagatcaaggagctggaggccagcaaggtgaaggagctgaaccactacctggaggccgagaagagctgcaggacagacctggagatgtatgtggccgtgctgaacacccagaagtctgtgctgcaggaggatgctgagaagctgaggaaggagctgcacgaggtgtgccacctgctggagcaggagcggcagcagcacaaccagctgaagcacacctggcagaaggccaatgaccagttcctggagagccagaggctgctgatgagggacatgcagaggatggagatcgtgctgaccagcgagcagctgcggcaggtggaggagctgaagaagaaggaccaggaggatgatgagcagcagaggctgaacaagaggaaggaccacaagaaggcagatgtggaggaggagatcaagatccctgtggtgtgtgccctgacccaggaggagagcagcgcccagctgagcaatgaggaggagcacctggacagcacccggggctctgtgcacagcctggatgctggcctgctgctgcccagcggggaccccttcagcaagagtgacaatgacatgttcaaggatggcctgcggcgggcccagagcacagacagcctgggcaccagcggcagcctgcagagcaaggccctgggctacaactacaaggccaagtctgctggcaacctggatgaaagtgactttggccccctggtgggcgctgacagcgtgtctgagaactttgacacagccagcctgggcagcctgcagatgcccagcggcttcatgctgaccaaggaccaggagcgggccatcaaggccatgaccccagagcaggaggagacagccagcctgctgagctctgtgacccagggcatggagagcgcctacgtgagccccagcggctaccgcctggtgtctgaaacagagtggaacctgctgcagaaggaggtgcacaatgccggcaacaagctgggcagaagatgtgacatgtgcagcaactatgagaagcagctgcagggcatccagatccaggaggccgagacccgggaccaggtgaagaagctgcagctgatgctgcggcaggccaatgaccagctggagaagaccatgaaggacaagcaggagctggaggacttcatcaagcagagcagcgaggacagcagccaccagatcagcgccctggtgctgcgggcccaggccagcgagatcctgctggaggagctgcagcagggcctgagccaggccaagagagatgtgcaggagcagatggctgtgctgatgcagagccgggagcaggtgtctgaggagctggtgcggctgcagaaggacaatgacagcctgcagggcaagcacagcctgcacgtgtccctgcagcaggccgaggacttcatcctgcctgacaccacagaggccctgcgggagctggtgctgaagtaccgggaggacatcatcaacgtgaggacagctgctgaccacgtggaggagaagctgaaggccgagatcctcttcctgaaggagcagatccaggccgagcagtgcctgaaggagaacctggaggagaccctgcagctggagattgagaactgcaaggaggagatcgccagcatcagcagcctgaaggccgagctggagcgcatcaaggtggagaagggccaggccaccgtggagcagctgatgtttgaggagaagaacaaggcccagaggctgcagacagagctggatgtgtctgagcaggtgcagagggactttgtgaagctgagccagaccctgcaggtgcagctggagcgcatccggcaggccgacagcctggagcgcatccgggccatcctgaatgacaccaagctgacagacatcaaccagctgcctgagacctag

SEQ ID NO: 37610 - DNA, 2151 bp, Artificial Sequence
  derived and/or modified sequence
atggcccagcccggccctgccagccagccagatgtgtccctgcagcagagggtggccgagctggagaagatcaatgctgagttcctgcgggcccagcagcagctggagcaggagttcaaccagaagagggccaagttcaaggagctgtacctggccaaggaggaggacctgaagaggcagaatgctgtgctgcaggccgcccaggatgacctgggccacctgcggacccagctgtgggaggcccaggccgagatggagaacatcaaggccatcgccaccgtgtctgagaacaccaagcaggaggccattgatgaggtgaagaggcagtggagggaggaggtggccagcctgcaggccgtgatgaaggagaccgtgcgggactatgagcaccagttccacctgcggctggagcaggagaggacccagtgggcccagtaccgggagagcgctgagcgggagattgctgacctgcggcggcggctgtctgagggccaggaggaggagaacctggagaatgagatgaagaaggcccaggaggatgctgagaagctgcggtctgtggtgatgcccatggagaaggagattgctgccctgaaggacaagctgacagaagctgaggacaagatcaaggagctggaggccagcaaggtgaaggagctgaaccactacctggaggccgagaagagctgcaggacagacctggagatgtatgtggccgtgctgaacacccagaagtctgtgctgcaggaggatgctgagaagctgaggaaggagctgcaccaggagcggcagcagcacaaccagctgaagcacacctggcagaaggccaatgaccagttcctggagagccagaggctgctgatgagggacatgcagaggatggagatcgtgctgaccagcgagcagctgcggcaggtggaggagctgaagaagaaggaccaggaggatgatgagcagcagaggctgaacaagaggaaggaccacaagaaggcagatgtggaggaggagatcaagatccctgtggtgtgtgccctgacccaggaggagagcagcgcccagctgagcaatgaggaggagcacctggacagcacccggggctctgtgcacagcctggatgctggcctgctgctgcccagcggggaccccttcagcaagagtgacaatgacatgttcaaggatggcctgcggcgggcccagagcacagacagcctgggcaccagcggcagcctgcagagcaaggccctgggctacaactacaaggccaagtctgctggcaacctggatgaaagtgactttggccccctggtgggcgctgacagcgtgtctgaaaattttgacacagccagcctgggcagcctgcagatgcccagcggcttcatgctgaccaaggaccaggagcgggccatcaaggccatgaccccagagcaggaggagacagccagcctgctgagctctgtgacccagggcatggagagcgcctacgtgagccccagcggctaccgcctggtgtctgaaacagagtggaacctgctgcagaaggaggtgcacaatgccggcaacaagctgggccgccgctgtgacatgtgcagcaactatgagaagcagctgcagggcatccagatccaggaggccgagacccgggaccaggtgaagaagctgcagctgatgctgcggcaggccaatgaccagctggagaagaccatgaaggacaagcaggagctggaggacttcatcaagcagagcagcgaggacagcagccaccagatcagcgccctggtgctgcgggcccaggccagcgagatcctgctggaggagctgcagcagggcctgagccaggccaagagagatgtgcaggagcagatggctgtgctgatgcagagccgggagcaggtgtctgaggagctggtgcggctgcagaaggacaatgacagcctgcagggcaagcacagcctgcacgtgtccctgcagcaggccgaggacttcatcctgcctgacaccacagaggccctgcgggagctggtgctgaagtaccgggaggacatcatcaacgtgaggacagctgctgaccacgtggaggagaagctgaaggccgagatcctcttcctgaaggagcagatccaggccgagcagtgcctgaagaagaagaagtag

SEQ ID NO: 37611 - DNA, 2490 bp, Artificial Sequence
  derived and/or modified sequence
atggcccagcccggccccgccagccagcccgacgtgagcctgcagcaacgagtcgctgaactggaaaagatcaacgccgagttcctccgcgctcaacaacagctcgaacaggagttcaaccagaagcgggccaaattcaaagagctgtatctggccaaagaagaggatctgaagcgccagaacgctgtgcttcaggccgcccaagacgatctagggcatctcaggacacagctgtgggaggcccaggcagagatggagaatatcaaagccatcgcaacggtgagcgaaaatactaagcaagaggccattgatgaagtgaagagacagtggagagaggaggtcgcttcgttgcaggcagtgatgaaggagaccgtgcgcgattatgagcaccaatttcaccttagactcgaacaggagcgaacacagtgggctcagtatagagaatcggctgagcgagaaatagcggatcttaggagacggttgagcgaaggacaggaggaggagaatctagagaatgagatgaaaaaggcccaggaggacgccgaaaaactcaggtctgtcgtaatgcccatggagaaggagatcgctgccctcaaggacaaactgacggaagccgaggacaaaattaaagagttggaggcatctaaggtcaaggaactcaaccactatctagaagccgaaaaaagctgtcgcacagacctagaaatgtatgttgctgtgctgaatacacagaagtctgtgctgcaggaggacgctgagaagttgaggaaggagctgcacgaggtgtgccatctgttagagcaggagcgccaacagcacaatcagctaaaacatacctggcagaaggcaaatgatcagttcttggagagtcagagactgttaatgagggatatgcagcgaatggaaatcgtgctgaccagcgagcaactgaggcaagtggaggaattgaaaaaaaaggatcaggaagatgatgaacagcaaagattgaataagaggaaggaccataagaaggcagatgtggaggaagaaatcaagatccctgtggtatgtgccctgacccaggaagagtcgtcagcacagctgagcaacgaagaagaacacctggactctactcgaggaagcgtacactccctggacgctggactacttttgcccagcggcgacccattttccaaaagcgataatgacatgttcaaggacggcctgagacgtgcacagtcaacggactcacttggcactagtggctccctacaatccaaggccctgggctacaactacaaggcgaaaagcgcgggaaacctggacgagtccgattttggtccactggtaggcgcagactccgtttccgagaactttgacactgccagccttggcagcctgcaaatgccctccggatttatgctgaccaaggaccaggagagagctatcaaggccatgaccccggagcaggaagagactgcctccctgctgtcttctgtgacccaggggatggagtcagcctacgtgtctccttctgggtacaggctggtgtcagagacagagtggaacctcctccagaaggaagttcacaacgctggaaataagctgggccgccgctgcgatatgtgttccaattatgagaaacaactgcaggggatacagattcaggaggccgagactcgcgatcaggtcaaaaaactgcagctcatgttgaggcaggcgaacgaccagctggagaaaaccatgaaggataaacaggagctagaagattttataaaacagagtagtgaagactcaagccatcaaatttcagcgctagttctacgcgctcaggcttctgagattctgctggaggagctgcaacagggactgagccaggccaaacgcgatgttcaagagcaaatggccgttctgatgcagtccagagagcaagtgagcgaggaactcgtgcggcttcagaaagacaatgactctctacagggaaaacactcacttcatgtgagtctgcagcaggccgaagactttatcttgcctgacacaaccgaagccttgcgcgagcttgtgttgaagtatcgggaggacattattaacgtgcgaacagccgctgatcacgtggaagaaaagctgaaggcggagatactatttttgaaggaacagattcaggcagaacaatgtctgaaggaaaatctggaagaaacacttcagttggaaatcgaaaactgtaaggaggagattgcatccatttcctctctcaaggcagagctcgagcgtattaaggtggaaaaaggacaagcaactgtagagcagctgatgtttgaagagaaaaataaggcacagaggcttcagacagaactggacgtgtctgaacaggtgcagagggacttcgtcaaactttctcagaccctccaggtccagctggaaagaattagacaggctgactccctcgaacgcataagggcaattttaaatgacactaaactgaccgatatcaaccagctaccagaaacatag

SEQ ID NO: 37612 - DNA, 2490 bp, Artificial Sequence
  derived and/or modified sequence
atggcccagcccggccccgccagccagcccgacgtgagcctgcagcagagagtagcagaacttgagaaaatcaacgccgaatttctgcgggcacagcagcagctcgagcaggagtttaaccaaaaaagagctaaatttaaggagctttatcttgccaaggaagaggatctgaaacgccagaacgcagtgttgcaggctgctcaggatgatctgggacatctacgcactcagctgtgggaggcccaagccgagatggagaatatcaaagctatcgctactgtgtcagaaaacacaaaacaggaggccattgacgaagtgaaaagacagtggcgagaggaggtcgccagcctacaggctgtgatgaaagaaacagtcagggactacgagcatcagttccaccttcggctggaacaggaacggactcaatgggctcagtaccgagaatccgcagaaagggaaatcgctgaccttcgacggaggctgagtgaagggcaagaagaagaaaacctggaaaatgagatgaagaaagcccaggaagatgcggaaaaacttagaagcgtggtaatgccaatggagaaagagatcgctgccctgaaagacaaactgaccgaagctgaggacaaaatcaaggagttggaggccagtaaggtaaaggaactcaatcactaccttgaggccgagaagagctgcagaaccgacttggagatgtacgtggctgtgctgaacacgcagaaatctgtgctgcaggaggacgctgagaagttgagaaaagagcttcatgaagtgtgccacttattggagcaagagcggcaacagcataatcaactgaaacacacttggcagaaagcgaacgaccagttcctggaatctcagaggcttcttatgagggatatgcagaggatggagatcgtcctgacttcggagcagctgcgccaagtggaagaactgaaaaagaaagaccaagaggacgatgaacaacaacgactgaacaagaggaaagatcacaaaaaagccgatgttgaggaagagattaaaataccggttgtgtgcgcgctcacgcaggaggaatcatcggctcagctctccaatgaggaggaacacttagactcaactcggggatcagtccactcccttgatgccggcctcctccttcccagcggcgaccctttcagcaagagcgacaacgacatgtttaaggacggcctaaggcgagcccagtctaccgacagcctcggcacttccggtagcctccagtcaaaggctctgggctacaactacaaagccaaatctgccggaaatcttgatgaatctgacttcggacccctagtgggtgccgactctgtctcggagaattttgacactgcttctcttggatccctgcagatgcccagcgggtttatgctgactaaagaccaggagagagctatcaaggccatgaccccggagcaagaggagacagccagcctcctgtccagcgtcacccagggaatggaaagcgcatatgtttctcccagtggctaccgcctggtcagtgagaccgagtggaatttacttcagaaagaagtgcacaatgcaggcaacaagctgggtagacgatgtgatatgtgctccaattatgaaaagcagctccaagggattcagatccaggaggccgaaactcgggatcaggtcaaaaagctgcaactgatgttgcgccaggcgaacgatcagctagagaaaacaatgaaagataagcaagagcttgaagattttataaaacagtcgtctgaagatagctcacatcaaatcagcgccctagtcttaagggctcaggcaagcgagatcctgctggaagagcttcagcaaggactatcccaggctaaacgagatgtgcaagagcaaatggctgtcctgatgcagagcagagagcaggtgtccgaggaactggttagactccagaaggataatgattctctccaggggaagcactccctgcacgtctcccttcagcaggctgaggatttcattctacccgacaccacagaagcccttcgtgaattagtcctgaaatatcgcgaggatatcatcaatgttcgcacggcagctgatcatgtggaagagaaactgaaggcagaaattctcttcctgaaggaacagattcaggctgaacagtgcctgaaagagaatctggaggagacgctgcagctcgaaatcgagaactgtaaggaagagatcgcctcaatctcctctcttaaggcggagctggaaagaattaaggtggaaaagggacaggcaactgtggagcagctgatgtttgaggaaaaaaataaggcgcagagattgcagacagagctcgacgtatcagagcaagtacagcgagacttcgtgaagctgtctcaaaccctgcaggtccagctcgagaggatacgccaggccgattcactggagagaatccgagcaatcttgaatgatactaaactgacagatatcaaccaattgccagagacttag

SEQ ID NO: 37613 - DNA, 2151 bp, Artificial Sequence
  derived and/or modified sequence
atggcccagcccggccccgccagccagcccgacgtgagcctgcagcagagagtagctgagttggaaaagatcaacgctgaattcctccgggctcaacagcagctcgagcaggagtttaatcaaaagagggcaaagttcaaggaactatatctcgctaaagaagaggatctgaagagacaaaatgcagttctgcaggccgcccaggacgatttaggccacttacgcacccagctgtgggaggcccaagccgaaatggaaaatattaaggctatcgccaccgtttctgaaaacaccaagcaagaagctattgacgaggtcaaaaggcagtggagggaagaagtggctagtttgcaggccgtgatgaaggagaccgtcagagattacgagcaccagttccacctgcgcctggagcaggagcgcactcagtgggctcagtaccgggagagcgcagagagggagattgctgatctgcggcggaggctcagtgaaggtcaggaagaggaaaatctcgaaaacgagatgaagaaggcgcaggaggacgcggaaaaactgagatctgtggtgatgcccatggaaaaggagattgctgctcttaaagacaagcttacagaggcggaggacaagatcaaggaactggaggcttcgaaggttaaagagctgaaccactaccttgaagcagaaaagagctgcagaactgacctggaaatgtacgtggccgtattgaatactcagaaatctgttctccaggaagacgccgagaagctgcgcaaggagctccaccaggaacgccaacaacacaaccagcttaagcacacctggcagaaagcgaatgaccagtttctcgaaagtcaacgcctcctgatgagggacatgcagcgcatggaaatcgtgctgactagtgaacaactccgtcaggtagaggaacttaaaaagaaagatcaggaagatgatgaacaacagaggcttaataagcggaaggatcataaaaaagcggacgtggaagaggaaattaaaattccggtggtgtgtgccttaacacaagaggagtcaagtgcacaattatccaacgaagaagagcacttggattccactagaggttcagtgcatagcttggatgccgggcttctcctaccttctggtgatccgtttagcaagagtgacaatgacatgttcaaggatggactcaggagagctcagagtacagatagcctcgggacaagcggcagcctgcaatcaaaagccctcgggtataattataaggctaagtcagccggtaatctggatgaatccgattttggtcccctggtaggcgccgatagcgtgtcagagaatttcgataccgcaagcctgggttcgctccagatgccctcaggtttcatgcttaccaaagaccaggagagggcaattaaggccatgacaccggagcaggaagaaaccgcaagcctgcttagcagcgtgacccagggaatggagagcgcctatgtcagcccttctggttaccgactagtgagcgagactgagtggaatctcctgcagaaagaagtgcacaatgccggtaacaaattgggaaggcgttgtgacatgtgtagcaactacgaaaaacagttacagggcatccagattcaggaggcggaaactcgcgaccaggtgaagaaattgcagctcatgctccgccaggccaacgaccagcttgagaagactatgaaggacaagcaggaacttgaagactttatcaagcagagctcggaggacagcagccaccaaattagtgctctggtcttgcgcgcacaggcctccgaaatcctgttggaagagcttcagcaggggctgagtcaggccaagcgtgacgtgcaggagcagatggccgttcttatgcagtcccgggagcaggtgagtgaggaattagttcgacttcagaaggataacgactccttgcagggaaagcacagtctgcacgtctctctccagcaggccgaagacttcattctgccagataccacggaagctcttcgagagctcgtgctgaagtaccgtgaggatatcattaacgtcaggaccgccgcagaccatgttgaagagaagttaaaggctgagattttgttcctcaaagaacagatccaagctgagcaatgtctgaagaaaaagaaatag

SEQ ID NO: 37614 - DNA, 2490 bp, Artificial Sequence
  derived and/or modified sequence
atggctcaaccgggaccggcttctcaaccagacgtttctctgcagcaaagggtcgcagagctcgagaagataaacgcggaattccttcgtgcgcagcagcagctcgaacaggagtttaatcagaaacgagcgaaattcaaagaactgtacctggccaaagaggaggatctcaaaagacagaatgctgtgctccaggccgctcaggacgacctcggccacctgcgtacgcagctatgggaagcccaagcagagatggagaacatcaaagccatcgccacggtgtcggagaacactaagcaagaggcgatcgatgaggtcaagcgccagtggagagaggaggtagcctccttgcaagcggtcatgaaggagacagtacgtgactacgaacaccagttccaccttcggctggaacaggaacggacccagtgggcccagtaccgggaatctgccgagcgggaaattgctgatcttaggcgcagactgtcggagggacaagaggaggagaacctggaaaatgagatgaagaaggctcaggaggatgctgagaagcttcgctcagttgtgatgccgatggagaaggagattgccgcacttaaggacaagctcaccgaagccgaggacaaaataaaggagcttgaggcttcaaaggtaaaagagctgaatcactatttggaagccgagaagagctgtagaactgacctggaaatgtacgtcgctgtgctgaatacccagaagtctgtgctgcaagaggacgccgagaagctgcgcaaagaacttcacgaagtttgccatctgctggagcaggagagacagcagcacaaccagctaaaacacacctggcaaaaggcaaatgaccagttcctagagagccagaggctgcttatgcgcgacatgcagagaatggaaattgtgctgactagcgagcagctgcggcaagtcgaggagttgaagaagaaagatcaggaggatgatgagcaacagagactgaataagcgaaaggaccataagaaagcagatgttgaagaggagatcaaaatacccgtggtgtgtgcactgacacaggaggagtccagtgcccaactttccaacgaagaggagcacctggactctacacgagggtctgtacactctctggatgccggtctcctgcttccatctggagatcccttttcaaagtccgacaacgacatgtttaaagatggtctgcgccgagcacaatcgaccgattccttagggactagcggatctctgcagtcgaaagctctggggtacaattataaggctaaaagcgccggaaacctcgacgagtccgattttggtcccctcgtgggagccgactctgtgtctgaaaacttcgatacagcctctctcggatcgcttcaaatgccttccggcttcatgttgacgaaggaccaggaacgggctattaaagcaatgacacccgagcaggaggagacagcgtctctcttgagctcagtcacgcaaggtatggaatctgcttatgtgtcaccttctggctataggttagtgagtgaaacggaatggaatctcctccagaaagaagttcataacgcgggtaataaactcgggcgaagatgtgatatgtgctccaactatgaaaagcagctccaaggaatacaaatacaggaagccgaaactcgagaccaggtgaagaaactccagctgatgttgaggcaggccaatgaccaactcgaaaagaccatgaaggacaaacaggagctggaggacttcatcaagcagtccagcgaggatagctctcatcaaatctccgccttggtattacgagcacaagcatctgagatcctactggaggagctgcaacagggactgtcccaagctaagcgcgatgtccaagaacagatggccgtccttatgcagtcaagggaacaggtcagtgaggagttggtcagactccagaaggacaacgatagcctgcagggtaagcactctctgcatgtctcgctgcaacaggcagaggatttcattcttcccgataccaccgaagccttgcgcgagctggtcttgaagtacagagaggacattatcaacgtgaggaccgcggcagatcatgtcgaggagaagctcaaggccgaaattttgttcctgaaggagcagatccaggctgaacagtgcctcaaggaaaacctagaggagaccctgcagcttgaaattgagaattgtaaggaggagatcgcctcgatatcctctctgaaagccgagttggaaagaatcaaggtcgagaagggccaggctaccgtggagcagctcatgttcgaagagaagaataaggcccagcggctgcagacagagctggatgtgtcggagcaggtgcagagagattttgttaaactttcccagaccttacaggtgcaactggagcgtattcgacaagcagactcattggaaagaatcagagctatcctgaacgacacaaagctgaccgacataaaccagctgccagagacttag

SEQ ID NO: 37615 - DNA, 2490 bp, Artificial Sequence
  derived and/or modified sequence
atggcccaacccggacccgcaagtcagccggacgtgtccctgcaacaaagagtagcagagctggaaaagattaacgcagaattcttacgcgcacagcagcagttagagcaggagtttaatcagaagcgcgcaaaatttaaagagctttacctggctaaggaggaagatctgaaaaggcagaacgccgttctgcaggctgcccaggatgacttgggccacctgcgcacccaactatgggaggcccaagccgaaatggagaatatcaaggcaattgcgactgtgtctgaaaacactaaacaggaggctatagacgaggttaaaagacagtggcgtgaggaggtggcctccttacaggcggttatgaaggaaaccgtcagggactatgaacatcagtttcatctacgtctggaacaggaaaggacccagtgggcacagtatcgggagtctgccgagcgcgagatcgccgacttgcgacgcagattaagtgaagggcaggaggaggagaacctggaaaacgaaatgaaaaaagcacaggaagacgctgaaaagctcaggtcagttgtcatgccaatggagaaggagatcgctgccctcaaggataagctgaccgaagctgaggataaaatcaaggagctagaagccagcaaagtgaaggaactaaaccactatctcgaggccgaaaaatcatgccggaccgacctggaaatgtatgtggcagtactcaatactcagaaaagcgtgttgcaggaagacgcagagaaactgcgaaaggagctgcatgaggtgtgccacctgctcgaacaggagaggcagcagcacaatcagcttaagcacacatggcaaaaggcgaatgaccagttcctggaaagccagcgccttctcatgagggatatgcagcgcatggagatcgtcctgacgtctgagcagttgaggcaagtggaggagctaaaaaagaaagaccaggaggatgacgagcaacaaaggcttaacaagagaaaggatcacaaaaaagccgatgttgaagaggagatcaaaattcccgtcgtgtgcgccctgactcaggaagaaagctccgcccagctctccaacgaagaagaacatctagattcaaccagggggtcagtgcacagtctggatgcaggattgttgctgccttcaggagaccctttctccaagtcagacaacgacatgtttaaggacggtttgagaagagcccaaagtaccgattcactggggacctccggtagcctgcaaagtaaggcacttggctacaactataaggcaaaaagcgccggtaacctggacgagtcggattttgggcctctggtcggagctgatagtgtttccgaaaattttgacactgcatcacttgggtctttgcagatgccttcaggcttcatgcttaccaaagaccaggaacgggcaatcaaagcaatgacacccgagcaggaggagactgcctctctactaagtagtgtcacacagggcatggagtccgcttacgtgtctccatccggctaccggctagtgagtgagacggaatggaacttgctacagaaagaggtgcacaatgccggaaataagttggggagacggtgcgatatgtgcagtaactatgagaagcagctgcagggcattcagatacaagaggccgaaaccagagaccaggtgaagaagttgcagctgatgctccgtcaagccaacgatcagttggagaaaaccatgaaagacaaacaggagttagaggatttcatcaaacagtcgtctgaagattcttcccaccagatatcagccctcgtgctccgagcacaggcgtctgaaattctgctggaggaactccaacagggattgtctcaggcgaagcgggacgtacaagaacagatggccgtgctgatgcaatctagagaacaggtctcagaggagctcgtgagattgcagaaagacaacgactctttgcagggtaagcattccctgcacgtgtctctacagcaagccgaagatttcattctgcctgatacaactgaagcattgcgagagctggtgctgaagtacagagaggacatcatcaacgtccgtactgcagctgatcatgtggaagagaaactgaaggctgaaatactctttctgaaggaacagatccaagcggagcagtgtttgaaagagaacctggaagagaccctccagctggagatcgagaattgtaaggaagagatagcttcaatctctagtctcaaggccgagttggaacggatcaaagtggagaaaggtcaagccaccgtggaacaacttatgttcgaggagaagaataaggctcagcggctgcagacagaactggacgtgtcagagcaggtgcagcgggatttcgttaagctttcacaaactctccaagtgcaactggaacgaatccgacaagcagactcactggagaggattagagctatcctgaatgataccaagttaactgatatcaaccagcttcctgagacgtag

SEQ ID NO: 37616 - DNA, 2151 bp, Artificial Sequence
  derived and/or modified sequence
atggcccaaccaggcccagccagccagcccgatgtgtctttacagcagagggtggcagaattggaaaaaataaacgccgagttccttagggctcagcagcaactcgagcaggagttcaaccagaagagggctaagtttaaggaactgtacctcgcaaaggaggaagatctgaagcgacagaatgcagtactgcaggcagcccaggacgacctgggccatctgcggacacaactttgggaggctcaggctgaaatggaaaatatcaaagctatagcaactgtaagtgagaatacaaaacaagaggctatcgatgaagtcaagaggcagtggagagaagaggtggcctccctccaggctgtcatgaaagaaactgtgagagattacgagcatcagttccacttacgactcgagcaagaaagaactcagtgggcacagtatagggagtcagccgagagagagattgcagatctgcggaggaggttgtccgagggccaagaagaggaaaatctggaaaacgagatgaagaaggcccaggaggatgctgaaaaacttcgcagtgtggtgatgcccatggagaaggaaattgcggctttgaaggacaagttgactgaagccgaggacaagatcaaagagctggaggcctccaaggtaaaggagctgaaccactacctcgaggcagaaaaatcatgccggaccgatctcgaaatgtacgtggccgttctgaacacccaaaaaagtgttctgcaggaggacgcagagaagttacggaaggagttgcaccaggaaaggcagcaacataatcagcttaagcatacttggcagaaggccaacgaccagtttctggagagccagagattactgatgcgggacatgcaacgtatggaaatcgttctgacaagcgagcagctgagacaggtagaggaacttaagaagaaagaccaagaggacgacgaacaacagaggctgaataaaaggaaggatcataaaaaggctgacgtcgaagaggagatcaaaattccagtcgtatgcgcattgacgcaggaagagagttcggcgcagctcagtaacgaggaagaacacttggattccacgcggggaagcgtgcactcactggatgccggtctgctcctgccgtctggcgatccattttcgaaatctgataacgatatgttcaaagatggcctcaggcgtgctcagtctaccgactcccttggaaccagcggctcgctacagtcaaaggccttgggctataactataaagcaaagtccgccggaaatttggatgagagtgactttggcccacttgtcggcgctgatagtgtcagcgagaatttcgatacagcgtccctcggctctctgcagatgcccagcgggttcatgctgaccaaggatcaggaacgagcaattaaagccatgacacctgaacaggaagaaaccgcctcactgcttagtagcgtcacgcagggaatggaatctgcctacgtctcacccagcgggtatcgcctggtatcagagaccgaatggaacctgctccagaaggaggttcacaacgctggcaacaagctgggcaggagatgcgatatgtgttccaattatgaaaagcaactccagggaattcagatccaagaggccgagacacgcgatcaggtgaagaagttacagctaatgcttcggcaggctaatgaccaacttgaaaagacgatgaaggataaacaagaactggaggatttcattaaacagtcttctgaagactcatcccatcagatttccgctctcgtgcttagggcccaggcgtcagaaatacttcttgaagagcttcagcagggactatcgcaggcaaaacgggatgtccaagagcagatggccgttctgatgcaaagccgcgaacaagtgtccgaggagctggtccgcttgcagaaagataatgacagtcttcagggaaagcacagtttgcacgtttctctgcaacaggcagaggactttatcctgcctgacacaactgaggctttacgggaactggtactgaaataccgggaagacattatcaatgtacgcaccgccgcagaccatgtcgaggaaaagttgaaagctgaaatcttatttctgaaggaacagatccaggctgaacaatgtttgaaaaagaagaagtag

SEQ ID NO: 37617 - DNA, 2905 bp, Artificial Sequence
  derived and/or modified sequence
atttcccgctgtcaggatgaggaggcggaggtcggcggtcgggtccgtctctgcccgcggctgtggcggcgccggcggatccagccttagcggtttctctctgggcggcggcggcggcggctcggttgacgcctcctccgccagctgagcccgcgggagcccaggacgccgcttccccgcccatccccgctccccgaggccggccgcctggtcatggcgcagccgggcccggcttcccagcctgacgtttctcttcagcaacgggtagcagaattggaaaaaattaatgcagaatttttacgtgcacaacagcagcttgaacaagaatttaatcaaaagagagcaaaatttaaggagttatatttggctaaagaggaggatctgaagaggcaaaatgcagtattacaagctgcacaagatgatttgggacaccttcgaacccagctgtgggaagctcaagcagagatggagaatattaaggcgattgccacagtctctgagaacaccaagcaagaagctatagatgaagtgaaaagacagtggagagaagaagttgcttcacttcaggctgttatgaaagaaacagttcgtgactatgagcaccagttccaccttaggctggagcaggagcgaacacagtgggcacagtatagagaatccgcagagagggaaatagctgatttaagaagaaggctgtctgaaggtcaagaggaggaaaatttagaaaatgaaatgaaaaaggcccaagaggatgctgagaaacttcggtccgttgtgatgccaatggaaaaggaaattgcagctttgaaggataaactgacagaggctgaagacaaaattaaagagctggaggcctcaaaggttaaagaactgaatcattatctggaagctgagaaatcttgtaggactgatctagagatgtatgtagctgttttgaatactcagaaatctgttctacaggaagatgctgagaaactgcggaaagaattgcatgaagtttgccatctcttggagcaagagcgacaacaacacaaccagttaaaacatacgtggcagaaggccaatgaccagtttctggaatctcagcgtttactgatgagagacatgcagcgaatggagattgtgctaacttcagaacagctccgacaagttgaagaactgaagaagaaagatcaggaggatgatgaacaacaaagactcaataagagaaaggatcacaaaaaagcagatgttgaggaagaaataaaaataccagtagtgtgtgctttaactcaagaagaatcttcagcccagttatcaaatgaagaggagcatttagacagcacccgtggctcagttcattccttagatgcaggcttgctgttgccatctggagatcctttcagtaaatcggacaatgacatgtttaaagatggactcaggagagcacagtctacagacagcttgggaacctcgggctcattgcaatccaaagctttaggctataactacaaagcaaaatctgctggaaacctggacgagtcagattttggaccactggtaggagcagattcagtgtctgagaactttgatactgcatcccttgggtcactccagatgccaagtgggtttatgttaaccaaagatcaggaaagagcaatcaaggcgatgacaccagaacaagaagagacagcgtccctcctctccagcgttacccagggcatggagagtgcctatgtgtcccctagtggttatcgtttagttagtgaaacagaatggaatctcttgcagaaagaggtacataatgctggaaataaacttggtagacgttgtgatatgtgttccaattacgaaaaacagttacaaggaattcagattcaggaggctgaaacgagagaccaggtgaaaaaactacagctgatgctaaggcaagctaatgaccagttagagaagacaatgaaagataagcaggagctggaagacttcataaagcaaagcagcgaagattcgagtcaccagatctctgcactcgtcctaagagcccaggcctccgagatcttacttgaagagttacagcaggggctttcccaggcaaagagggatgttcaggaacagatggcggtgctgatgcagtcacgggaacaggtttcagaagagctggtgaggttacagaaagataatgacagtctccagggaaagcacagcctgcatgtgtcattacagcaagcagaagacttcatcctcccagacactacagaggcactgcgggagttggtattaaaataccgtgaggacatcattaatgtgcggacagcagcagaccacgtagaagaaaagctgaaggctgagatacttttcctaaaagagcagatccaagcagaacagtgtttaaaagaaaatcttgaagaaactctgcaactagaaatagaaaactgcaaggaggaaatagcttctatttctagcctaaaagctgaattagaaagaataaaagtggaaaaaggacaggctaccgttgaacaactaatgtttgaagagaagaataaagctcagagattacagacagaattagatgtcagtgagcaagtccagagggattttgtaaagctttcacagacccttcaggtgcagttagagcggatccggcaagctgactccttggagagaatccgggcaattctgaatgatactaaactgacagacattaaccagcttcctgagacatgacaccctcatggcaggattctagcctgcactttgggtttttaactcatctttagagcaacagtaattattatttaactcttaactgaagaaagagaagtcacaacaaaaggaagactggagaaatgcttacttctagagggagaagactgtgcggcacaggaaacagcaaacagtggggtgatctgcagcccagagaccttca

SEQ ID NO: 37618 - DNA, 5288 bp, Artificial Sequence
  derived and/or modified sequence
gcgcactgcttatttcccgctgtcaggatgaggaggcggaggtcggcggtcgggtccgtctctgcccgcggctgtggcggcgccggcggatccagccttagcggtttctctctgggcggcggcggcggcggctcggttgacgcctcctccgccagctgagcccgcgggagcccaggacgccgcttccccgcccatccccgctccccgaggccggccgcctggtcatggcgcagccgggcccggcttcccagcctgacgtttctcttcagcaacgggtagcagaattggaaaaaattaatgcagaatttttacgtgcacaacagcagcttgaacaagaatttaatcaaaagagagcaaaatttaaggagttatatttggctaaagaggaggatctgaagaggcaaaatgcagtattacaagctgcacaagatgatttgggacaccttcgaacccagctgtgggaagctcaagcagagatggagaatattaaggcgattgccacagtctctgagaacaccaagcaagaagctatagatgaagtgaaaagacagtggagagaagaagttgcttcacttcaggctgttatgaaagaaacagttcgtgactatgagcaccagttccaccttaggctggagcaggagcgaacacagtgggcacagtatagagaatccgcagagagggaaatagctgatttaagaagaaggctgtctgaaggtcaagaggaggaaaatttagaaaatgaaatgaaaaaggcccaagaggatgctgagaaacttcggtccgttgtgatgccaatggaaaaggaaattgcagctttgaaggataaactgacagaggctgaagacaaaattaaagagctggaggcctcaaaggttaaagaactgaatcattatctggaagctgagaaatcttgtaggactgatctagagatgtatgtagctgttttgaatactcagaaatctgttctacaggaagatgctgagaaactgcggaaagaattgcatgaagtttgccatctcttggagcaagagcgacaacaacacaaccagttaaaacatacgtggcagaaggccaatgaccagtttctggaatctcagcgtttactgatgagagacatgcagcgaatggagattgtgctaacttcagaacagctccgacaagttgaagaactgaagaagaaagatcaggaggatgatgaacaacaaagactcaataagagaaaggatcacaaaaaagcagatgttgaggaagaaataaaaataccagtagtgtgtgctttaactcaagaagaatcttcagcccagttatcaaatgaagaggagcatttagacagcacccgtggctcagttcattccttagatgcaggcttgctgttgccatctggagatcctttcagtaaatcggacaatgacatgtttaaagatggactcaggagagcacagtctacagacagcttgggaacctcgggctcattgcaatccaaagctttaggctataactacaaagcaaaatctgctggaaacctggacgagtcagattttggaccactggtaggagcagattcagtgtctgagaactttgatactgcatcccttgggtcactccagatgccaagtgggtttatgttaaccaaagatcaggaaagagcaatcaaggcgatgacaccagaacaagaagagacagcgtccctcctctccagcgttacccagggcatggagagtgcctatgtgtcccctagtggttatcgtttagttagtgaaacagaatggaatctcttgcagaaagaggtacataatgctggaaataaacttggtagacgttgtgatatgtgttccaattacgaaaaacagttacaaggaattcagattcaggaggctgaaacgagagaccaggtgaaaaaactacagctgatgctaaggcaagctaatgaccagttagagaagacaatgaaagataagcaggagctggaagacttcataaagcaaagcagcgaagattcgagtcaccagatctctgcactcgtcctaagagcccaggcctccgagatcttacttgaagagttacagcaggggctttcccaggcaaagagggatgttcaggaacagatggcggtgctgatgcagtcacgggaacaggtttcagaagagctggtgaggttacagaaagataatgacagtctccagggaaagcacagcctgcatgtgtcattacagcaagcagaagacttcatcctcccagacactacagaggcactgcgggagttggtattaaaataccgtgaggacatcattaatgtgcggacagcagcagaccacgtagaagaaaagctgaaggctgagatacttttcctaaaagagcagatccaagcagaacagtgtttaaaagaaaatcttgaagaaactctgcaactagaaatagaaaactgcaaggaggaaatagcttctatttctagcctaaaagctgaattagaaagaataaaagtggaaaaaggacaggctaccgttgaacaactaatgtttgaagagaagaataaagctcagagattacagacagaattagatgtcagtgagcaagtccagagggattttgtaaagctttcacagacccttcaggtgcagttagagcggatccggcaagctgactccttggagagaatccgggcaattctgaatgatactaaactgacagacattaaccagcttcctgagacatgacaccctcatggcaggattctagcctgcactttgggtttttaactcatctttagagcaacagtaattattatttaactcttaactgaagaaagagaagtcacaacaaaaggaagactggagaaatgcttacttctagagggagaagactgtgcggcacaggaaacagcaaacagtggggtgatctgcagcccagagaccttcaaatgcgaacactataaactccaggcttgattccaacaggcgtgggatcagatttggtgatggaaaaagcgctgtttccttgcctgctttctccaagacagattttcggaacacatttccctaccctaaagcgacatcccagtagtgtttggaattttctgttcatatagtgtttggaattttctgttcatagagctcatcagtaacagtattcagttagcagacagaagtgtagtatgctgtatgaatattttatattaaaatatgaaggtttgagagcaggccattggctactgactgtattttgttttccttttaccattttatcttatcttgctttggaggaccttaaatgctactgaaacttacctgagaaccataggactgtggcaaacaaaaccaattcatgaagtgaattaatgatgaggatctgaaaacttggctggggctatatatactggaagttgaaggttaaaggaaaagcacaagaaactttggaagcactttttctgcatacttagatgatcttcatgggcccacagggtaccaggataaagccgaactggtaccatctactcttttgaagtgttttagtctagttattggatcagtgaaaaacattagtatacgtttttaaataggctaatttttcaacttggatcattaggcttacgtactacttgtttcaaatgtgtcaaatacaaaaatggtaactaggttgacagatactttgtatttttcttttgaattcagacctggaatgtaagtaagtgacaatgcttatggaaagccagttagttagaattggaaatctgtcttgtcattttacaagcattagattcctttcctgtgtgaagaaagcctcagtgaaacaggtctttgccataactttatgaagtgctacagaaagcacaaagaattgattcatgttcatcaatacctgctgagagtactgtcccaggaatatccagtggatggattcatcatccaggaggttcaaaagtaagatggttttcaaatcatttttgagactggttgcataacagcagggtacctgaaagagccttctgggagttagtgaactaggtagattgttttgttcacataacgccaccatcaacttaaagtgaattgtctttgttataaatgaggtcactatggacttaccctaaagatcttctgtacttctctcttccataggacaaatgataagtactacatacctcatctcttgggttattattgtagtcttgcattcatggttatgaatttaaaaataaataccaattatggaaatagtactaaaggcttgccgcacatgaaacattattttaattggtttaaagtccctttataaagagtgctacatggtttagataaaggaaacatataactattgagttacaggggattttattaattataaaatgcaatcaatttaaattacgtaggtttaagactagtcccttggataagccccaagcgaatttgtcttcagattattaaaattagtgctgtaaatcagggtgggcaattcacagcctttctgaactgactgaactagagcttgcagtgaagtgttctgctgagactgagcaccttacagatatttttctccagaagatggtgctgggtaataaaatcatcacaattagggaatggttagtggtctctactgtggcaaatgccaactgttggaattcactttattgtagaaaaacccaaactgagactcttaagttttgtttagcaatgtgtttctggtatgaaacaaactactgtgtcactgtccaggtaggaaacaattctttcaactgggttttcagcataaatgggaactgatgtagaaggcaggatttagcccttctaggcaaaagaaaagctcagttgggtttcacgagtgttcctgtgcttatattcagtctgtgcctacatgttctcatgcatgtctaacctgatttacctcttacctgtaacctaccttatcatgtggcttttaattgacagtcactcagccatttctaagcagatatagtagtacctttcagaactcacattggcaagtgtaaaaagatgacttaaggtgaagtgaggacaaaatcacattctgcatactaacctatttttttctccctttaaggtgctaaacttgcacctcatgtccactcagtaacaagtattgggacgtagagcacagcctcactcagctctgaaaggtaatacagcttgtgaggaagtgagccagcagtggcctttgcaattgtggatcttgagctctgctctcagcagatttcaggtgtaaccatttgttaactgtactgaaggtgtgtcctcaagaagaaagtgttcaaattaaaaaagctgctgccaagt

SEQ ID NO: 37619 - DNA, 2363 bp, Artificial Sequence
  derived and/or modified sequence
ttatttcccgctgtcaggatgaggaggcggaggtcggcggtcgggtccgtctctgcccgcggctgtggcggcgccggcggatccagccttagcggtttctctctgggcggcggcggcggcggctcggttgacgcctcctccgccagctgagcccgcgggagcccaggacgccgcttccccgcccatccccgctccccgaggccggccgcctggtcatggcgcagccgggcccggcttcccagcctgacgtttctcttcagcaacgggtagcagaattggaaaaaattaatgcagaatttttacgtgcacaacagcagcttgaacaagaatttaatcaaaagagagcaaaatttaaggagttatatttggctaaagaggaggatctgaagaggcaaaatgcagtattacaagctgcacaagatgatttgggacaccttcgaacccagctgtgggaagctcaagcagagatggagaatattaaggcgattgccacagtctctgagaacaccaagcaagaagctatagatgaagtgaaaagacagtggagagaagaagttgcttcacttcaggctgttatgaaagaaacagttcgtgactatgagcaccagttccaccttaggctggagcaggagcgaacacagtgggcacagtatagagaatccgcagagagggaaatagctgatttaagaagaaggctgtctgaaggtcaagaggaggaaaatttagaaaatgaaatgaaaaaggcccaagaggatgctgagaaacttcggtccgttgtgatgccaatggaaaaggaaattgcagctttgaaggataaactgacagaggctgaagacaaaattaaagagctggaggcctcaaaggttaaagaactgaatcattatctggaagctgagaaatcttgtaggactgatctagagatgtatgtagctgttttgaatactcagaaatctgttctacaggaagatgctgagaaactgcggaaagaattgcatcaagagcgacaacaacacaaccagttaaaacatacgtggcagaaggccaatgaccagtttctggaatctcagcgtttactgatgagagacatgcagcgaatggagattgtgctaacttcagaacagctccgacaagttgaagaactgaagaagaaagatcaggaggatgatgaacaacaaagactcaataagagaaaggatcacaaaaaagcagatgttgaggaagaaataaaaataccagtagtgtgtgctttaactcaagaagaatcttcagcccagttatcaaatgaagaggagcatttagacagcacccgtggctcagttcattccttagatgcaggcttgctgttgccatctggagatcctttcagtaaatcggacaatgacatgtttaaagatggactcaggagagcacagtctacagacagcttgggaacctcgggctcattgcaatccaaagctttaggctataactacaaagcaaaatctgctggaaacctggacgagtcagattttggaccactggtaggagcagattcagtgtctgagaactttgatactgcatcccttgggtcactccagatgccaagtgggtttatgttaaccaaagatcaggaaagagcaatcaaggcgatgacaccagaacaagaagagacagcgtccctcctctccagcgttacccagggcatggagagtgcctatgtgtcccctagtggttatcgtttagttagtgaaacagaatggaatctcttgcagaaagaggtacataatgctggaaataaacttggtagacgttgtgatatgtgttccaattacgaaaaacagttacaaggaattcagattcaggaggctgaaacgagagaccaggtgaaaaaactacagctgatgctaaggcaagctaatgaccagttagagaagacaatgaaagataagcaggagctggaagacttcataaagcaaagcagcgaagattcgagtcaccagatctctgcactcgtcctaagagcccaggcctccgagatcttacttgaagagttacagcaggggctttcccaggcaaagagggatgttcaggaacagatggcggtgctgatgcagtcacgggaacaggtttcagaagagctggtgaggttacagaaagataatgacagtctccagggaaagcacagcctgcatgtgtcattacagcaagcagaagacttcatcctcccagacactacagaggcactgcgggagttggtattaaaataccgtgaggacatcattaatgtgcggacagcagcagaccacgtagaagaaaagctgaaggctgagatacttttcctaaaagagcagatccaagcagaacagtgtttaaaaaaaaaaaaa

SEQ ID NO: 37620 - DNA, 2490 bp, Artificial Sequence
  derived and/or modified sequence
atggcccagcccggccccgccagccagcccgacgtgagcctgcagcagagagtggccgagctggagaagatcaacgccgagttcctgagagcccagcagcagctggagcaggagttcaaccagaagagagccaagttcaaggagctgtacctggccaaggaggaggacctgaagagacagaacgccgtgctgcaggccgcccaggacgacctgggccacctgagaacccagctgtgggaggcccaggccgagatggagaacatcaaggccatcgccaccgtgagcgagaacaccaagcaggaggccatcgacgaggtgaagagacagtggagagaggaggtggccagcctgcaggccgtgatgaaggagaccgtgagagactacgagcaccagttccacctgagactggagcaggagagaacccagtgggcccagtacagagagagcgccgagagagagatcgccgacctgagaagaagactgagcgagggccaggaggaggagaacctggagaacgagatgaagaaggcccaggaggacgccgagaagctgagaagcgtggtgatgcccatggagaaggagatcgccgccctgaaggacaagctgaccgaggccgaggacaagatcaaggagctggaggccagcaaggtgaaggagctgaaccactacctggaggccgagaagagctgcagaaccgacctggagatgtacgtggccgtgctgaacacccagaagagcgtgctgcaggaggacgccgagaagctgagaaaggagctgcacgaggtgtgccacctgctggagcaggagagacagcagcacaaccagctgaagcacacctggcagaaggccaacgaccagttcctggagagccagagactgctgatgagagacatgcagagaatggagatcgtgctgaccagcgagcagctgagacaggtggaggagctgaagaagaaggaccaggaggacgacgagcagcagagactgaacaagagaaaggaccacaagaaggccgacgtggaggaggagatcaagatccccgtggtgtgcgccctgacccaggaggagagcagcgcccagctgagcaacgaggaggagcacctggacagcaccagaggcagcgtgcacagcctggacgccggcctgctgctgcccagcggcgaccccttcagcaagagcgacaacgacatgttcaaggacggcctgagaagagcccagagcaccgacagcctgggcaccagcggcagcctgcagagcaaggccctgggctacaactacaaggccaagagcgccggcaacctggacgagagcgacttcggccccctggtgggcgccgacagcgtgagcgagaacttcgacaccgccagcctgggcagcctgcagatgcccagcggcttcatgctgaccaaggaccaggagagagccatcaaggccatgacccccgagcaggaggagaccgccagcctgctgagcagcgtgacccagggcatggagagcgcctacgtgagccccagcggctacagactggtgagcgagaccgagtggaacctgctgcagaaggaggtgcacaacgccggcaacaagctgggcagaagatgcgacatgtgcagcaactacgagaagcagctgcagggcatccagatccaggaggccgagaccagagaccaggtgaagaagctgcagctgatgctgagacaggccaacgaccagctggagaagaccatgaaggacaagcaggagctggaggacttcatcaagcagagcagcgaggacagcagccaccagatcagcgccctggtgctgagagcccaggccagcgagatcctgctggaggagctgcagcagggcctgagccaggccaagagagacgtgcaggagcagatggccgtgctgatgcagagcagagagcaggtgagcgaggagctggtgagactgcagaaggacaacgacagcctgcagggcaagcacagcctgcacgtgagcctgcagcaggccgaggacttcatcctgcccgacaccaccgaggccctgagagagctggtgctgaagtacagagaggacatcatcaacgtgagaaccgccgccgaccacgtggaggagaagctgaaggccgagatcctgttcctgaaggagcagatccaggccgagcagtgcctgaaggagaacctggaggagaccctgcagctggagatcgagaactgcaaggaggagatcgccagcatcagcagcctgaaggccgagctggagagaatcaaggtggagaagggccaggccaccgtggagcagctgatgttcgaggagaagaacaaggcccagagactgcagaccgagctggacgtgagcgagcaggtgcagagagacttcgtgaagctgagccagaccctgcaggtgcagctggagagaatcagacaggccgacagcctggagagaatcagagccatcctgaacgacaccaagctgaccgacatcaaccagctgcccgagacctag

SEQ ID NO: 37621 - DNA, 2151 bp, Artificial Sequence
  derived and/or modified sequence
atggcccagcccggccccgccagccagcccgacgtgagcctgcagcagagagtggccgagctggagaagatcaacgccgagttcctgagagcccagcagcagctggagcaggagttcaaccagaagagagccaagttcaaggagctgtacctggccaaggaggaggacctgaagagacagaacgccgtgctgcaggccgcccaggacgacctgggccacctgagaacccagctgtgggaggcccaggccgagatggagaacatcaaggccatcgccaccgtgagcgagaacaccaagcaggaggccatcgacgaggtgaagagacagtggagagaggaggtggccagcctgcaggccgtgatgaaggagaccgtgagagactacgagcaccagttccacctgagactggagcaggagagaacccagtgggcccagtacagagagagcgccgagagagagatcgccgacctgagaagaagactgagcgagggccaggaggaggagaacctggagaacgagatgaagaaggcccaggaggacgccgagaagctgagaagcgtggtgatgcccatggagaaggagatcgccgccctgaaggacaagctgaccgaggccgaggacaagatcaaggagctggaggccagcaaggtgaaggagctgaaccactacctggaggccgagaagagctgcagaaccgacctggagatgtacgtggccgtgctgaacacccagaagagcgtgctgcaggaggacgccgagaagctgagaaaggagctgcaccaggagagacagcagcacaaccagctgaagcacacctggcagaaggccaacgaccagttcctggagagccagagactgctgatgagagacatgcagagaatggagatcgtgctgaccagcgagcagctgagacaggtggaggagctgaagaagaaggaccaggaggacgacgagcagcagagactgaacaagagaaaggaccacaagaaggccgacgtggaggaggagatcaagatccccgtggtgtgcgccctgacccaggaggagagcagcgcccagctgagcaacgaggaggagcacctggacagcaccagaggcagcgtgcacagcctggacgccggcctgctgctgcccagcggcgaccccttcagcaagagcgacaacgacatgttcaaggacggcctgagaagagcccagagcaccgacagcctgggcaccagcggcagcctgcagagcaaggccctgggctacaactacaaggccaagagcgccggcaacctggacgagagcgacttcggccccctggtgggcgccgacagcgtgagcgagaacttcgacaccgccagcctgggcagcctgcagatgcccagcggcttcatgctgaccaaggaccaggagagagccatcaaggccatgacccccgagcaggaggagaccgccagcctgctgagcagcgtgacccagggcatggagagcgcctacgtgagccccagcggctacagactggtgagcgagaccgagtggaacctgctgcagaaggaggtgcacaacgccggcaacaagctgggcagaagatgcgacatgtgcagcaactacgagaagcagctgcagggcatccagatccaggaggccgagaccagagaccaggtgaagaagctgcagctgatgctgagacaggccaacgaccagctggagaagaccatgaaggacaagcaggagctggaggacttcatcaagcagagcagcgaggacagcagccaccagatcagcgccctggtgctgagagcccaggccagcgagatcctgctggaggagctgcagcagggcctgagccaggccaagagagacgtgcaggagcagatggccgtgctgatgcagagcagagagcaggtgagcgaggagctggtgagactgcagaaggacaacgacagcctgcagggcaagcacagcctgcacgtgagcctgcagcaggccgaggacttcatcctgcccgacaccaccgaggccctgagagagctggtgctgaagtacagagaggacatcatcaacgtgagaaccgccgccgaccacgtggaggagaagctgaaggccgagatcctgttcctgaaggagcagatccaggccgagcagtgcctgaagaagaagaagtag

SEQ ID NO: 37622 - protein, 345 aa, Artificial Sequence
  derived and/or modified sequence
MAAAEPASSGQQAPAGQGQGQRPPPQPPQAQAPQPPPPPQLGGAGGGSSRHEKSLGLLTTKFVSLLQEAKDGVLDLKAAADTLAVRQKRRIYDITNVLEGIDLIEKKSKNSIQWKGVGAGCNTKEVIDRLRYLKAEIEDLELKERELDQQKLWLQQSIKNVMDDSINNRFSYVTHEDICNCFNGDTLLAIQAPSGTQLEVPIPEMGQNGQKKYQINLKSHSGPIHVLLINKESSSSKPVVFPVPPPDDLTQPSSQSLTPVTPQKSSMATQNLPEQHVSERSQALQQTSATDISSGSISGDIIDELMSSDVFPLLRLSPTPADDYNFNLDDNEGVCDLFDVQILNY

SEQ ID NO: 37623 - DNA, 1038 bp, Artificial Sequence
  derived and/or modified sequence
atggccgccgccgagcccgccagcagcggccagcaggcccccgccggccagggccagggccagagaccccccccccagcccccccaggcccaggccccccagccccccccccccccccagctgggcggcgccggcggcggcagcagcagacacgagaagagcctgggcctgctgaccaccaagttcgtgagcctgctgcaggaggccaaggacggcgtgctggacctgaaggccgccgccgacaccctggccgtgagacagaagagaagaatctacgacatcaccaacgtgctggagggcatcgacctgatcgagaagaagagcaagaacagcatccagtggaagggcgtgggcgccggctgcaacaccaaggaggtgatcgacagactgagatacctgaaggccgagatcgaggacctggagctgaaggagagagagctggaccagcagaagctgtggctgcagcagagcatcaagaacgtgatggacgacagcatcaacaacagattcagctacgtgacccacgaggacatctgcaactgcttcaacggcgacaccctgctggccatccaggcccccagcggcacccagctggaggtgcccatccccgagatgggccagaacggccagaagaagtaccagatcaacctgaagagccacagcggccccatccacgtgctgctgatcaacaaggagagcagcagcagcaagcccgtggtgttccccgtgcccccccccgacgacctgacccagcccagcagccagagcctgacccccgtgaccccccagaagagcagcatggccacccagaacctgcccgagcagcacgtgagcgagagaagccaggccctgcagcagaccagcgccaccgacatcagcagcggcagcatcagcggcgacatcatcgacgagctgatgagcagcgacgtgttccccctgctgagactgagccccacccccgccgacgactacaacttcaacctggacgacaacgagggcgtgtgcgacctgttcgacgtgcagatcctgaactactag

SEQ ID NO: 37624 - DNA, 1038 bp, Artificial Sequence
  derived and/or modified sequence
atggccgccgctgagcccgcttccagcgggcaacaggccccagcggggcagggacagggacagcgcccccctccccagcctccgcaggcacaggccccccagccacctcctccaccacagttaggcggggccgggggcggaagctcccgccacgagaaaagcctgggtctgttgactacaaaattcgtgagtctgctgcaggaggcaaaggacggcgttttggacctcaaagccgccgccgacacgctggccgtaagacagaagaggcgaatctatgatatcactaatgtcctagagggaatcgatctcattgagaagaagtctaagaactcaatccagtggaagggtgtcggcgccggatgcaatactaaagaggttatagaccgccttcgctacttgaaagccgaaatagaagatctggagctgaaagagagggagctcgaccagcagaaactgtggcttcagcagtcaataaaaaatgtgatggacgattccattaacaaccggttttcatatgtgacccacgaggatatctgtaactgttttaatggtgatacactgctcgccatacaagctccttcaggaacccagcttgaagtgcctatacccgagatgggccagaatggtcagaagaaataccagattaatctgaagagccactcagggccaattcatgtgctgctcatcaacaaagagtcatcttcctctaagcctgtggtctttccagtgcctcccccagacgatctgactcagccaagtagccagtccctgactccagtgaccccgcagaaaagcagcatggccacacagaacttgcctgagcagcacgtgtccgaacgcagtcaggctctgcagcaaacctccgctacagacataagctccgggtccataagcggtgacatcatcgacgagctcatgtcttcggacgtattccctctgctccggctgagtccaacccccgctgatgattataactttaatcttgacgacaatgagggcgtgtgcgacctgtttgatgtgcagatcttgaactactag

SEQ ID NO: 37625 - DNA, 1038 bp, Artificial Sequence
  derived and/or modified sequence
atggctgctgctgagcccgccagcagcggccagcaggccccagctggccagggccagggccagaggcccccaccccagcccccccaggcccaggccccccagcccccacctccaccccagctgggcggggccggcggcggcagcagcagacatgagaagagcctgggcctgctgaccaccaagtttgtgtccctgctgcaggaggccaaggatggagtgctggacctgaaggctgctgctgacaccctggccgtgcggcagaagaggcgcatctatgacatcaccaacgtgctggagggcatcgacctgattgagaagaagagcaagaacagcatccagtggaagggcgtgggcgccggctgcaacaccaaggaggtgattgaccggctgcgctacctgaaggccgagattgaggacctggagctgaaggagcgggagctggaccagcagaagctgtggctgcagcagagcatcaagaatgtgatggatgacagcatcaacaaccgcttctcctatgtgacccatgaggacatctgcaactgcttcaatggagacaccctgctggccatccaggcccccagcggcacccagctggaggtgcccatccctgagatgggccagaatggccagaagaagtaccagatcaacctgaagagccacagcggccccatccacgtgctgctgatcaacaaggagagcagcagcagcaagcctgtggtgtttcctgtgcccccaccagatgacctgacccagcccagcagccagagcctgacccctgtgaccccccagaagagctccatggccacccagaacctgcctgagcagcacgtgtctgagaggagccaggccctgcagcagaccagcgccacagacatcagcagcggcagcatcagcggggacatcattgatgagctgatgagcagtgatgtgttccccctgctgcggctgagccccaccccagcagatgactacaacttcaacctggatgacaatgaaggagtgtgtgacctgtttgatgtgcagatcctgaactactag

SEQ ID NO: 37626 - DNA, 1038 bp, Artificial Sequence
  derived and/or modified sequence
atggccgccgccgagcccgccagcagcggccagcaggcccccgccggacagggacaggggcagaggcccccacctcagccccctcaggctcaagccccgcaacctcctccacctcctcagctgggcggcgccgggggtgggtcctcacgccacgagaaaagtctcggtctgctgactactaaatttgtgtctcttctgcaggaagccaaggatggagttcttgacctgaaggccgctgccgatacgctggccgtcaggcagaagaggcgaatctatgatattaccaatgttctcgaaggtatcgaccttatcgagaagaaatctaaaaatagcatccagtggaaaggagttggggcagggtgcaacactaaagaagtgatcgatcgcctgcgttatttgaaagcagagattgaggacctagagttaaaagagagggagctggaccagcagaagctttggctccagcagtccattaaaaatgtcatggacgacagcataaataaccgcttcagctatgtgacccacgaagatatttgcaattgcttcaacggggatacattacttgctatccaggcaccatccggcacacaacttgaggtgccgatcccagaaatgggtcagaacggccagaagaaataccagatcaaccttaaatctcactccggcccaatccacgtgctgctcataaataaagaatcctcatctagcaagccagtggtgtttccagtgccaccacccgatgatttgacccagccgagttcacagagcctcacccccgtaacccctcagaaatcaagcatggctacccaaaatctgcctgagcagcacgtctccgaaagaagccaggcgttacagcagacttctgctaccgacatttcctccgggtccatctcaggtgacattattgacgaactcatgtcttctgatgtttttcctcttctgcgcctgtcccctacaccagccgacgattataatttcaacctcgatgataatgagggcgtttgtgacctcttcgacgtgcagatattaaattactag

SEQ ID NO: 37627 - DNA, 1890 bp, Artificial Sequence
  derived and/or modified sequence
gcggaggcccggcgtgacaagcggcccagactcccgtgggcgccgcacacctgttgtttgcagcagccagcgacccgcactaccgctctcggcgggcggggaagcggccgcagcggagccgacccggcaggtggccgcgggcggggccggcgagcgaaagtgcgcgggggcccgaccaccgcggggccgggacgcgatggcggcggcagagcccgcgagctcgggccagcaggcgccggcagggcaggggcagggccagcggccgccgccgcagcctccgcaggcgcaagccccgcagccgcccccgccgccgcagctcgggggcgccgggggcggcagcagcaggcacgagaagagcctggggctgctcactaccaagttcgtgtcgctgctgcaggaggccaaggacggcgttctggatctcaaagcggctgctgatactttggctgtgaggcaaaaaaggagaatttatgatatcaccaatgtcttagagggaattgacttgattgaaaaaaagtcaaaaaacagtatccagtggaaaggtgtaggtgctggctgtaatactaaagaagtcatagatagattaagatatcttaaagctgaaattgaagatctagaactgaaggaaagagaacttgatcagcagaagttgtggctacagcaaagcatcaaaaatgtgatggacgattccattaataatagattttcctatgtaactcatgaagacatctgtaattgctttaatggtgatacacttttggccattcaggcaccttctggtacacaactggaggtacccattccagaaatgggtcagaatggacaaaagaaataccagatcaatctaaagagtcattcaggacctatccatgtgctgcttataaataaagagtcgagttcatctaagcccgtggtttttcctgttcccccacctgatgacctcacacagccttcctcccagtccttgactccagtgactccacagaaatccagcatggcaactcaaaatctgcctgagcaacatgtctctgaaagaagccaggctctgcagcagacatcagctacagatatatcttcaggatctattagtggagatatcattgatgagttaatgtcttctgacgtgtttcctctcttaaggctttctcctaccccggcagatgactacaactttaatttagatgataacgaaggagtttgtgatctgtttgatgtccagatactaaattattagattccatggaaacttgggactgttatctacctctaactgtgtaacattttagacttcttaataacctaaatatttaaaataatgaatgtaacaccttttttagttcactgattctgaagtgttcttccctaatactttctttacttcacaaaacttcaaccataaaaacaaagggctctgattgctttaggggataagtgatttaatatccacaaacgtccccactcccaaaagtaactatattctggatttcaacttttcttctaattgtgaatccttctgttttttcttcttaaggaggaaagttaaaggacactacaggtcatcaaaaacaagttggccaaggactcattacttgtcttatatttttactgccactaaactgcctgtatttctgtatgtccttctatccaaacagacgttcactgccacttgtaaagtgaaggatgtaaacgaggatatataactgtttcagtgaacagattttgtgaagtgccttctgttttagcactttaagtttatcacattttgttgacttctgacattccactttcctaggttataggaaagatctgtttatgtagtttgtttttaaaatgtgccaatgcctgtacattaacaagatttttaaaaataaaattgtataaaacattcaa

SEQ ID NO: 37628 - DNA, 1038 bp, Artificial Sequence
  derived and/or modified sequence
atggctgccgcagaacctgcatcttccggacagcaagccccagcagggcagggccaagggcaacgaccgcctccacagccgcctcaggcacaggcccctcagcctccaccacctccccagcttggtggcgcaggcggaggcagtagccggcacgagaaaagcctcgggcttctcaccacaaaattcgtcagcttactccaagaagccaaggatggcgtactggacctgaaagcggctgccgacacattagctgtgagacagaagagaagaatctacgatatcacaaacgtcctggaggggatcgacctgatcgaaaaaaaatccaagaatagtatccagtggaagggcgtaggagcaggttgtaacactaaagaagtgattgatcgtctgcgctaccttaaagccgaaattgaggatctcgagctcaaggagcgggaactcgatcaacagaagctctggcttcagcaaagtattaagaatgtcatggatgactccataaacaaccggttttcttatgtgacccacgaagatatttgtaactgctttaatggagacacgctactggctatccaggcgcctagcggcacccagctggaggtcccaatacctgagatgggtcaaaacggacagaaaaagtaccagatcaacttgaaatcacacagtggtccgattcacgtgctcttgataaacaaggagagctcgagctctaaacctgtagtcttcccagtaccacctcccgacgatttaactcaaccctcttcgcaaagcctaacccctgtcaccccacagaaatcaagtatggcaactcagaacttacctgagcagcacgtctcggaaaggagtcaagctttgcaacagacatctgccactgacatcagttccgggagcatctcaggggatatcattgacgagctgatgtcctctgatgtatttccactgcttcgattgtcccctacccctgctgatgattataattttaatctcgatgacaacgagggagtctgcgacctgttcgatgtccagatcctcaattactag

SEQ ID NO: 37629 - protein, 488 aa, Artificial Sequence
  derived and/or modified sequence
MNGALDHSDQPDPDAIKMFVGQIPRSWSEKELKELFEPYGAVYQINVLRDRSQNPPQSKGCCFVTFYTRKAALEAQNALHNIKTLPGMHHPIQMKPADSEKSNAVEDRKLFIGMVSKKCNENDIRVMFSPFGQIEECRILRGPDGLSRGCAFVTFSTRAMAQNAIKAMHQSQTMEGCSSPIVVKFADTQKDKEQRRLQQQLAQQMQQLNTATWGNLTGLGGLTPQYLALLQQATSSSNLGAFSGIQQMAGMNALQLQNLATLAAAAAAAQTSATSTNANPLSTTSSALGALTSPVAASTPNSTAGAAMNSLTSLGTLQGLAGATVGLNNINALAGTINSMAALNGGLGATGLTNGTAGTMDALTQAYSGIQQYAAAALPTLYSQSLLQQQSAAGSQKEGPEGANLFIYHLPQEFGDQDILQMFMPFGNVISAKVFIDKQTNLSKCFGFVSYDNPVSAQAAIQAMNGFQIGMKRLKVQLKRSKNDSKPY

SEQ ID NO: 37630 - DNA, 1497 bp, Artificial Sequence
  derived and/or modified sequence
atgaacggcgccctggaccacagcgaccagcccgaccccgacgccatcaagatgttcgtgggccagatccccagaagctggagcgagaaggagctgaaggagctgttcgagccctacggcgccgtgtaccagatcaacgtgctgagagacagaagccagaaccccccccagagcaagggctgctgcttcgtgaccttctacaccagaaaggccgccctggaggcccagaacgccctgcacaacatcaagaccctgcccggcatgcaccaccccatccagatgaagcccgccgacagcgagaagagcaacgccgtggaggacagaaagctgttcatcggcatggtgagcaagaagtgcaacgagaacgacatcagagtgatgttcagccccttcggccagatcgaggagtgcagaatcctgagaggccccgacggcctgagcagaggctgcgccttcgtgaccttcagcaccagagccatggcccagaacgccatcaaggccatgcaccagagccagaccatggagggctgcagcagccccatcgtggtgaagttcgccgacacccagaaggacaaggagcagagaagactgcagcagcagctggcccagcagatgcagcagctgaacaccgccacctggggcaacctgaccggcctgggcggcctgaccccccagtacctggccctgctgcagcaggccaccagcagcagcaacctgggcgccttcagcggcatccagcagatggccggcatgaacgccctgcagctgcagaacctggccaccctggccgccgccgccgccgccgcccagaccagcgccaccagcaccaacgccaaccccctgagcaccaccagcagcgccctgggcgccctgaccagccccgtggccgccagcacccccaacagcaccgccggcgccgccatgaacagcctgaccagcctgggcaccctgcagggcctggccggcgccaccgtgggcctgaacaacatcaacgccctggccgcccccagaagcaagagactgctgctgcccaaggacaacaacggcatggccgccctgaacggcggcctgggcgccaccggcctgaccaacggcaccgccggcaccatggacgccctgacccaggcctacagcggcatccagcagtacgccgccgccgccctgcccaccctgtacagccagagcctgctgcagcagcagagcgccgccggcagccagaaggagggccccgagggcgccaacctgttcatctaccacctgccccaggagttcggcgaccaggacatcctgcagatgttcatgcccttcggcaacgtgatcagcgccaaggtgttcatcgacaagcagaccaacctgagcaagtgcttcggcttcgtgagctacgacaaccccgtgagcgcccaggccgccatccaggccatgaacggcttccagatcggcatgaagagactgaaggtgcagctgaagagaagcaagaacgacagcaagccctactag

SEQ ID NO: 37631 - DNA, 1467 bp, Artificial Sequence
  derived and/or modified sequence
atgaacggcgccctggaccacagcgaccagcccgaccccgacgccatcaagatgttcgtgggccagatccccagaagctggagcgagaaggagctgaaggagctgttcgagccctacggcgccgtgtaccagatcaacgtgctgagagacagaagccagaaccccccccagagcaagggctgctgcttcgtgaccttctacaccagaaaggccgccctggaggcccagaacgccctgcacaacatcaagaccctgcccggcatgcaccaccccatccagatgaagcccgccgacagcgagaagagcaacgccgtggaggacagaaagctgttcatcggcatggtgagcaagaagtgcaacgagaacgacatcagagtgatgttcagccccttcggccagatcgaggagtgcagaatcctgagaggccccgacggcctgagcagaggctgcgccttcgtgaccttcagcaccagagccatggcccagaacgccatcaaggccatgcaccagagccagaccatggagggctgcagcagccccatcgtggtgaagttcgccgacacccagaaggacaaggagcagagaagactgcagcagcagctggcccagcagatgcagcagctgaacaccgccacctggggcaacctgaccggcctgggcggcctgaccccccagtacctggccctgctgcagcaggccaccagcagcagcaacctgggcgccttcagcggcatccagcagatggccggcatgaacgccctgcagctgcagaacctggccaccctggccgccgccgccgccgccgcccagaccagcgccaccagcaccaacgccaaccccctgagcaccaccagcagcgccctgggcgccctgaccagccccgtggccgccagcacccccaacagcaccgccggcgccgccatgaacagcctgaccagcctgggcaccctgcagggcctggccggcgccaccgtgggcctgaacaacatcaacgccctggccggcaccatcaacagcatggccgccctgaacggcggcctgggcgccaccggcctgaccaacggcaccgccggcaccatggacgccctgacccaggcctacagcggcatccagcagtacgccgccgccgccctgcccaccctgtacagccagagcctgctgcagcagcagagcgccgccggcagccagaaggagggccccgagggcgccaacctgttcatctaccacctgccccaggagttcggcgaccaggacatcctgcagatgttcatgcccttcggcaacgtgatcagcgccaaggtgttcatcgacaagcagaccaacctgagcaagtgcttcggcttcgtgagctacgacaaccccgtgagcgcccaggccgccatccaggccatgaacggcttccagatcggcatgaagagactgaaggtgcagctgaagagaagcaagaacgacagcaagccctactag

SEQ ID NO: 37632 - DNA, 1497 bp, Artificial Sequence
  derived and/or modified sequence
atgaacggggcgctcgaccatagcgaccaacccgaccccgatgccatcaagatgttcgtgggccagatccccaggtcctggagcgagaaggagttgaaggaactatttgaaccttacggcgccgtatatcagattaacgtactcagagaccgtagtcagaatcccccccagtccaaggggtgttgtttcgtgaccttttacacacgcaaggcggccctcgaggcgcagaatgccttgcacaacataaaaacattgccgggtatgcaccaccccatccagatgaaacctgccgacagcgagaagagcaacgccgtcgaagatcgtaagctatttatcggaatggtaagtaagaagtgcaacgagaacgacatacgagtgatgttcagccctttcggccaaatcgaggaatgccgaatcctgaggggccctgacggactgagccggggctgtgcgtttgtcacattctccacccgggcgatggcccagaacgctattaaagctatgcaccaatcccaaactatggagggctgtagcagccccattgtagtcaagtttgccgatacccaaaaggacaaagaacaacggcggctacagcagcagctggctcagcaaatgcagcaactgaacaccgccacttggggcaacctgacgggtcttggcggtctcacaccccagtatctagcccttctccaacaggccacatctagctcgaacctaggcgcctttagtgggattcaacagatggccggtatgaatgctctgcagctccaaaacctggcaacattagccgccgctgccgcagcagcccagacctctgccactagcacgaacgctaaccctctcagtaccacgtcaagcgccctgggtgctctcactagccccgtggccgcctctacgcctaattcaacagctggcgccgccatgaactcgctgacttctctgggaacgctacaaggcctggctggggctacagttggcctgaacaacattaatgcgctcgctgcccctcggagtaagcgcttactgttgcctaaggataacaacggcatggcagcgctgaacggaggattaggggccaccgggctgaccaacggcaccgctggcaccatggacgcgctgacacaggcgtacagtgggattcagcagtatgctgctgcagcgttgcctactctgtattcacaatcactcctacagcagcagagtgcggctgggagccagaaagaaggacctgaaggagctaaccttttcatatatcacctgccccaggagttcggagatcaggatatcctgcagatgttcatgccattcgggaacgtgatatctgcaaaggtgttcatcgataaacagaccaatttgagcaaatgtttcggcttcgtgtcatatgacaatcctgtgagcgcgcaggccgccattcaggcgatgaatgggttccagatcgggatgaagcgcctcaaggtgcagctgaaaagatctaagaacgattctaaaccttactag

SEQ ID NO: 37633 - DNA, 1467 bp, Artificial Sequence
  derived and/or modified sequence
atgaatggggcattagaccacagtgaccagccagaccctgatgctattaaaatgttcgtaggacagatcccaagaagctggtccgagaaagagctgaaagaactgtttgagccatacggggcggtataccaaatcaacgtattacgggacaggagtcagaatccgcctcagagcaaaggctgctgtttcgtgaccttttatacacgcaaggccgccctggaagcccagaacgccctgcacaacattaaaaccttgccaggtatgcatcatcctatccaaatgaagcctgccgactcagagaaatctaacgccgttgaggatcgcaaactgttcatcggaatggtttccaaaaagtgtaacgaaaacgatatccgcgtcatgttttcgccctttgggcagatcgaagagtgtaggatactgaggggtcccgatggcttaagccgagggtgtgcctttgtgactttctctacgagggccatggctcagaacgcaattaaggcaatgcatcagtcgcagacaatggaaggatgctcgtctcctatagtggtgaaattcgcagatacacagaaggacaaagaacaaagacgactacagcagcagctcgcccaacagatgcaacagctgaatactgctacgtggggaaacctgacaggtttaggcggcctgacgccgcagtatctagcactgctgcaacaggcaaccagtagcagcaatctcggggcattctcaggcatccagcaaatggctggtatgaacgctctgcagctacaaaatttggccactctggccgctgcagcagcagctgctcagacctcagcaacaagtactaacgctaatcccttatccaccacatcctcagccttaggagccttaacctctccagtggctgcctcaacgcccaatagtacggctggggctgcaatgaactcattaacctcactgggtaccttgcaaggattggccggcgcaaccgtggggctgaataacattaatgcactcgcagggaccattaactccatggcggctctgaacggagggctcggagccacgggcctaacgaacggtactgccggtaccatggacgctcttacacaggcgtattctggcatccagcagtatgcagctgccgctctgccaaccctgtactcgcaatctttactgcagcaacagagtgccgctggtagtcagaaggagggacccgaaggagccaaccttttcatttaccatctacctcaagaattcggggatcaggatattctgcagatgttcatgccttttgggaacgtgatcagtgccaaggtgtttatcgacaaacagacaaacctgagcaagtgcttcgggttcgtttcttatgacaatcccgtctctgcacaagctgcaatccaggccatgaatggctttcagattggaatgaaacggttgaaggtgcagctcaagagaagcaaaaacgatagtaaaccttactag

SEQ ID NO: 37634 - DNA, 1497 bp, Artificial Sequence
  derived and/or modified sequence
atgaatggagccctggaccacagcgaccagcctgaccctgatgccatcaagatgtttgtgggccagatccccaggtcctggagcgagaaggagctgaaggagctgtttgagccctatggagctgtgtaccagatcaacgtgctgcgggacaggagccagaaccccccccagagcaagggctgctgctttgtgaccttctacaccaggaaggccgccctggaggcccagaatgccctgcacaacatcaagaccctgcccggcatgcaccaccccatccagatgaagccagctgacagcgagaagagcaatgctgtggaggacaggaagctgttcatcggcatggtgtccaagaagtgcaatgaaaatgacatccgggtgatgttcagccccttcggccagatcgaggagtgccgcatcctgcggggcccagatggcctgagccggggctgtgcctttgtgaccttcagcacccgggccatggcccagaatgccatcaaggccatgcaccagagccagaccatggagggctgcagcagccccatcgtggtgaagtttgctgacacccagaaggacaaggagcagaggcggctgcagcagcagctggcccagcagatgcagcagctgaacacagccacctggggcaacctgaccggcctgggcggcctgaccccccagtacctggccctgctgcagcaggccaccagcagcagcaacctgggcgccttcagcggcatccagcagatggccggcatgaatgccctgcagctgcagaacctggccaccctggccgctgctgctgctgctgcccagaccagcgccaccagcaccaatgccaaccccctgagcaccaccagcagcgccctgggcgccctgaccagccctgtggccgccagcacccccaacagcacagctggggccgccatgaacagcctgaccagcctgggcaccctgcagggcctggccggggccaccgtgggcctgaacaacatcaatgccctggccgcccccaggagcaagaggctgctgctgcccaaggacaacaacggcatggccgccctgaatggaggcctgggcgccaccggcctgaccaacggcacagctggcaccatggatgccctgacccaggcctacagcggcatccagcagtatgctgctgctgccctgcccaccctgtacagccagagcctgctgcagcagcagagcgctgctggcagccagaaggagggccctgagggcgccaacctcttcatctaccacctgccccaggagtttggagaccaggacatcctgcagatgttcatgccctttggaaatgtcatcagcgccaaggtgttcatcgacaagcagaccaacctgagcaagtgcttcggctttgtgtcctatgacaaccctgtgtctgcccaggccgccatccaggccatgaatggcttccagatcggcatgaagaggctgaaggtgcagctgaagaggagcaagaatgacagcaagccctactag

SEQ ID NO: 37635 - DNA, 1467 bp, Artificial Sequence
  derived and/or modified sequence
atgaatggagccctggaccacagcgaccagcctgaccctgatgccatcaagatgtttgtgggccagatccccaggtcctggagcgagaaggagctgaaggagctgtttgagccctatggagctgtgtaccagatcaacgtgctgcgggacaggagccagaaccccccccagagcaagggctgctgctttgtgaccttctacaccaggaaggccgccctggaggcccagaatgccctgcacaacatcaagaccctgcccggcatgcaccaccccatccagatgaagccagctgacagcgagaagagcaatgctgtggaggacaggaagctgttcatcggcatggtgtccaagaagtgcaatgaaaatgacatccgggtgatgttcagccccttcggccagatcgaggagtgccgcatcctgcggggcccagatggcctgagccggggctgtgcctttgtgaccttcagcacccgggccatggcccagaatgccatcaaggccatgcaccagagccagaccatggagggctgcagcagccccatcgtggtgaagtttgctgacacccagaaggacaaggagcagaggcggctgcagcagcagctggcccagcagatgcagcagctgaacacagccacctggggcaacctgaccggcctgggcggcctgaccccccagtacctggccctgctgcagcaggccaccagcagcagcaacctgggcgccttcagcggcatccagcagatggccggcatgaatgccctgcagctgcagaacctggccaccctggccgctgctgctgctgctgcccagaccagcgccaccagcaccaatgccaaccccctgagcaccaccagcagcgccctgggcgccctgaccagccctgtggccgccagcacccccaacagcacagctggggccgccatgaacagcctgaccagcctgggcaccctgcagggcctggccggggccaccgtgggcctgaacaacatcaatgccctggccggcaccatcaacagcatggccgccctgaatggaggcctgggcgccaccggcctgaccaacggcacagctggcaccatggatgccctgacccaggcctacagcggcatccagcagtatgctgctgctgccctgcccaccctgtacagccagagcctgctgcagcagcagagcgctgctggcagccagaaggagggccctgagggcgccaacctcttcatctaccacctgccccaggagtttggagaccaggacatcctgcagatgttcatgccctttggaaatgtcatcagcgccaaggtgttcatcgacaagcagaccaacctgagcaagtgcttcggctttgtgtcctatgacaaccctgtgtctgcccaggccgccatccaggccatgaatggcttccagatcggcatgaagaggctgaaggtgcagctgaagaggagcaagaatgacagcaagccctactag

SEQ ID NO: 37636 - DNA, 1497 bp, Artificial Sequence
  derived and/or modified sequence
atgaacggcgccctggaccacagcgaccagcccgaccccgacgccatcaagatgttcgtgggccaaattcctcgcagctggtccgagaaagagctgaaagaactgttcgaaccttatggtgccgtataccagatcaatgtcctacgggatcggagccagaatcccccccagagcaagggatgctgttttgtgacgttttacacccgcaaagctgccctcgaggcacagaacgcgctgcacaatattaaaaccctgcctggcatgcaccaccctatccagatgaagccagcggactcagagaaatctaatgctgtggaagatagaaagctgttcatcggcatggtgagtaagaaatgcaacgaaaacgatataagggtgatgttctctcccttcggacagatcgaggagtgccggattctccgtgggcctgacggattgtcacggggatgtgcctttgtaacattctcaaccagagccatggctcagaacgctattaaagcaatgcatcagtctcaaacaatggagggctgcagcagccccatcgtagtaaaattcgcagatactcagaaagacaaagaacagagaaggctacagcagcagctcgcacagcaaatgcaacagttgaacacggcaacctggggcaacctgacggggcttggtgggctgaccccacaatacctcgcactcctccagcaggctacatctagctccaatctgggagcattctccggaattcaacagatggccgggatgaacgctcttcagctacagaacctagcgacactcgcggccgccgctgccgctgcacagacgagtgcgacctcgacgaatgctaacccactgtctaccacctcgagcgcactcggggcactcactagcccagtggccgccagtacccctaattccaccgccggcgcggccatgaactccttgacatcgttaggaacattgcaaggcctggccggcgccacagtcggtctcaacaacattaatgctctggccgctccgaggagcaagagactgctgctgccaaaagacaataatggtatggccgcattgaatggaggtctaggtgctacaggcctcacgaatgggacggccgggacaatggatgccctgacccaagcctactccggcatccagcagtacgccgcagctgcgcttcccactctctattcacaaagcctgctccaacagcaatccgcggccggaagccagaaggaaggccccgagggcgcgaacttattcatatatcatctgccacaagagtttggagatcaggatattctgcagatgttcatgcccttcggaaatgtcatttcagccaaagtctttattgataaacaaacaaacctcagcaaatgcttcgggtttgtttcctatgataatccagtgtcagcgcaggcagcgatacaggctatgaacggatttcaaatagggatgaagcggttaaaggtgcagctcaagcgctcaaagaacgactctaagccttattag

SEQ ID NO: 37637 - DNA, 1467 bp, Artificial Sequence
  derived and/or modified sequence
atgaacggcgccctggaccacagcgaccagcccgaccccgacgccatcaaaatgtttgtggggcagatccccagatcttggagcgaaaaggagttgaaggagttgttcgaaccctacggcgctgtgtatcagatcaatgttctgagagatcgatcacaaaatccacctcagtccaaaggctgctgttttgtcaccttttacacacggaaggccgctctcgaggcgcagaacgccttgcacaatattaagacgctccccgggatgcatcaccccatccagatgaagccggcagattcagagaaatcaaacgccgtagaggataggaagctgtttatagggatggtaagcaaaaaatgtaatgaaaatgacatcagggtaatgttctccccatttggccagattgaagagtgccgcattctgaggggtcccgacgggctgagccgcggttgtgcctttgtgacattctccaccagggccatggcccagaatgccatcaaggccatgcaccagagtcagacaatggaagggtgcagctctccgatcgtggtcaagtttgccgacactcaaaaggataaagaacagcgacggctccagcagcaacttgcgcagcaaatgcagcagctgaacacggctacctgggggaacctgactggattgggcggactcactccgcagtacctagctctcctgcagcaggctacctcaagcagcaatctgggggctttctctggtattcagcagatggctggcatgaatgcgctccaactgcagaatttggccacactggctgctgccgcagcagccgcacaaactagcgccacttctaccaacgccaatccactctcaacaaccagctctgccctgggcgcccttacctcccccgtggcggcttccaccccgaatagcacagccggcgctgcgatgaattccctgacatctctggggaccctgcaaggattagccggcgctacagtggggcttaataatatcaatgcactggccggtacaattaatagcatggccgccttgaatggaggacttggagcaaccgggctgactaacggtacggctggcactatggatgcactgacccaggcctactctggcattcagcagtatgctgctgcagccctgcccacattatattcacagtccctgctccaacagcagtccgccgctggttcccagaaagagggtcctgagggggcgaatttgtttatttaccacctcccacaggaatttggagatcaagacatcttgcagatgtttatgccattcggtaatgttatctcagccaaggtgtttatagataaacagacgaacctgtccaagtgttttgggtttgtttcatacgataacccagtgagcgcccaggctgccatccaggccatgaacggctttcagatcggcatgaaacgcctgaaggttcaactgaagcggtccaagaacgatagcaaaccctattag

SEQ ID NO: 37638 - DNA, 1497 bp, Artificial Sequence
  derived and/or modified sequence
atgaacggggcactggatcactctgatcagcctgatcctgacgccatcaaaatgttcgtggggcaaattccaagatcatggagcgagaaagagctgaaggagctcttcgaaccatacggggctgtgtatcagataaatgttctacgtgaccgatcacagaatcctcctcagtctaaaggttgctgttttgtgacgttctacacgagaaaagcagcattggaggcccagaacgcgctacataatatcaaaaccctgcctggaatgcatcatcccattcagatgaagccagcggattctgagaagagcaacgccgtagaagaccggaagctgtttatcggcatggttagcaagaagtgcaatgaaaacgacattcgggttatgtttagccccttcggacagatagaagagtgcagaatccttaggggaccggatggactttcccgcggatgcgcatttgtgacattctctacgagggccatggctcaaaatgctattaaggcaatgcatcagagccagaccatggagggttgtagctcgcccatcgtggttaaattcgcagatactcaaaaagataaagagcagcggagacttcagcagcagctggcgcagcagatgcagcaactgaatacggccacctggggtaatttgaccggcctgggcggtctcacgccacagtacttagcactcttacagcaggcgacatccagctcaaatcttggggcattttctgggattcagcaaatggccggtatgaacgccctgcaactgcagaacctcgccactcttgctgccgctgctgccgcagctcagacctctgctacctccacaaacgctaatcccctgagcactaccagttcagctctcggagccttgacatctccggttgccgctagcaccccaaattccactgctggcgcagccatgaattcactgacctcacttggtactctgcaaggccttgccggagccaccgtgggcttgaacaacatcaacgcccttgctgctcccagatcaaagagactcctcctgcctaaggacaacaatggcatggccgctttgaatggaggactcggggctactggtctgacaaacggaacagcaggcacaatggatgccctgacacaggcttactccggcatccagcaatacgcagctgcagctttgccaacactctacagccagagtttacttcagcaacaatcagccgctgggtcacagaaagaggggccagagggagctaatctctttatttatcacctccctcaggagtttggcgaccaagacatcctgcaaatgtttatgccctttggaaatgtgatctccgccaaggtgtttattgataaacagacaaacctgtccaaatgtttcggatttgtgtcctacgacaaccccgtgtcagcgcaggctgccatccaggctatgaatggattccagataggcatgaaaaggcttaaagtgcagttgaagcgcagcaaaaacgactctaagccttactag

SEQ ID NO: 37639 - DNA, 1467 bp, Artificial Sequence
  derived and/or modified sequence
atgaacggcgctctcgaccatagcgaccaacctgatccggacgcaattaaaatgttcgtggggcagattcccaggtcgtggtccgagaaggagttgaaagagctgtttgaaccctacggtgcggtctatcagatcaacgtgttacgcgatcgctctcagaacccaccacagagtaagggctgttgcttcgttactttctatacgagaaaagcagccctggaagcccagaatgccctccacaatataaagaccctgcccggaatgcaccatcccattcagatgaagcccgctgattccgagaaaagtaacgctgtcgaagaccgaaaattgttcatcggcatggtgagcaagaagtgcaacgagaatgatattcgcgttatgttctcgcctttcggccagatcgaggagtgccgaattctgagaggaccggacggcttatcacgaggttgtgcttttgtcacgttcagtactcgtgctatggcgcagaacgctatcaaggctatgcaccagtcccagaccatggagggctgtagttcccctattgttgtgaagtttgccgatacgcagaaggataaggagcagcggcgactccaacagcagctagcccagcagatgcaacagttgaatactgcgacatggggcaacctgaccggactcgggggactgacccctcaatacttggctctgctgcagcaggcaaccagctcctccaatctgggggctttcagcggtatacagcagatggccggtatgaatgccctccagcttcagaacctggccaccctagctgccgctgcagctgctgcacagacttccgctacttctactaatgctaatccgctgagcaccaccagctccgctctgggggctctgacgtcaccggtcgcagcttccacccctaactctactgcaggagccgctatgaattcgctaacatctcttgggaccttacaggggctggctggggctactgtcggtctgaataatattaacgctctggcaggcaccatcaatagcatggctgctctgaacggcggactgggagccactggactgacgaacgggacagcaggcaccatggacgcacttacccaggcatactctgggattcagcagtacgcagccgcagctctgcctaccctctactcacagtccctgctgcagcaacagagcgctgccggaagccagaaggagggccctgaaggcgcaaacttgttcatttatcatctgcctcaagagttcggcgatcaggacattctacagatgtttatgcccttcggaaatgtcatcagcgccaaagtatttattgataagcaaactaatctttccaaatgtttcggattcgtttcctatgacaacccagtcagtgcacaagccgctattcaggccatgaatggcttccagattgggatgaaacgcctgaaggtccagctaaaaagatccaaaaacgatagcaagccatactag

SEQ ID NO: 37640 - protein, 242 aa, Artificial Sequence
  derived and/or modified sequence
MTEVVPSSALSEVSLRLLCHDDIDTVKHLCGDWFPIEYPDSWYRDITSNKKFFSLAATYRGAIVGMIVAEIKNRTKIHKEDGDILASNFSVDTQVAYILSLGVVKEFRKHGIGSLLLESLKDHISTTAQDHCKAIYLHVLTTNNTAINFYENRDFKQHHYLPYYYSIRGVLKDGFTYVLYINGGHPPWTILDYIQHLGSALASLSPCSIPHRVYRQAHSLLCSFLPWSGISSKSGIEYSRTM

SEQ ID NO: 37641 - DNA, 729 bp, Artificial Sequence
  derived and/or modified sequence
atgaccgaagttgtcccatcctctgctctgagcgaggtctctctgaggctgctctgtcacgacgacatcgacacggtgaagcatttgtgtggagactggtttcccatagagtatcccgatagctggtacagagatattacttccaataagaaatttttcagcctagccgcaacgtaccggggcgctatcgtcgggatgatcgtggcggagataaagaatcgcaccaaaatacacaaagaagatggtgatatcctggcttcaaatttctccgtggatactcaggtggcttacattttatctttgggcgtggtgaaggaattcagaaagcacggaatcggctcccttctgctggagagcctcaaggatcatataagcaccactgctcaggaccactgtaaggccatctaccttcacgttttgaccactaataacaccgccatcaacttttatgaaaacagggactttaagcagcaccactatctgccctactattattccattcgaggagtgttgaaagatggattcacctatgtattatacattaacggcggacatcctccttggaccatcctagactacatccagcacctggggagcgccctggctagtctttctccttgtagtataccacatagggtgtaccgccaagctcattcccttctttgttcctttttgccttggagcggcatctcaagtaagtcgggtatcgaatatagccgaaccatgtag

SEQ ID NO: 37642 - DNA, 729 bp, Artificial Sequence
  derived and/or modified sequence
atgaccgaagtggtgccttcctcggccctctcagaggtgtcactgagattgctttgtcatgacgacatcgatacggtcaaacacctatgcggcgactggttcccaattgaatatccagactcttggtacagggatataacatccaataagaaattctttagtctcgcggctacctatcggggcgccattgtcggaatgatcgttgctgaaattaagaacaggacgaaaatccacaaggaggatggcgatattttggcctctaacttttcagtcgacactcaagtggcatatattctttctctgggtgtcgtcaaagaattccgtaaacacggtatcggctcccttttactcgagtccttgaaagaccacatcagcactaccgcccaggaccattgcaaggctatttacctgcatgtgctaacaaccaacaatacagctatcaatttctatgaaaatagagatttcaagcagcatcactatctgccctattactacagcattcgtggggtgcttaaggacggcttcacatacgtcctgtatatcaatgggggccaccccccatggacaattttggattacattcaacacttaggttccgctcttgctagtctgtctccatgctcaatcccccaccgcgtttaccgccaagctcacagcctcctgtgctcctttctgccatggagcggaattagctccaagtcaggaatcgagtacagcagaaccatgtag

SEQ ID NO: 37643 - DNA, 729 bp, Artificial Sequence
  derived and/or modified sequence
atgacagaggtggtgcccagcagcgccctgtctgaggtgtccctgcggctgctgtgccatgatgacatcgacacagtgaagcacctgtgtggggactggttccccatcgagtacccagacagctggtacagagacatcaccagcaacaagaagttcttcagcctggccgccacctacagaggagccatcgtgggcatgattgtggccgagatcaagaacagaaccaagatccacaaggaggatggagacatcctggccagcaacttctctgtggacacccaggtggcctacatcctgagcctgggcgtggtgaaggagttcaggaagcacggcatcggcagcctgctgctggagagcctgaaggaccacatcagcaccacagcccaggaccactgcaaggccatctacctgcacgtgctgaccaccaacaacacagccatcaacttctatgaaaatagagacttcaagcagcaccactacctgccctactactacagcatccggggcgtgctgaaggatggcttcacctacgtgctgtacatcaatggaggccaccccccctggaccatcctggactacatccagcacctgggcagcgccctggccagcctgagcccctgcagcatcccccaccgggtgtaccggcaggcccacagcctgctgtgcagcttcctgccctggagcggcatcagcagcaagagcggcatcgagtacagcaggaccatgtag

SEQ ID NO: 37644 - DNA, 2522 bp, Artificial Sequence
  derived and/or modified sequence
tccgggctgcgctgccggcagggagcgggaggcggaagtgccgcgggctgccgcctccgtcccggctgcggcccctgccggttacataactcgttgcgggctccgcgcggtcccacttcccggctcccttcgcctccaggatgcgctgagccctacaacacccccagcggccgccggctcccccacgaggtacccagactcatggtatcgtgatatcacatccaacaagaagttcttttcccttgctgcaacctacagaggtgccattgtgggaatgatagtagctgaaattaagaacaggaccaaaatacataaagaggatggagatattctagcatccaacttctctgttgacacacaagtcgcgtacatcctaagtctgggcgtcgtgaaagagttcaggaagcacggcataggttccctcttacttgaaagtttaaaggatcacatatcaaccaccgcccaggaccactgcaaagccatttacctgcatgtcctcaccaccaacaacacagcaataaacttctatgaaaacagagacttcaagcagcaccactatctcccctattactactccattcgaggggtcctcaaagatggcttcacctatgtcctctacatcaacggcggccaccctccctggacgattttggactacatccagcacctgggctctgcactagccagcctgagcccctgctccattccgcacagagtctaccgccaggcccacagcctgctctgcagcttcctgccatggtcgggcatctcttccaagagtggcatcgagtacagccggaccatgtgatgtcggctgggcagccgccaccaggccccacccttcggccgcccgcagagcccgccttcctgtccatctgaccccttctgttttctgcaaggagctgccagccatctaactgggctcgtcggcctgccccagctgcaggcccggtgctacacgggctcgggaacagaacatcgtgggcatgcgcagagcatgcccatccgtggcaggtacgccacagcagacacaaaggctcttcagctcccctccctgcttctggaaacctctgcctgctgccctggccctgcccccctgcgcatgcaccgtccccagggctgacccagtgtggctgcattcactgggaggggcctgccctcactgggcctctcccactccgctgcctgttcttgcagctccttcctggaaagctggaggggactttctcctgcaagggaggaacgcaagtattatggacacacttgaccgtaaaggcacaggagcctcggaacaagggggcgcaataaagggaatggcccgtccccttccagaaccagcccaaagaagcctggggggtgaggagtggcccccactcctccatgaggggctgatgaggggtgggcagcctgggggaggctttcctcgcaagcacagagctctgaggctcagccccctggcacaggcggtcacgcatcaggacggttcctactcctcagcaccttccgtgcagttaccagtgccctgggaggtcacactgcccgtcggaccttggcatgctccattcagctgacctgctgaggacaggcatcgccgagactccttgggtcctccccgccctccctcatgctgccacaagctgctgctccaaggcctggccacatgcagacaggaggaagctgagctcgacattaggcctcaaggctgccatctgtcttgtagggcctggccttgtgggcagggggcagtcctgtgccttgtgggccctcagcctctgagggcagagatgctgtcagtgccgcaggtgcatcacatacttctagcatcctctccaccctgcattccaaatgctgcttgctgcctgccctgccctccgatgcaggggtggggtggggggcggagtcccgcccagcatagctgcagtgtcacaaagccatggcagagggtcctagcggcgccaccctgccccagcctgaggaggagggagagggaggaacaaccctgggcagacggggcctcagggacctgtgtccttccgcctccagagctgcccagccacgggctctcagggtgctggggcagccccaggtcccctcttgaactcagctggggccaggggccctcagaatgaaggcaggcaccaggcaggagcagcatccccctccttgacggtgctggcaggagggccgcgccatgctgactgcttgaacctctgctgacctgacagtgctggcgggagggccgcaccatgctgactgcctgaatctctgctgaggctgcctgcctgccgggcccagctcagcgccctctccactgcgaatcagtggcgatcatgtgatttctatttctgccccacagggtaagggacgagtcttctggaaggctctgccatggacatttgtcctcgggctcagaggccccaccctgccccacacctgcccctgatcactgcagtgtccagcccagtgttgaacagattgtagcgttctgtctcattacgagcaaataaatagactttcattgg

SEQ ID NO: 37645 - DNA, 2601 bp, Artificial Sequence
  derived and/or modified sequence
gtagagtcttagggtgaccccagggggacgtaatgtttccgagaagaaggacagaaagaagactgggagacaccggaactcgaaagaaaatcggtaacaaaatcatacagaaaggctgtacctggaggaaggaagtgcggagccagcctgagttgggagaagagctccagagagtgtgaatgacagaggtggtgccatccagcgcgctcagcgaggtcagcctgcgcctcctctgccacgatgacatagacactgtgaagcacctgtgtggcgactggttccccatcgagtacccagactcatggtatcgtgatatcacatccaacaagaagttcttttcccttgctgcaacctacagaggtgccattgtgggaatgatagtagctgaaattaagaacaggaccaaaatacataaagaggatggagatattctagcatccaacttctctgttgacacacaagtcgcgtacatcctaagtctgggcgtcgtgaaagagttcaggaagcacggcataggttccctcttacttgaaagtttaaaggatcacatatcaaccaccgcccaggaccactgcaaagccatttacctgcatgtcctcaccaccaacaacacagcaataaacttctatgaaaacagagacttcaagcagcaccactatctcccctattactactccattcgaggggtcctcaaagatggcttcacctatgtcctctacatcaacggcggccaccctccctggacgattttggactacatccagcacctgggctctgcactagccagcctgagcccctgctccattccgcacagagtctaccgccaggcccacagcctgctctgcagcttcctgccatggtcgggcatctcttccaagagtggcatcgagtacagccggaccatgtgatgtcggctgggcagccgccaccaggccccacccttcggccgcccgcagagcccgccttcctgtccatctgaccccttctgttttctgcaaggagctgccagccatctaactgggctcgtcggcctgccccagctgcaggcccggtgctacacgggctcgggaacagaacatcgtgggcatgcgcagagcatgcccatccgtggcaggctcttcagctcccctccctgcttctggaaacctctgcctgctgccctggccctgcccccctgcgcatgcaccgtccccagggctgacccagtgtggctgcattcactgggaggggcctgccctcactgggcctctcccactccgctgcctgttcttgcagctccttcctggaaagctggaggggactttctcctgcaagggaggaacgcaagtattatggacacacttgaccgtaaaggcacaggagcctcggaacaagggggcgcaataaagggaatggcccgtccccttccagaaccagcccaaagaagcctggggggtgaggagtggcccccactcctccatgaggggctgatgaggggtgggcagcctgggggaggctttcctcgcaagcacagagctctgaggctcagccccctggcacaggcggtcacgcatcaggacggttcctactcctcagcaccttccgtgcagttaccagtgccctgggaggtcacactgcccgtcggaccttggcatgctccattcagctgacctgctgaggacaggcatcgccgagactccttgggtcctccccgccctccctcatgctgccacaagctgctgctccaaggcctggccacatgcagacaggaggaagctgagctcgacattaggcctcaaggctgccatctgtcttgtagggcctggccttgtgggcagggggcagtcctgtgccttgtgggccctcagcctctgagggcagagatgctgtcagtgccgcaggtgcatcacatacttctagcatcctctccaccctgcattccaaatgctgcttgctgcctgccctgccctccgatgcaggggtggggtggggggcggagtcccgcccagcatagctgcagtgtcacaaagccatggcagagggtcctagcggcgccaccctgccccagcctgaggaggagggagagggaggaacaaccctgggcagacggggcctcagggacctgtgtccttccgcctccagagctgcccagccacgggctctcagggtgctggggcagccccaggtcccctcttgaactcagctggggccaggggccctcagaatgaaggcaggcaccaggcaggagcagcatccccctccttgacggtgctggcaggagggccgcgccatgctgactgcttgaacctctgctgacctgacagtgctggcgggagggccgcaccatgctgactgcctgaatctctgctgaggctgcctgcctgccgggcccagctcagcgccctctccactgcgaatcagtggcgatcatgtgatttctatttctgccccacagggtaagggacgagtcttctggaaggctctgccatggacatttgtcctcgggctcagaggccccaccctgccccacacctgcccctgatcactgcagtgtccagcccagtgttgaacagattgtagcgttctgtctcattacgagcaaataaatagactttcattgga

SEQ ID NO: 37646 - DNA, 2647 bp, Artificial Sequence
  derived and/or modified sequence
ttccgggctgcgctgccggcagggagcgggaggcggaagtgccgcgggctgccgcctccgtcccggctgcggcccctgccggttacataactcgttgcgggctccgcgcggtcccacttcccggctcccttcgcctccaggatgcgctgagccctacaacacccccagcggccgccggctcccccacgaggtgtgaatgacagaggtggtgccatccagcgcgctcagcgaggtcagcctgcgcctcctctgccacgatgacatagacactgtgaagcacctgtgtggcgactggttccccatcgagtacccagactcatggtatcgtgatatcacatccaacaagaagttcttttcccttgctgcaacctacagaggtgccattgtgggaatgatagtagctgaaattaagaacaggaccaaaatacataaagaggatggagatattctagcatccaacttctctgttgacacacaagtcgcgtacatcctaagtctgggcgtcgtgaaagagttcaggaagcacggcataggttccctcttacttgaaagtttaaaggatcacatatcaaccaccgcccaggaccactgcaaagccatttacctgcatgtcctcaccaccaacaacacagcaataaacttctatgaaaacagagacttcaagcagcaccactatctcccctattactactccattcgaggggtcctcaaagatggcttcacctatgtcctctacatcaacggcggccaccctccctggacgattttggactacatccagcacctgggctctgcactagccagcctgagcccctgctccattccgcacagagtctaccgccaggcccacagcctgctctgcagcttcctgccatggtcgggcatctcttccaagagtggcatcgagtacagccggaccatgtgatgtcggctgggcagccgccaccaggccccacccttcggccgcccgcagagcccgccttcctgtccatctgaccccttctgttttctgcaaggagctgccagccatctaactgggctcgtcggcctgccccagctgcaggcccggtgctacacgggctcgggaacagaacatcgtgggcatgcgcagagcatgcccatccgtggcaggtacgccacagcagacacaaaggctcttcagctcccctccctgcttctggaaacctctgcctgctgccctggccctgcccccctgcgcatgcaccgtccccagggctgacccagtgtggctgcattcactgggaggggcctgccctcactgggcctctcccactccgctgcctgttcttgcagctccttcctggaaagctggaggggactttctcctgcaagggaggaacgcaagtattatggacacacttgaccgtaaaggcacaggagcctcggaacaagggggcgcaataaagggaatggcccgtccccttccagaaccagcccaaagaagcctggggggtgaggagtggcccccactcctccatgaggggctgatgaggggtgggcagcctgggggaggctttcctcgcaagcacagagctctgaggctcagccccctggcacaggcggtcacgcatcaggacggttcctactcctcagcaccttccgtgcagttaccagtgccctgggaggtcacactgcccgtcggaccttggcatgctccattcagctgacctgctgaggacaggcatcgccgagactccttgggtcctccccgccctccctcatgctgccacaagctgctgctccaaggcctggccacatgcagacaggaggaagctgagctcgacattaggcctcaaggctgccatctgtcttgtagggcctggccttgtgggcagggggcagtcctgtgccttgtgggccctcagcctctgagggcagagatgctgtcagtgccgcaggtgcatcacatacttctagcatcctctccaccctgcattccaaatgctgcttgctgcctgccctgccctccgatgcaggggtggggtggggggcggagtcccgcccagcatagctgcagtgtcacaaagccatggcagagggtcctagcggcgccaccctgccccagcctgaggaggagggagagggaggaacaaccctgggcagacggggcctcagggacctgtgtccttccgcctccagagctgcccagccacgggctctcagggtgctggggcagccccaggtcccctcttgaactcagctggggccaggggccctcagaatgaaggcaggcaccaggcaggagcagcatccccctccttgacggtgctggcaggagggccgcgccatgctgactgcttgaacctctgctgacctgacagtgctggcgggagggccgcaccatgctgactgcctgaatctctgctgaggctgcctgcctgccgggcccagctcagcgccctctccactgcgaatcagtggcgatcatgtgatttctatttctgccccacagggtaagggacgagtcttctggaaggctctgccatggacatttgtcctcgggctcagaggccccaccctgccccacacctgcccctgatcactgcagtgtccagcccagtgttgaacagattgtagcgttctgtctcattacgagcaaataaatagactttcattggagttcgtc

SEQ ID NO: 37647 - DNA, 729 bp, Artificial Sequence
  derived and/or modified sequence
atgaccgaggtggtgcccagcagcgccctgagcgaggtgagcctgagattactctgccatgacgatatagatacagttaaacacctgtgtggtgactggttccccattgagtatcccgattcttggtacagagacattacaagcaacaaaaagtttttttccttagctgcgacctatagaggcgccatagtcggaatgatcgttgcagagataaagaatagaaccaaaatccataaagaggatggagacatacttgcatcgaacttcagtgtcgacacgcaggtggcctacatcctctctctgggtgtggtgaaagaattccgtaaacacggaatcggaagtctgttgttggagagcctgaaagaccacattagcaccactgctcaggatcattgcaaggctatctacctccacgtgctgactaccaataacacagccattaatttctacgagaatcgtgactttaagcagcaccattatcttccctactattatagcatccggggtgtccttaaagacggcttcacctacgtgctctacatcaatggggggcatccaccgtggacaattctggactacatacaacacctgggatccgccctggcatccctctccccatgtagcatcccccacagggtctacaggcaggcccactcactgctttgtagcttcctgccatggtccggcatttcatccaagtctgggatcgagtattcgcggacaatgtag

SEQ ID NO: 37648 - DNA, 729 bp, Artificial Sequence
  derived and/or modified sequence
atgaccgaggtggtgcccagcagcgccctgagcgaggtgagcctgaggctactgtgccatgatgacattgacacagtgaaacatctgtgcggggattggtttccaatcgaatatccggacagctggtatcgagatatcacgtccaataaaaaattctttagcttggccgctacataccgaggagccatcgtggggatgatcgtggcagagatcaagaatcgcacaaagatccacaaggaagacggtgacatactagctagtaacttttccgtggatactcaggtcgcatatatcctctctttgggcgttgtgaaggagttccggaaacatggaattggaagtctgctcttagagtccctaaaagatcacatctctactacagcacaagatcactgtaaggccatttatcttcatgttttgaccacaaataatacggccattaatttttacgagaatcgggattttaaacagcaccattacctgccctactactactccattcgtggggtcttgaaggacggatttacctatgtgctttacatcaatggcgggcatcctccttggacaattctggattacattcaacaccttggcagtgccctagcatctctgtccccttgctcaataccacacagagtgtacagacaagctcattctcttttgtgctccttcctgccgtggagtggaatctcaagtaagtctggcatcgaatattcacgcactatgtag

SEQ ID NO: 37649 - DNA, 729 bp, Artificial Sequence
  derived and/or modified sequence
atgacggaggttgtccccagctccgctttgtctgaagtcagcttacgcttgctgtgccacgatgacattgacactgttaaacatctgtgtggagactggtttcccatcgagtatcccgacagctggtatcgtgacataacatccaataaaaagttcttcagcctggccgctacatatcgcggtgcgatcgtgggaatgatcgtggctgaaataaagaatcgcactaaaatacataaggaggacggcgacatactggccagcaacttctcagtcgacactcaggtcgcatacattttaagtctgggggtcgtgaaggaatttaggaagcacggtataggcagcctgttgctggagagcctgaaggatcatatttctaccacagcccaggaccattgcaaagcaatctacctccatgtacttaccacgaataatactgccatcaacttctatgagaacagggactttaaacagcatcactatctcccttactactactctattcggggtgtactgaaagacggtttcacatacgtgctgtacattaacgggggtcaccctccctggacgattttggattacatacaacacttaggcagtgccctcgcctcgctgtcaccgtgttctatcccgcacagagtgtaccggcaggctcattcactactgtgctcttttctcccctggtctgggatcagttcgaagtccgggatagagtatagtcgcaccatgtag

SEQ ID NO: 37650 - DNA, 729 bp, Artificial Sequence
  derived and/or modified sequence
atgaccgaagtcgtgccctcaagcgccctgtccgaagtaagtttaaggctcctgtgccacgatgatatcgatacagttaaacatctgtgcggcgattggttcccgatagagtatccagacagttggtaccgtgacattacatcaaataagaagtttttttctctggccgcaacatacagaggtgccatcgtggggatgattgtggctgaaattaaaaacagaacaaagattcacaaggaggacggagacattcttgcgtcaaacttttctgttgacactcaggtggcatatatcctctccctcggagttgttaaagaattccgcaagcacggcattggatctctcttgctggagtctctcaaagatcacattagcaccaccgcacaagatcactgcaaggccatttacttgcatgtgctgaccactaataacactgcaatcaacttctatgagaacagggacttcaaacaacatcactaccttccgtattattattctattaggggcgtgttgaaagacgggttcacctatgtgctgtacatcaatgggggacatcctccgtggaccatcctggattacatccagcacctggggtcagctctggcctcattatctccttgtagtatcccccaccgcgtatacaggcaagctcattcgctactgtgcagctttctgccctggtctggcatctcctcaaagtcagggattgagtacagtaggacaatgtag

SEQ ID NO: 37651 - DNA, 729 bp, Artificial Sequence
  derived and/or modified sequence
atgaccgaggtggtgcccagcagcgccctgagcgaggtgagcctgagactgctgtgccacgacgacatcgacaccgtgaagcacctgtgcggcgactggttccccatcgagtaccccgacagctggtacagagacatcaccagcaacaagaagttcttcagcctggccgccacctacagaggcgccatcgtgggcatgatcgtggccgagatcaagaacagaaccaagatccacaaggaggacggcgacatcctggccagcaacttcagcgtggacacccaggtggcctacatcctgagcctgggcgtggtgaaggagttcagaaagcacggcatcggcagcctgctgctggagagcctgaaggaccacatcagcaccaccgcccaggaccactgcaaggccatctacctgcacgtgctgaccaccaacaacaccgccatcaacttctacgagaacagagacttcaagcagcaccactacctgccctactactacagcatcagaggcgtgctgaaggacggcttcacctacgtgctgtacatcaacggcggccaccccccctggaccatcctggactacatccagcacctgggcagcgccctggccagcctgagcccctgcagcatcccccacagagtgtacagacaggcccacagcctgctgtgcagcttcctgccctggagcggcatcagcagcaagagcggcatcgagtacagcagaaccatgtag

SEQ ID NO: 37652 - protein, 242 aa, Artificial Sequence
  derived and/or modified sequence
MPPGHTHSGSDSSDSEYSSQTTVSGLSEELRHYEAQQGAGGPAHQVIVEATENPVFAHSTVVHPESRHHPPSNPRQQPHLDSGSLPPGRQGQQPRRDPPREGLWPPPYRPRRDAFEISTEGHSGPSNRARWGPRGARSHNPRNPASTAMGSSVPGYCQPITTVTASASVTVAVHPPPVPGPGRNPRGGLCPGYPETDHGLFEDPTCLSTSGVRGGIRRWKSLSCRTWNARRGPGEAAPTEGD

SEQ ID NO: 37653 - protein, 1381 aa, Artificial Sequence
  derived and/or modified sequence
MGKATGRKAPLWLRAKFQRLLFKLGCYIQKNCGKFLVVGLLIFGAFAVGLKAANLETNVEELWVEVGGRVSRELNYTRQKIGEEAMFNPQLMIQTPKEEGANVLTTEALLQHLDSALQASRVHVYMYNRQWKLEHLCYKSGELITETGYMDQIIEYLYPCLIITPLDCFWEGAKLQSGTAYLLGKPPLRWTNFDPLEFLEELKKINYQVDSWEEMLNKAEVGHGYMDRPCLNPADPDCPATAPNKNSTKPLDMALVLNGGCHGLSRKYMHWQEELIVGGTVKNSTGKLVSAHALQTMFQLMTPKQMYEHFKGYEYVSHINWNEDKAAAILEAWQRTYVEVVHQSVAQNSTQKVLSFTTTTLDDILKSFSDVSVIRVASGYLLMLAYACLTMLRWDCSKSQGAVGLAGVLLVALSVAAGLGLCSLIGISFNAATTQVLPFLALGVGVDDVFLLAHAFSETGQNKRIPFEDRTGECLKRTGASVALTSISNVTAFFMAALIPIPALRAFSLQAAVVVVFNFAMVLLIFPAILSMDLYRREDRRLDIFCCFTSPCVSRVIQVEPQAYTDTHDNTRYSPPPPYSSHSFAHETQITMQSTVQLRTEYDPHTHVYYTTAEPRSEISVQPVTVTQDTLSCQSPESTSSTRDLLSQFSDSSLHCLEPPCTKWTLSSFAEKHYAPFLLKPKAKVVVIFLFLGLLGVSLYGTTRVRDGLDLTDIVPRETREYDFIAAQFKYFSFYNMYIVTQKADYPNIQHLLYDLHRSFSNVKYVMLEENKQLPKMWLHYFRDWLQGLQDAFDSDWETGKIMPNNYKNGSDDGVLAYKLLVQTGSRDKPIDISQLTKQRLVDADGIINPSAFYIYLTAWVSNDPVAYAASQANIRPHRPEWVHDKADYMPETRLRIPAAEPIEYAQFPFYLNGLRDTSDFVEAIEKVRTICSNYTSLGLSSYPNGYPFLFWEQYIGLRHWLLLFISVVLACTFLVCAVFLLNPWTAGIIVMVLALMTVELFGMMGLIGIKLSAVPVVILIASVGIGVEFTVHVALAFLTAIGDKNRRAVLALEHMFAPVLDGAVSTLLGVLMLAGSEFDFIVRYFFAVLAILTILGVLNGLVLLPVLLSFFGPYPEVSPANGLNRLPTPSPEPPPSVVRFAMPPGHTHSGSDSSDSEYSSQTTVSGLSEELRHYEAQQGAGGPAHQVIVEATENPVFAHSTVVHPESRHHPPSNPRQQPHLDSGSLPPGRQGQQPRRDPPREGLWPPPYRPRRDAFEISTEGHSGPSNRARWGPRGARSHNPRNPASTAMGSSVPGYCQPITTVTASASVTVAVHPPPVPGPGRNPRGGLCPGYPETDHGLFEDPHVPFHVRCERRDSKVEVIELQDVECEERPRGSSSN

SEQ ID NO: 37654 - protein, 84 aa, Artificial Sequence
  derived and/or modified sequence
MGKATGRKAPLWLRAKFQRLLFKLGCYIQKNCGKFLVVGLLIFGAFAVGLKAANLETNVEELWVEEVNLLCGGQTSTLWNSWKS

SEQ ID NO: 37655 - DNA, 4146 bp, Artificial Sequence
  derived and/or modified sequence
atgggcaaggccaccggcagaaaggcccccctgtggctgagagccaagttccagagactgctgttcaagctgggctgctacatccagaagaactgcggcaagttcctggtggtgggcctgctgatcttcggcgccttcgccgtgggcctgaaggccgccaacctggagaccaacgtggaggagctgtgggtggaggtgggcggcagagtgagcagagagctgaactacaccagacagaagatcggcgaggaggccatgttcaacccccagctgatgatccagacccccaaggaggagggcgccaacgtgctgaccaccgaggccctgctgcagcacctggacagcgccctgcaggccagcagagtgcacgtgtacatgtacaacagacagtggaagctggagcacctgtgctacaagagcggcgagctgatcaccgagaccggctacatggaccagatcatcgagtacctgtacccctgcctgatcatcacccccctggactgcttctgggagggcgccaagctgcagagcggcaccgcctacctgctgggcaagccccccctgagatggaccaacttcgaccccctggagttcctggaggagctgaagaagatcaactaccaggtggacagctgggaggagatgctgaacaaggccgaggtgggccacggctacatggacagaccctgcctgaaccccgccgaccccgactgccccgccaccgcccccaacaagaacagcaccaagcccctggacatggccctggtgctgaacggcggctgccacggcctgagcagaaagtacatgcactggcaggaggagctgatcgtgggcggcaccgtgaagaacagcaccggcaagctggtgagcgcccacgccctgcagaccatgttccagctgatgacccccaagcagatgtacgagcacttcaagggctacgagtacgtgagccacatcaactggaacgaggacaaggccgccgccatcctggaggcctggcagagaacctacgtggaggtggtgcaccagagcgtggcccagaacagcacccagaaggtgctgagcttcaccaccaccaccctggacgacatcctgaagagcttcagcgacgtgagcgtgatcagagtggccagcggctacctgctgatgctggcctacgcctgcctgaccatgctgagatgggactgcagcaagagccagggcgccgtgggcctggccggcgtgctgctggtggccctgagcgtggccgccggcctgggcctgtgcagcctgatcggcatcagcttcaacgccgccaccacccaggtgctgcccttcctggccctgggcgtgggcgtggacgacgtgttcctgctggcccacgccttcagcgagaccggccagaacaagagaatccccttcgaggacagaaccggcgagtgcctgaagagaaccggcgccagcgtggccctgaccagcatcagcaacgtgaccgccttcttcatggccgccctgatccccatccccgccctgagagccttcagcctgcaggccgccgtggtggtggtgttcaacttcgccatggtgctgctgatcttccccgccatcctgagcatggacctgtacagaagagaggacagaagactggacatcttctgctgcttcaccagcccctgcgtgagcagagtgatccaggtggagccccaggcctacaccgacacccacgacaacaccagatacagccccccccccccctacagcagccacagcttcgcccacgagacccagatcaccatgcagagcaccgtgcagctgagaaccgagtacgacccccacacccacgtgtactacaccaccgccgagcccagaagcgagatcagcgtgcagcccgtgaccgtgacccaggacaccctgagctgccagagccccgagagcaccagcagcaccagagacctgctgagccagttcagcgacagcagcctgcactgcctggagcccccctgcaccaagtggaccctgagcagcttcgccgagaagcactacgcccccttcctgctgaagcccaaggccaaggtggtggtgatcttcctgttcctgggcctgctgggcgtgagcctgtacggcaccaccagagtgagagacggcctggacctgaccgacatcgtgcccagagagaccagagagtacgacttcatcgccgcccagttcaagtacttcagcttctacaacatgtacatcgtgacccagaaggccgactaccccaacatccagcacctgctgtacgacctgcacagaagcttcagcaacgtgaagtacgtgatgctggaggagaacaagcagctgcccaagatgtggctgcactacttcagagactggctgcagggcctgcaggacgccttcgacagcgactgggagaccggcaagatcatgcccaacaactacaagaacggcagcgacgacggcgtgctggcctacaagctgctggtgcagaccggcagcagagacaagcccatcgacatcagccagctgaccaagcagagactggtggacgccgacggcatcatcaaccccagcgccttctacatctacctgaccgcctgggtgagcaacgaccccgtggcctacgccgccagccaggccaacatcagaccccacagacccgagtgggtgcacgacaaggccgactacatgcccgagaccagactgagaatccccgccgccgagcccatcgagtacgcccagttccccttctacctgaacggcctgagagacaccagcgacttcgtggaggccatcgagaaggtgagaaccatctgcagcaactacaccagcctgggcctgagcagctaccccaacggctaccccttcctgttctgggagcagtacatcggcctgagacactggctgctgctgttcatcagcgtggtgctggcctgcaccttcctggtgtgcgccgtgttcctgctgaacccctggaccgccggcatcatcgtgatggtgctggccctgatgaccgtggagctgttcggcatgatgggcctgatcggcatcaagctgagcgccgtgcccgtggtgatcctgatcgccagcgtgggcatcggcgtggagttcaccgtgcacgtggccctggccttcctgaccgccatcggcgacaagaacagaagagccgtgctggccctggagcacatgttcgcccccgtgctggacggcgccgtgagcaccctgctgggcgtgctgatgctggccggcagcgagttcgacttcatcgtgagatacttcttcgccgtgctggccatcctgaccatcctgggcgtgctgaacggcctggtgctgctgcccgtgctgctgagcttcttcggcccctaccccgaggtgagccccgccaacggcctgaacagactgcccacccccagccccgagcccccccccagcgtggtgagattcgccatgccccccggccacacccacagcggcagcgacagcagcgacagcgagtacagcagccagaccaccgtgagcggcctgagcgaggagctgagacactacgaggcccagcagggcgccggcggccccgcccaccaggtgatcgtggaggccaccgagaaccccgtgttcgcccacagcaccgtggtgcaccccgagagcagacaccacccccccagcaaccccagacagcagccccacctggacagcggcagcctgccccccggcagacagggccagcagcccagaagagacccccccagagagggcctgtggccccccccctacagacccagaagagacgccttcgagatcagcaccgagggccacagcggccccagcaacagagccagatggggccccagaggcgccagaagccacaaccccagaaaccccgccagcaccgccatgggcagcagcgtgcccggctactgccagcccatcaccaccgtgaccgccagcgccagcgtgaccgtggccgtgcaccccccccccgtgcccggccccggcagaaaccccagaggcggcctgtgccccggctaccccgagaccgaccacggcctgttcgaggacccccacgtgcccttccacgtgagatgcgagagaagagacagcaaggtggaggtgatcgagctgcaggacgtggagtgcgaggagagacccagaggcagcagcagcaactag

SEQ ID NO: 37656 - DNA, 255 bp, Artificial Sequence
  derived and/or modified sequence
atgggcaaggccaccggcagaaaggcccccctgtggctgagagccaagttccagagactgctgttcaagctgggctgctacatccagaagaactgcggcaagttcctggtggtgggcctgctgatcttcggcgccttcgccgtgggcctgaaggccgccaacctggagaccaacgtggaggagctgtgggtggaggaggtgaacctgctgtgcggcggccagaccagcaccctgtggaacagctggaagagctag

SEQ ID NO: 37657 - DNA, 4146 bp, Artificial Sequence
  derived and/or modified sequence
atgggtaaggcaactggtcgcaaggcaccattgtggcttcgagccaagtttcagcgcctactcttcaagctcggatgctacatccagaaaaactgcggcaagtttcttgtcgtcggactgctgatcttcggcgcctttgctgtgggactcaaagccgctaatctcgagactaacgttgaggaactgtgggtggaagtcggagggagagtgtctcgtgagcttaactacactaggcaaaagattggggaagaagccatgttcaatccacagttaatgatccagacaccaaaagaggagggcgccaatgtgcttacaacagaagccctgctgcagcacttagactccgcgctgcaggcgagccgtgtgcatgtctatatgtataatcgccagtggaagctcgaacatctatgctacaagagtggggagctgatcaccgagaccggatacatggaccagatcatagagtatttgtatccttgtctaattatcacccccctggactgcttttgggagggcgccaaactccagtcaggtacggcgtatctactgggaaaacctcccctgcgctggactaacttcgatcctctggagtttctagaggagttgaagaaaatcaactatcaagttgatagttgggaagaaatgctgaataaggcggaggtaggccatggatacatggacaggccttgtctaaatccagcagacccggattgccccgctaccgcccccaataaaaattctacaaaaccattggacatggccctggttctaaatggaggttgccatgggctgagccgtaagtacatgcattggcaggaagaattaattgtaggaggaaccgttaaaaacagtactggaaagctggttagtgcccacgctctgcagacaatgtttcagctgatgactcccaaacagatgtacgaacatttcaagggctacgagtacgtttctcatatcaactggaacgaggacaaggctgcagccatcctggaggcatggcaaagaacctatgttgaggtcgtgcatcagtcggttgcccaaaactctacgcagaaggttctgagcttcacaaccactacgttggatgacatcttgaagtcttttagtgatgtaagcgtaattcgggtcgcatcgggctatcttctgatgctggcctacgcgtgtctcaccatgttgaggtgggactgttctaaatctcaaggcgccgtcggactggccggggtgcttctcgtcgcgctctctgtggcagctgggttaggactatgctcactcattggtattagcttcaatgctgctaccacccaggttctgccatttctggcactcggtgttggagtggatgatgtgtttttgctggcgcacgcctttagcgaaaccggccaaaataaaaggattccgttcgaagaccgaacgggtgagtgcttgaaaaggacgggggcttcggttgcgctgacttcaatctccaacgttaccgccttctttatggccgcactcattcccatccctgcacttagggcctttagcctgcaggcagccgtcgtcgtcgtgtttaatttcgccatggtcctcctgatttttcccgcgatcctttcaatggacctgtaccgtcgggaagaccgccgtctcgacatcttttgttgctttacctccccctgcgtgtcccgcgtgatacaggtggagccacaagcttatactgatacccatgataacacaaggtattcccctcctccaccatacagtagtcatagctttgcacatgaaactcagattaccatgcagagtacagttcagcttcggacggagtacgaccctcatactcacgtgtactatactactgcggaaccacgcagcgagatcagtgtgcagccagtaactgtaacgcaggacacactgtcgtgtcagtcaccagagtccacctcatctaccagggacctgctgagccagttctcagatagctccctacattgtctggaaccaccttgcaccaaatggaccctgtcttcatttgccgaaaaacattacgctccattcctcctaaagcctaaggccaaggtggtggtcattttcctgttcctgggcctgctcggcgtgtccctttacggcactactagggtaagggatggcctagatttgacagacatcgtgccacgcgaaacccgcgagtacgatttcatcgccgcacagttcaaatatttttcattctataatatgtacattgtaacccagaaagccgactacccgaatattcagcatttgctctacgaccttcacagaagttttagcaatgtcaaatatgtgatgctcgaagaaaacaagcagctgcccaagatgtggctccactacttccgagactggttgcagggcctccaggatgcattcgactccgattgggaaacaggaaagatcatgcccaataattacaagaatggttcggatgatggtgtgctcgcctacaaattgctggtgcaaactggatcgcgcgataagcccattgatatcagccagctcactaagcagcgtctggtggatgccgacggtataatcaatcccagtgctttttacatttatctcaccgcctgggtatccaatgatcctgtggcgtacgcagctagccaggctaacatcagacctcacagaccagaatgggtccatgataaagcagactatatgcccgagaccaggctgcgaatccctgccgcagagcctatcgaatatgcccaatttccattttacctgaatggactgagggatacttctgatttcgtggaggcgatcgaaaaagtgcgaacaatctgttctaactacacatctttgggtttaagcagttatccaaacggatatccttttctgttctgggagcaatacattggtcttagacattggctactgcttttcatctctgtggttcttgcgtgcacctttctcgtgtgtgccgtctttcttcttaatccttggaccgctggtatcattgtgatggtgctggcgctgatgacagtggagcttttcgggatgatgggactgattggaataaagctgtcagccgtccctgtggttatcctgattgcctccgttggaatcggcgtggaatttaccgttcacgttgccttagcttttttgaccgccatcggagataagaacaggagggctgtgcttgcacttgaacatatgtttgctcctgtgctggatggcgcagtgtcaacactcctcggcgtgctgatgctcgccggaagcgagttcgactttatcgtgcgatactttttcgccgttctggcgattctgactattctgggcgttctgaatggactcgtcttacttccagtactacttagttttttcgggccatatccagaggtgagtcctgccaacgggttgaatagacttcccaccccctctcccgagcctccaccctctgtggtgaggttcgccatgccaccaggtcacacacatagcggcagtgattcctcagactcagagtatagttcacaaacaaccgtctctggactgtccgaggagctacgccactacgaagcgcagcaaggggccggggggcctgcccatcaggtgattgtggaagcgactgagaaccctgtttttgcccattcaaccgtggtgcatccggaatcccgccatcatcctccatcaaatccacggcaacagccccacttggactctgggtcactcccacccggtcggcagggtcagcagcccaggcgcgacccgccacgagagggcctgtggcctcctccttatcgaccccggcgggatgcttttgagatctcaacagagggccattctggtccctctaacagggctcgatggggcccccggggcgcccgatcacataaccccagaaaccccgcttctacagcgatgggctcaagcgttcccggttactgtcagccaatcactacagtcactgcaagcgcctcagttactgttgccgtgcatccccccccagtcccaggccccggacgaaatcctcggggggggctctgtcccgggtaccctgaaacagaccacggtttgtttgaagacccacacgtacctttccacgtccggtgcgaaaggagagattcgaaggtggaagtgatcgagttacaggatgtcgaatgtgaagagcgtccccgcggttccagtagcaattag

SEQ ID NO: 37658 - DNA, 4146 bp, Artificial Sequence
  derived and/or modified sequence
atgggcaaagctacaggccgcaaggcacccttatggctgcgcgcaaaatttcaaaggctgctcttcaaactcgggtgttatattcagaagaactgtggcaagtttctggtggtgggtcttttaatctttggcgctttcgcggtgggcctcaaagctgccaacctggaaactaacgtcgaggaactgtgggtagaggtgggcggccgggttagtagggagctgaattacacccggcaaaaaattggggaggaggccatgttcaacccacagttaatgattcagacccccaaggaagagggggcaaatgtcttgactaccgaggcccttcttcagcacctggattcggctctccaggccagccgggtacacgtgtatatgtacaatcgacagtggaaactggaacacttgtgttacaagtctggggagctgattacggaaaccggatatatggatcagattatagagtacctttacccgtgcctcattattacgcctttggattgcttttgggagggtgcaaaactgcagtccggcacagcgtacctcctggggaaaccacccttaaggtggaccaattttgacccgctggaattcttggaggagctgaagaagatcaactatcaggtcgattcatgggaggaaatgctgaataaagctgaagtcggccacggatacatggaccgcccatgtctgaatccagcagaccctgattgtccagctacagctcctaataagaacagtacaaaacccttggacatggcccttgtgctgaacggcggctgtcatggcctgagtaggaaatacatgcattggcaggaggagctgattgtcggaggcactgttaagaattctactggaaaattggtgtcggcccacgcactgcaaacaatgttccaactaatgacgcccaagcagatgtatgaacattttaaaggttatgaatacgtcagccacatcaactggaatgaggataaagccgcagcaatcctggaggcctggcagaggacttacgtcgaagtggttcatcagagcgtcgcccagaacagcacacagaaggtcctttcatttaccaccacaactctggacgacattctcaaatcctttagtgacgtgagcgtgatcagagtcgccagtggctatcttctgatgcttgcatacgcctgtctgacaatgttgcggtgggattgctcgaagagccaaggggcagtcggcctcgctggggttcttttagtcgcgctgtccgtcgccgcagggctggggctgtgttcactgatcggtatttcattcaatgccgctacaacacaggttttaccatttttggcgctgggagtcggagttgacgacgtgtttctgctggcacatgccttttcggaaaccgggcagaacaaacggatccccttcgaggatagaaccggcgagtgtctgaagcggaccggggcatcagtcgcattgacgtcaatctctaacgtgaccgctttctttatggctgccctcattcccatccctgcccttagggccttttcactacaggctgcagttgtggttgtctttaatttcgcaatggtcctcctgatcttccccgctatccttagcatggatctttaccgccgggaagatagacgtctcgatatcttctgctgctttactagtccctgcgtcagccgcgtgatccaggtggagccccaagcatataccgatacccacgacaataccagatacagcccacctcccccttatagctcccacagctttgctcatgagacgcagattactatgcaatccaccgtgcagctaaggactgagtacgatcctcacacacacgtatactacaccactgcagagcccaggagtgagatctcagttcagcccgtcacggtcacccaggacaccctgtcttgtcagtcccccgaaagcacatcatccacgcgagatctcctgagtcagttctcagattcttccctgcattgtttagagccaccctgtaccaaatggactctctcttcattcgcagagaagcactacgcacccttcttacttaaaccaaaagcaaaggtggtcgtcatcttcctgttcttaggtctcctgggtgtctcactgtacggaaccacgcgcgtccgggacggcctcgaccttaccgacatagtgccccgggagaccagggagtacgatttcattgcggcgcagttcaagtacttctctttttacaacatgtacatcgttacacagaaagcagactaccccaacatacagcatctgctttacgacctgcataggtccttctccaatgtcaaatacgtgatgctggaagagaacaagcagctgcctaaaatgtggttgcactattttagagactggctccaggggctccaggatgctttcgactctgactgggagaccggaaagataatgccgaacaactacaaaaatggaagtgacgacggagtcctggcgtacaaactgctcgtacaaaccggatctagggataaaccaatcgatattagtcagcttacgaagcagaggctggtcgacgccgatggcattataaatccatcagctttttacatctacctgacggcctgggtgagtaacgaccccgtcgcatacgccgccagccaagcaaatattcgtccccatcgacccgagtgggtccacgataaggctgattatatgcctgagacccgcttacgaattcctgcagccgagcctatagaatacgcccagtttcctttctacctgaatgggctcagggatacttccgattttgtcgaagccattgaaaaggtgcggacaatttgctccaactacactagccttggactcagcagctatcccaacggatatccctttctgttttgggagcaatatatcggattgcgccactggctactgctcttcatctcagtagtgctggcctgcaccttccttgtttgtgctgtgtttctccttaacccttggacagccggaatcattgtgatggttctggccctgatgaccgtcgaactttttgggatgatggggctaatcggtataaaactttccgcggtaccagtcgtcattctgatcgcaagtgtgggaatcggagtggagttcacagtacacgtcgccctggccttccttacagccataggagataaaaatcggagggctgtgctggcactcgagcacatgtttgcacccgtactggatggggccgtaagtactctgctgggcgtgcttatgctggcaggctccgagttcgatttcattgtgcgctactttttcgcagtgctagcaattttgacgatcctgggggtcttgaatggactggtactcctgccagtcctgttgagcttttttgggccatatcccgaggtgtccccagcgaacggtctgaatagactccccaccccgagtccagagccacctcccagcgtcgtgcgcttcgctatgcctcctgggcatacgcactctggttccgattcatccgactcagagtatagtagccaaaccacagtgagcggactctccgaggagctgaggcactatgaagcccagcagggggctggcggaccagctcaccaggtgattgtcgaggcaactgaaaatccagtgttcgcacattcaaccgtagttcatcccgagtcccgacaccatcccccgagcaatcctagacagcagcctcatctggattccgggagtctaccaccggggagacaaggccagcagccacggcgggatccccctcgggagggcctttggccgcccccatatcggccgcgacgcgacgcttttgagataagtaccgagggtcacagtgggcctagcaatagagcacgctgggggccacgcggcgcacgcagccacaacccccgtaatcccgccagcactgcaatgggtagtagcgtcccagggtactgtcagcccatcactacagtcacggctagtgcttcagtcaccgtcgctgtgcatccaccacccgttcccggaccagggagaaatccacgaggtggcctctgcccgggatatccagagacagaccacggcctatttgaagatccccatgttccctttcatgtccggtgcgaacggcgggacagtaaggtcgaggtcatcgagctgcaagatgtagagtgtgaagaacggccccgggggagtagttccaactag

SEQ ID NO: 37659 - DNA, 255 bp, Artificial Sequence
  derived and/or modified sequence
atgggcaaggctactggcagaaaagcacctttgtggctacgcgcaaaatttcagaggctgttgttcaagctcgggtgttacattcaaaagaattgcggtaagtttctcgttgtagggttactgatcttcggagcctttgcagtggggctgaaggcagcaaacctggagacaaacgtggaagaactgtgggtcgaagaggttaatctgctgtgtggggggcagacttcgactctgtggaacagctggaagtcttag

SEQ ID NO: 37660 - DNA, 4146 bp, Artificial Sequence
  derived and/or modified sequence
atgggcaaggccactggaaggaaggcccccctgtggctgcgggccaagttccagaggctgctcttcaagctgggctgctacatccagaagaactgtgggaagttcctggtggtgggcctgctgatctttggagcctttgctgtgggcctgaaggccgccaacctggagaccaacgtggaggagctgtgggtggaggtgggcggccgggtgtcccgggagctgaactacacccggcagaagattggagaggaggccatgttcaacccccagctgatgatccagacccccaaggaggagggcgccaacgtgctgaccacagaggccctgctgcagcacctggacagcgccctgcaggccagccgggtgcacgtgtacatgtacaaccggcagtggaagctggagcacctgtgctacaagagcggggagctgatcacagaaacaggctacatggaccagatcatcgagtacctgtacccctgcctgatcatcacccccctggactgcttctgggagggcgccaagctgcagagcggcacagcctacctgctgggcaagccacccctgcgctggaccaactttgaccccctggagttcctggaggagctgaagaagatcaactaccaggtggacagctgggaggagatgctgaacaaggccgaggtgggccacggctacatggaccggccctgcctgaacccagctgaccctgactgcccagccacagcccccaacaagaacagcaccaagcccctggacatggccctggtgctgaatggaggctgccacggcctgagcaggaagtacatgcactggcaggaggagctgattgtgggcggcaccgtgaagaacagcacaggcaagctggtgtctgcccacgccctgcagaccatgttccagctgatgacccccaagcagatgtatgagcacttcaagggctatgaatatgtgagccacatcaactggaatgaagacaaggctgctgccatcctggaggcctggcagaggacctacgtggaggtggtgcaccagagcgtggcccagaacagcacccagaaggtgctgtccttcaccaccaccaccctggatgacatcctgaagagcttcagtgatgtgtctgtcatccgggtggccagcggctacctgctgatgctggcctatgcctgcctgaccatgctgcgctgggactgcagcaagagccagggcgctgtgggcctggccggcgtgctgctggtggccctgtctgtggccgccggcctgggcctgtgcagcctgattggcatctccttcaatgctgccaccacccaggtgctgcccttcctggccctgggcgtgggcgtggatgatgtgttcctgctggcccacgccttcagcgagaccggccagaacaagaggatcccctttgaggacagaactggagaatgtctgaagaggactggagcctctgtggccctgaccagcatcagcaatgtgacagccttcttcatggccgccctgatccccatcccagccctgcgggccttcagcctgcaggccgctgtggtggtggtgttcaactttgccatggtgctgctgatcttccctgccatcctgtccatggacctgtaccgccgggaggaccggcggctggacatcttctgctgcttcaccagcccctgtgtgtccagggtcatccaggtggagccccaggcctacacagacacccatgacaacacccgctacagccccccaccaccctacagcagccacagctttgcccacgagacccagatcaccatgcagagcacagtgcagctgaggacagaatatgacccccacacccacgtgtactacaccacagctgagcccaggtctgagatctctgtgcagcctgtgacagtgacccaggacaccctgagctgccagagccctgagagcaccagcagcacccgggacctgctgagccagttcagtgacagcagcctgcactgcctggagcccccctgcaccaagtggaccctgagcagctttgctgagaagcactacgcccccttcctgctgaagcccaaggccaaggtggtggtgatcttcctgttcctgggcctgctgggcgtgtccctgtatggcaccaccagggtgagagatggcctggacctgacagacatcgtgccccgggagacccgggagtatgacttcatcgccgcccagttcaagtacttctccttctacaacatgtacatcgtgacccagaaggctgactaccccaacatccagcacctgctgtatgacctgcaccgctccttcagcaatgtgaagtatgtgatgctggaggagaacaagcagctgcccaagatgtggctgcactacttccgggactggctgcagggcctgcaggatgcctttgacagcgactgggagaccgggaagatcatgcccaacaactacaagaatggaagtgatgatggagtgctggcctacaagctgctggtgcagacaggcagccgggacaagcccatcgacatcagccagctgaccaagcagaggctggtggatgctgatggcatcatcaaccccagcgccttctacatctacctgacagcctgggtgtccaatgaccctgtggcctatgctgccagccaggccaacatccggccccacaggcctgagtgggtgcatgacaaggctgactacatgcctgagacccggctgcgcatcccagctgctgagcccattgaatatgcccagttccccttctacctgaatggcctgcgggacaccagtgactttgtggaggccatcgagaaggtgaggaccatctgcagcaactacaccagcctgggcctgagcagctacccaaatggctaccccttcctgttctgggagcagtacatcggcctgcggcactggctgctgctcttcatctctgtggtgctggcctgcaccttcctggtgtgtgctgtgttcctgctgaacccctggacagctggcatcatcgtgatggtgctggccctgatgacagtggagctgtttggcatgatgggcctcatcggcatcaagctgtctgctgtgcctgtggtgatcctgattgcctctgtgggcatcggcgtggagttcaccgtgcacgtggccctggccttcctgacagccatcggggacaagaacagaagagctgtgctggccctggagcacatgtttgcccctgtgctggatggagctgtgtccaccctgctgggcgtgctgatgctggccggcagcgagtttgacttcatcgtgcgctacttctttgctgtgctggccatcctgaccatcctgggcgtgctgaatggcctggtgctgctgcctgtgctgctgtccttcttcggcccctacccagaggtgtccccagccaacggcctgaaccggctgcccacccccagccctgagcccccaccttctgtggtgcgctttgccatgcctcctggccacacccacagcggcagtgacagcagtgacagcgagtacagcagccagaccaccgtgtctggcctgtctgaggagctgcggcactatgaggcccagcagggcgccggcggccctgcccaccaggtgattgtggaggccacagagaaccctgtgtttgcccacagcacagtggtgcaccctgagagccgccaccacccccccagcaacccccggcagcagccccacctggacagcggcagcctgcccccaggccggcagggccagcagccccggcgggaccccccccgggagggcctgtggcccccaccctaccggcccaggagagatgcctttgagatcagcacagagggccacagcggccccagcaacagagcccgctggggccccaggggggcccggagccacaaccccaggaacccagccagcacagccatgggcagctctgtgcccggctactgccagcccatcaccaccgtgacagccagcgcctctgtgacagtggccgtgcaccccccacctgtgcccggccctggaagaaacccccggggcggcctgtgccccggctacccagagacagaccacggcctgtttgaggacccccacgtgcccttccacgtgcgctgtgagcggcgggacagcaaggtggaggtgattgagctgcaggatgtggagtgtgaggagcggccccggggcagcagcagcaactag

SEQ ID NO: 37661 - DNA, 255 bp, Artificial Sequence
  derived and/or modified sequence
atgggcaaggccactggaaggaaggcccccctgtggctgcgggccaagttccagaggctgctcttcaagctgggctgctacatccagaagaactgtgggaagttcctggtggtgggcctgctgatctttggagcctttgctgtgggcctgaaggccgccaacctggagaccaacgtggaggagctgtgggtggaggaggtgaacctgctgtgtggcggccagaccagcaccctgtggaacagctggaagagctag

SEQ ID NO: 37662 - DNA, 4146 bp, Artificial Sequence
  derived and/or modified sequence
atgggcaaggccaccggccggaaggcccccctgtggctgcgggccaaatttcagcggctcctgttcaaactaggttgctacattcagaagaactgcggtaagttcttggtcgtgggattacttatcttcggtgcgtttgcagtcgggctgaaggcagcaaatctggagacaaacgtggaagagctgtgggtcgaggtagggggtcgagtatcacgggagctcaattacacccggcagaaaataggtgaggaagcaatgttcaatccgcagttgatgatccagaccccgaaggaggaaggcgctaatgtgctcactaccgaagcactgctgcaacatctggacagtgctctgcaggcgtctagagtgcacgtctacatgtacaaccgccagtggaagctcgagcacctgtgctacaagagtggggagctgatcactgaaaccggctacatggaccagatcattgagtacctctacccttgtcttatcatcactccgttggactgcttctgggaaggcgcgaagctgcagtcaggtactgcctaccttctgggaaagcctccgctgaggtggacaaacttcgaccccctggagtttctggaggagcttaagaagataaactaccaagtggatagttgggaggagatgctcaataaagccgaggtgggccacggatacatggatcggccctgcctgaacccagcggatcccgattgccccgccacagctccaaacaagaacagcaccaagcccctcgatatggcactggtcctcaacggcggctgtcatgggctgagtaggaagtatatgcactggcaggaagaactgatcgtcggaggcacggtcaaaaactcaaccggcaaactggtctctgcccacgcactgcagacgatgtttcagctcatgacccccaagcagatgtacgaacacttcaaaggctatgagtatgttagtcatatcaattggaatgaagataaggcggcagcaatcctggaagcgtggcagcggacctacgtcgaagtggttcatcagtctgttgcacagaattctacccagaaggtgctgagctttacaacaacaactcttgatgacatactcaaaagctttagcgacgtgagcgtgattagagtggccagcggctacctgctaatgctggcttacgcatgcctgactatgctcagatgggattgctctaagtcacaaggggcagtcggcttggccggcgtgttactggtagccctttctgtagcagctggactcggactctgctccctgataggaatttccttcaatgctgcaacaacccaggttctgccgtttctcgccctgggcgtgggagtggacgatgtgtttctgctggcccatgccttttcagagaccggccagaacaagagaattccattcgaagataggactggagagtgccttaagaggaccggcgcgtctgtggcattgacctcaatcagcaatgtgaccgccttctttatggctgctctgattcccatccccgccctgcgcgcctttagcttgcaggctgccgtggtggttgtgttcaatttcgccatggtcctgctgattttccccgctatactctccatggacctctaccgccgcgaagaccggcgtcttgatattttctgctgtttcacatcgccatgtgtttctagagttattcaggtggaaccacaagcttatacagatacccacgacaataccagatatagtcctccccccccgtattcctcccactctttcgcccatgagacacaaatcaccatgcagagcaccgttcagctcagaaccgaatacgatccccatacacatgtctactacactaccgctgagcctcggtcagaaattagcgtgcagcccgtgacggtcacccaggataccctttcttgccagagtccggagtcgaccagttcgactcgggacctactctcccaatttagtgatagctcattacactgtctggagccaccctgcacaaagtggacattgtcttcttttgctgagaaacattatgcgccattcctgttgaagccgaaggccaaggtggtggtgatcttcttatttcttggccttctgggtgtgagtctttacggcacaacaagggtaagagatggacttgacctgaccgacattgtgccccgggagacaagagaatacgacttcattgcagctcagtttaagtacttctccttctataatatgtatatagtgacccagaaggccgactaccctaatatccagcacttattgtacgacctacacaggagttttagcaatgtcaaatacgtaatgcttgaagaaaacaagcagctacctaagatgtggcttcattatttccgagattggctccaagggctgcaggacgcctttgattcagactgggaaacaggcaagatcatgccaaacaactacaaaaatggaagcgatgatggggtcctggcatataaactgctggtgcagactggcagtcgggataaaccgatcgacatctcccaactgacaaagcagcgcctcgtggacgccgacggcatcataaatccatccgcgttctacatctatttgaccgcttgggtgtctaatgatccagttgcatatgccgctagccaggctaacattcgtccacacaggccagaatgggtgcacgacaaggccgactacatgcccgaaaccaggcttcggatacctgccgccgaaccgatcgagtatgcccagtttccgttttatcttaacggacttagagacacctcagattttgtggaggcgattgagaaggtgaggacaatttgtagcaactatacttctctcggtctgagctcgtacccaaatgggtacccgtttttgttttgggaacagtacattgggctgcgtcattggctgctcctcttcatctccgttgtgctcgcctgtacctttctggtctgcgcggtgtttctgttgaatccgtggaccgccggcataattgtgatggtcctggcccttatgaccgttgagctcttcggcatgatgggtcttattggcattaagctgtcagctgtccctgtggtgattttgatcgcaagcgttggcatcggcgtcgagtttacagtgcacgtggcactcgcctttttaacggctataggagacaagaacagacgggctgtgttggcgcttgaacacatgttcgctccagttctagacggtgcagtgtcgaccctgctcggcgtcttaatgctggctggaagcgaattcgatttcatcgttcggtatttttttgccgtgctagccattcttaccatattgggcgtgctaaatgggctagtcttattgcccgtgctgctgagcttcttcggcccttatccagaggtgtctcccgccaatggtctcaacagacttccaacaccatctcccgagccacccccatctgtggtgcgcttcgctatgccccctggccacacacactcagggagtgactcttcagatagcgaatacagttctcagaccacagtgagcggcctgagtgaagagctcagacactacgaggcccagcaaggtgccggtggtcccgcgcatcaagtgatagtagaagctacagagaatccggtatttgcacatagcacggtggtacatcccgaatcccggcatcatccgccatctaatcctcggcagcagccccatctggattctgggagcctccccccagggaggcagggtcaacagccacgtcgagatcctcccagagagggcctgtggccacctccatataggccacggagagacgctttcgagatttccactgaaggacatagcggtcccagcaatagagctagatgggggccgagaggcgctcgctcacacaaccctagaaatccagcctccaccgccatgggctctagcgtacccgggtactgccaaccgatcacaacagttactgccagcgcctccgtgacagtcgctgtccatcctccgccggtgcctggcccaggaagaaaccctaggggcgggctttgccctggataccccgagacggaccacggattgttcgaagatccccacgtgccttttcacgtacggtgcgagagacgagatagtaaagtcgaagtcatcgaactgcaggacgtggaatgtgaagagagacctaggggctcctcgtcaaactag

SEQ ID NO: 37663 - DNA, 4146 bp, Artificial Sequence
  derived and/or modified sequence
atgggcaaggccaccggccggaaggcccccctgtggctgcgggccaaattccagagactgttgttcaaactcggctgttacattcaaaaaaattgtgggaaatttctcgtggtggggttgctcattttcggcgcctttgctgtgggcctcaaagcagcaaatctagagacaaatgtggaagagctgtgggtagaggtcggcggccgagtcagtcgcgagctgaattatacaaggcaaaaaatcggtgaggaggctatgtttaacccacaattgatgattcagacacctaaggaggaaggagctaatgtgctgacaactgaggccctattgcagcatctggactctgctctccaggcgagcagagtgcatgtctatatgtacaatcgccagtggaagcttgaacacctctgttataagagcggtgagctaatcacggagaccgggtacatggatcagattatcgagtatttatacccatgtctcatcataactcccttagattgcttctgggaaggggcgaaactccagtccggcaccgcttatctgctaggcaaaccacctttgcggtggactaattttgacccccttgagttcctcgaggagctgaagaaaattaattatcaggttgactcttgggaagagatgctgaataaggcggaagttgggcatggatacatggacagaccttgtctgaatccggctgaccccgattgcccggccacggcccccaataagaattctactaagcccctcgatatggctttagtgctcaacgggggctgtcatgggctaagccgaaaatacatgcattggcaggaagagctgattgtgggaggcaccgtgaaaaattcaacaggcaagctcgtgtcagcccatgctctgcagactatgtttcagctgatgacacccaaacaaatgtacgaacacttcaaaggttatgagtacgtgtcccacatcaactggaacgaagataaagctgctgccatactcgaagcatggcaacgcacttatgtagaggtggtacatcagagcgtcgcccagaactccactcagaaggtgctatcgtttaccaccacaactcttgatgacatcctgaaatcattctccgacgtcagtgtgatccgggtcgcgtccggatacttgcttatgctcgcgtatgcatgtctaactatgctgagatgggattgttctaagagtcaaggcgctgtcggcttagcgggagtcctcctagtcgctcttagtgttgccgcaggcttagggctgtgctcactgatcgggatttcttttaatgctgcaaccactcaggttctccctttcttagccctaggcgttggcgtcgacgacgtgtttctgctggcccatgccttctctgaaactggacagaacaagcgaatcccattcgaagaccggactggcgaatgtctgaaaagaaccggcgcgtctgtggcactcaccagtatatctaatgtcaccgcatttttcatggccgcattgatcccaatccctgcgctgagagccttctctctgcaggcagccgtggtggttgtctttaacttcgcaatggtcctcttgattttccctgccatcctgtccatggacctatatcggcgcgaggatcggagacttgacatcttttgttgtttcacatcgccttgtgtcagtcgggtaatccaggtggagccccaggcctatacagatacccatgacaacacccgctatagtccccctcctccatactcttcccacagcttcgcccacgaaacccagatcaccatgcagagcacggtgcagcttcgcactgaatacgacccccatacacacgtttattataccaccgcggagcctcggagtgagatttccgtgcagcctgtgaccgtgactcaggataccctttcatgccaatcccctgagtctacctcttcaaccagggaccttctgtcccagttctcagacagcagcctccactgtctggagcccccatgcactaagtggacgctctccagctttgccgagaaacactacgcgcctttcctcctgaaacccaaggccaaggtggtagtgattttcctcttcctgggactgttgggggttagcctgtacggcacaacacgggtccgagacggcctggatctcacagatatcgtgcccagggaaacccgcgagtatgacttcattgctgctcagttcaaatatttcagtttctacaacatgtatattgtcacccagaaggccgactatcctaatatccagcaccttctgtacgacctccaccgctcattctcaaacgttaaatacgtgatgctcgaggagaataagcagttgcctaaaatgtggctgcactactttcgggattggcttcaggggttacaggatgctttcgactctgactgggaaaccgggaagattatgccaaacaactataaaaatggctccgacgatggcgtcctcgcttataagctccttgtccaaacagggtcccgagataaacctatcgacatttctcagttgaccaaacaaaggttagtcgatgccgacggcattattaatccctcagccttttacatctacctgacagcatgggtgtcaaacgacccagtggcttacgctgccagccaagcgaatattagacctcacaggcccgagtgggtccacgacaaagctgattacatgcccgagacacgcctgcgaattcccgccgctgagcctatcgaatatgcccagttccccttctacctgaatggcctccgggatactagtgattttgtggaggcaatcgagaaagtgcgtacaatatgttccaactatacctctctggggctatcttcctacccaaacggttaccctttccttttttgggaacagtacatcggactccgccactggttgctccttttcatctctgtggtcctcgcttgcacattcctagtgtgcgccgtgtttcttctcaacccctggaccgctggcataattgtgatggttctggcgttgatgaccgtggagttgttcggaatgatggggctgattgggatcaagctcagcgctgtaccggttgtgatccttattgcctcagtgggtatcggcgttgaatttaccgtgcacgtggctttagcctttttgacagccataggcgacaagaatcgtagggccgtcctcgcactcgagcatatgttcgcacctgtgttggatggcgccgtctccactctgctcggggttctcatgctcgctggtagcgagtttgatttcatcgtgcgctatttctttgctgtcctcgcaatcctgaccatcctgggcgttctgaatggtttggtactcttgcctgtgctgcttagcttttttgggccttaccctgaggtaagccctgccaatggactaaaccgcttgcccacgccatctcctgagccccctccttcggtggtgagattcgccatgccccccgggcatactcattcaggaagcgacagttccgacagcgagtacagttcccagacgaccgtgtcggggttgtccgaggaactcaggcactatgaggcccaacagggtgccggcggtccagcccaccaagtgatcgtagaagcaaccgagaaccccgtgttcgcgcacagcacagttgtccacccagaatctcgccaccatcctccttctaaccctcggcagcagccacacctggactctgggtcccttcctcccggccgacagggacaacagccgagaagggaccccccccgcgagggattgtggccacccccttacagaccgcggcgggatgcctttgagatctctacagaagggcactctggtccttcgaatagagccaggtggggcccgcggggggcccgaagtcacaaccctagaaaccctgccagcaccgccatggggtcatccgtgcccggctactgccaaccaataacaacagtgaccgcgtctgccagcgttaccgtggctgtccatccaccaccagtgcctgggcccggtcggaatccacgaggcgggctgtgccccggatatcccgaaaccgaccacggactcttcgaggatcctcatgttccattccacgtgcgctgtgaacgcagagatagcaaagtagaagtgatcgagctgcaggacgtggagtgcgaagagcggccgcgaggtagtagctccaattag

SEQ ID NO: 37664 - DNA, 255 bp, Artificial Sequence
  derived and/or modified sequence
atgggcaaggccaccggccggaaggcccccctgtggctgcgggccaaatttcagcggttgctttttaaactcgggtgttacatccagaagaattgcggtaagttcttggtggttgggctgcttattttcggagcctttgcagtaggccttaaagccgcaaacctcgagaccaatgtggaggagctctgggtggaggaggtgaatctactttgcggaggacagaccagcactctctggaacagctggaagtcttag

SEQ ID NO: 37665 - DNA, 4146 bp, Artificial Sequence
  derived and/or modified sequence
atgggtaaggccacaggccgtaaggctcctctttggttgcgagctaagttccagcgtctgctatttaaactgggctgctacatccagaagaattgtggtaagtttctggtggtgggcttgctaatctttggcgcatttgctgtgggcctaaaggctgccaatcttgaaacaaatgtggaggagctttgggtggaagtggggggtcgcgttagtcgggaactgaactatactaggcagaaaattggcgaagaggccatgttcaaccctcaactcatgatccagacacccaaagaggagggcgctaatgtcctgactacagaggccctgctccaacacctggacagcgcactgcaagcctcaagagtccacgtttacatgtacaaccgccagtggaaacttgaacatttgtgttacaagagcggcgagctgatcacagaaaccggttacatggatcaaatcattgaatacctctacccatgcctgataattactcccctggactgtttctgggagggcgctaaattacagtctgggacagcctacttgctggggaagcccccactaagatggactaactttgaccctctggagttcctggaggaattgaaaaaaatcaattaccaggtcgattcctgggaagagatgttgaataaagccgaggtcggccacggatatatggatcgcccttgcctgaatcccgcagacccagattgccctgctactgcaccaaataaaaattcaactaagccactggacatggcgctggttttgaacggaggctgccacggtctatcaaggaagtacatgcactggcaggaggaactgatagtcggcggtactgtgaagaactctacgggtaagctggtctccgctcacgcgctgcagactatgttccagctgatgactccgaaacaaatgtatgaacactttaagggttatgaatacgtatcccacattaattggaatgaggataaggcggctgcaatcctcgaggcatggcagcggacctacgttgaagtggtgcatcagtccgtggcgcagaactctactcagaaagtgctcagcttcactacgactaccctcgatgatattctgaaatctttcagtgatgtgtctgtgattagggtggcctcaggctacctcttgatgcttgcttacgcatgcctgactatgttgcggtgggactgctcgaagtcccaaggtgcagtcggcttggctggggtgcttcttgtcgccctgtctgttgccgctggtctagggctatgttcactcattggtatttctttcaatgccgcaacgacacaggtgttaccttttttagccctaggggtgggtgtggatgacgtttttctactcgcccatgcattcagcgagactggacagaacaagcgcattcccttcgaggatagaaccggcgagtgcctgaaacgcaccggagctagcgttgccctcacgtccatctctaatgtgacagcttttttcatggctgctcttataccaatacccgctctgagggccttcagtctgcaagcagctgtcgtagttgtgtttaattttgctatggtgctgctcatctttcctgcaatcctgtctatggatttataccggcgagaggaccgtcggctcgatatcttttgttgctttacttcgccatgtgtgagccgcgtcatacaggtggagccccaggcttatacagatacccatgataatactaggtacagccctccccctccatatagtagtcacagcttcgcacatgagactcagatcaccatgcagtccaccgtacagttacggaccgagtacgatccgcatacccatgtgtactacaccacggccgaacccagaagtgagatctctgtgcagccagtgaccgtgactcaggacacgctttcatgccaaagcccagagtctaccagttcaacgagggacctcctgagccagtttagcgatagttcacttcactgtctggagcctccctgcactaagtggacattgagctcttttgctgagaaacactatgcgccatttcttctgaaacccaaggcaaaggtggtagtgatttttctgttccttgggctgcttggagttagtctctatggaaccacacgtgttcgcgatgggctcgacctcacagatatcgtgccacgcgagacccgggagtacgattttattgccgcacagtttaaatatttctcattttacaatatgtatattgtcacgcagaaagcagattatcccaacattcaacatctactgtacgacctgcataggagcttctccaatgtgaaatacgtgatgctagaagagaacaaacagctaccaaaaatgtggcttcactatttccgggactggctacagggccttcaggatgccttcgactcagactgggaaactgggaaaatcatgccaaataactataaaaatggttcagatgatggagtgctggcttacaaactgctcgtccaaacaggcagcagagacaagcctatagatatcagccagctcacaaagcagagattggtggacgccgacggaattatcaacccctccgctttctatatctatttgactgcttgggttagtaacgatcctgtggcgtatgcagctagccaagccaatattagaccccatagaccagagtgggtgcacgacaaggccgactatatgcctgaaacccgtctcaggataccggctgcagagcctatcgagtatgcccaatttccattctatttgaatggacttcgtgacaccagcgatttcgtggaagcgattgagaaggtccggacgatctgctccaactacacttcattaggtctctcaagctaccctaacggttatccatttctcttctgggagcaatacattggccttcgccactggcttctgctcttcatttcagtggtgctggcttgcaccttcctggtgtgcgccgtgtttcttttgaatccctggaccgctgggatcatcgtgatggtgctcgcactcatgacagtcgagttgtttggaatgatggggctcatcggcattaaactcagcgccgtcccagtggttatcttgatcgctagcgtcggcatcggggttgagtttacagtgcacgtagccctcgcttttttaacggcaatcggggacaagaaccgtagagcagtcctggccctcgaacatatgtttgctcctgtgctggacggtgccgtcagtactttgctcggcgttctgatgctggcgggttctgagtttgattttattgttagatacttcttcgccgttctggccatcctgaccatcctgggggtgttaaatggcctcgtactgctacccgtgcttctgagcttcttcggcccttaccccgaggtttctcctgccaatggtctgaatcggctgcccaccccttcccccgagcccccaccaagtgtagttcgcttcgcaatgcctcccggacacacccactccggtagcgattctagtgactccgaatacagctcccagacgacagtcagcggactgtcggaggagctcaggcactacgaggcccagcagggggctgggggtccagcccatcaagtcatcgttgaagcgacagagaatccggttttcgcgcactccacagttgtacatcccgagtcaagacaccacccgcctagcaacccgagacaacagcctcatttagacagcggctcgctaccccctggaaggcaggggcagcagcctcgaagggatcctccacgcgaggggctgtggccgccaccttaccgccctcgcagagacgcattcgaaatctctaccgaaggtcacagtgggccatctaatcgggcaagatggggcccacgcggagcacggtctcacaacccccgtaatcctgcctcaaccgcaatgggaagctctgtgcccggttattgccagcctattactactgttaccgcgtctgcctcggtcaccgtcgctgtgcatcctccccctgtgcctggacccggtaggaacccccgaggaggcctgtgcccagggtaccctgagacagatcacggactcttcgaagaccctcacgtgccttttcatgtacggtgcgagaggcgcgacagcaaagtagaggttattgagttgcaggacgtggagtgtgaggaaagaccacggggaagctcttcaaattag

SEQ ID NO: 37666 - DNA, 4146 bp, Artificial Sequence
  derived and/or modified sequence
atgggcaaggccacaggacggaaggcccctttgtggctgcgggctaagtttcaaaggctgctgttcaagctggggtgttacatccagaaaaattgcggaaagttcttggtggttggactcctcattttcggggcatttgcggtgggcctgaaagcggcaaatctggagacaaacgtggaggaactctgggtagaagtgggcggaagggtaagcagggagctgaattacacacggcaaaagatcggtgaagaggcaatgttcaatccacagctgatgattcaaacaccgaaggaggagggagctaatgtcctgactaccgaagctttgcttcagcacttggactctgcacttcaggcttctcgcgtccacgtgtacatgtacaaccggcagtggaaactggagcacctctgctacaagagcggagagctgattaccgaaacggggtatatggaccaaattatcgagtacctgtacccatgtctgattataacgccgctggattgcttctgggaaggtgccaaactgcagtccggcacagcatacctcctaggcaagccccctctgaggtggaccaacttcgatcccctggaatttttggaggaactgaagaagattaactatcaggttgattcatgggaggagatgctcaataaggccgaggtcggacacgggtatatggatcgtccatgcctgaatcccgcagatcccgattgcccggctacagccccaaacaaaaattccaccaagccccttgacatggctctggtcctaaacggaggctgccacggcctgagccgcaagtatatgcattggcaggaggagctgattgtggggggtacagtgaaaaattccaccggcaaactggttagcgctcatgcgctccagaccatgttccagctcatgacaccaaagcaaatgtatgaacattttaagggctatgagtacgtcagccatatcaattggaatgaagacaaggccgcagctattcttgaggcttggcagagaacctacgtggaggttgtgcatcagagtgttgcccagaattcgacccagaaggtgctcagtttcactactacaacactggacgatattctcaagtcattttctgatgtgtctgttattagggtggcaagcggttatttgctgatgctggcttatgcctgtcttactatgctgaggtgggattgctcaaagtcacaaggtgccgtcggcctggccggagtgcttcttgtcgccctgagcgtggccgcaggcttgggactgtgctcgttgatcggcattagctttaacgctgctacaacacaggtccttcctttcctagcactcggagttggagtggatgacgttttccttcttgcacacgccttttctgagacaggacaaaacaaacgtatcccgtttgaagacagaactggggaatgcctgaaacgcaccggtgcatctgtcgctctcaccagcattagtaacgtgaccgcatttttcatggctgccctgattcccattcctgcacttcgggcttttagcctgcaggcagctgtggtggtcgtgtttaacttcgctatggtactgctgatattccctgccatcctgagcatggacctgtataggcgagaggatcgacggcttgatattttctgttgtttcacaagcccatgcgtgagccgggtcattcaggtagagccgcaggcttacaccgatacccacgataatacaaggtattcacccccacccccttattctagtcactcatttgcccacgagacacagattactatgcaatccacggtccagctccggaccgaatacgacccacacacccacgtttattacacaactgcagaaccgagaagtgaaattagcgtgcagcccgtgacggtgacacaggacaccctgtcctgccagtcccccgaaagtacctcctccacacgggatctgttgtcccagttttcagattcatccctccactgcttggaacccccttgcacgaaatggacattgtctagctttgctgaaaaacactatgctcccttcctgctgaagcctaaagccaaggtcgtagtgatatttcttttccttggccttcttggcgtgtcactgtatggtactacgcgggtgagggacggtcttgatctcacggacatcgtcccacgcgagacccgagagtatgatttcatagccgctcagttcaaatacttttccttttacaacatgtacattgtgacacaaaaagccgattacccaaacatacagcacctgctttacgacttgcataggtccttctcgaatgttaagtatgtgatgcttgaggagaataaacagctgcctaagatgtggctgcactatttccgcgactggttgcagggactgcaggacgctttcgattcagattgggagaccggcaaaattatgcccaataactacaagaatggatcagatgatggcgtgctagcatacaaactcctggtgcagacgggctcccgcgataagcccatcgatattagtcagctgaccaaacaacggcttgttgacgctgacggaatcatcaatccttctgccttttatatctatcttaccgcctgggtaagcaatgaccctgtcgcctatgctgccagccaggccaacatacggccacacaggcccgagtgggtacacgacaaggccgactatatgccggaaaccaggcttaggattccagccgctgagccaatagaatacgcgcagtttcccttctaccttaatggtttgagagatacttcagactttgtagaggctatagagaaggtgcggaccatttgttctaactatacatccctcggcctgtccagctaccctaacggttatcccttcttgttctgggaacagtacatcggtctgaggcactggctgctgctgttcattagcgtcgtcctcgcttgcactttcctagtgtgcgcagtgttcctccttaacccctggaccgctggcattatcgtgatggtgcttgccctgatgaccgttgaacttttcggcatgatgggcctcatcgggattaaactgagtgccgtccctgtggtaatccttattgcctcagtaggtatcggagtggagttcacagtgcatgtggctctggcctttctgaccgccattggagacaaaaaccgtagagccgttctcgcacttgaacatatgtttgcgccagttctggatggcgctgttagtacattgctgggggtgcttatgctggcaggcagcgagttcgattttatagtacgctatttctttgccgtgctcgctatactcaccattctgggcgtgttgaacggtctggtgctactccctgttttgttgtcattttttggcccttacccggaagtgtctcctgcaaatggactgaacagactgcccactcctagccccgagccccctccttccgtggtccggtttgcaatgccacctggccatacgcatagcggctccgattcatctgactctgagtatagtagccagactaccgtttctggcttaagtgaggaattgcgacactacgaggcacaacagggggcaggcggtccagctcaccaggtgatcgttgaagccaccgagaatcctgttttcgcccatagtacagtcgtccatcccgagagtcggcaccatccaccaagcaatcctaggcagcagcctcatctggattccggatcgctaccacccggtagacagggccaacagccgcgtcgtgaccctcccagagaaggactgtggccacccccttatagaccaaggcgggatgcttttgagatttctactgagggacattcggggccatctaatcgagcacggtggggcccacggggtgcccgtagccacaatccacggaatcctgcatcaactgctatgggatccagtgtgcccggttattgccagccaattacaactgtcacggcatctgcatccgtgacagtggcggtacacccccctcctgtgcccggaccaggcagaaacccacgcggtgggctgtgtcccggataccctgaaaccgaccatggtttgtttgaagacccccacgtgccgtttcatgttaggtgtgaaagacgcgatagcaaggttgaagtgatcgagctgcaggatgttgaatgtgaggaacgaccacgcggtagctcgagtaattag

SEQ ID NO: 37667 - DNA, 255 bp, Artificial Sequence
  derived and/or modified sequence
atgggcaaagcaaccggcaggaaggcccctctgtggctgcgggctaagtttcaaaggctcctatttaagttgggatgctatatacaaaaaaactgcggaaaattccttgtggtcggactcctcatatttggggcattcgctgttggattgaaggccgctaacctcgaaaccaatgtggaggagttgtgggtggaggaggtcaatctgttatgcgggggtcagacctcgactttatggaatagttggaaaagctag

SEQ ID NO: 37668 - DNA, 6563 bp, Artificial Sequence
  derived and/or modified sequence
gaaggcgagcacccagacgggggcccgccggggccgcggccagcgccggggaaatgccgcgccggggagcagcctgcgccggcctgagcccttccctttgcactcggctgttttttacgtttaaccagaaaggaagggagaggagggaaagatccatgtggctgccctcttccgatcacaaatattgtcgggaaggctactggccggaaagcgccgctgtggctgagagcgaagtttcagagactcttatttaaactgggttgttacattcaaaaaaactgcggcaagttcttggttgtgggcctcctcatatttggggccttcgcggtgggattaaaagcagcgaacctcgagaccaacgtggaggagctgtgggtggaagttggaggacgagtaagtcgtgaattaaattatactcgccagaagattggagaagaggctatgtttaatcctcaactcatgatacagacccctaaagaagaaggtgctaatgtcctgaccacagaagcgctcctacaacacctggactcggcactccaggccagccgtgtccatgtatacatgtacaacaggcagtggaaattggaacatttgtgttacaaatcaggagagcttatcacagaaacaggttacatggatcagataatagaatatctttacccttgtttgattattacacctttggactgcttctgggaaggggcgaaattacagtctgggacagcatacctcctaggtaaacctcctttgcggtggacaaacttcgaccctttggaattcctggaagagttaaagaaaataaactatcaagtggacagctgggaggaaatgctgaataaggctgaggttggtcatggttacatggaccgcccctgcctcaatccggccgatccagactgccccgccacagcccccaacaaaaattcaaccaaacctcttgatatggcccttgttttgaatggtggatgtcatggcttatccagaaagtatatgcactggcaggaggagttgattgtgggtggcacagtcaagaacagcactggaaaactcgtcagcgcccatgccctgcagaccatgttccagttaatgactcccaagcaaatgtacgagcacttcaaggggtacgagtatgtctcacacatcaactggaacgaggacaaagcggcagccatcctggaggcctggcagaggacatatgtggaggtggttcatcagagtgtcgcacagaactccactcaaaaggtgctttccttcaccaccacgaccctggacgacatcctgaaatccttctctgacgtcagtgtcatccgcgtggccagcggctacttactcatgctcgcctatgcctgtctaaccatgctgcgctgggactgctccaagtcccagggtgccgtggggctggctggcgtcctgctggttgcactgtcagtggctgcaggactgggcctgtgctcattgatcggaatttcctttaacgctgcaacaactcaggttttgccatttctcgctcttggtgttggtgtggatgatgtttttcttctggcccacgccttcagtgaaacaggacagaataaaagaatcccttttgaggacaggaccggggagtgcctgaagcgcacaggagccagcgtggccctcacgtccatcagcaatgtcacagccttcttcatggccgcgttaatcccaattcccgctctgcgggcgttctccctccaggcagcggtagtagtggtgttcaattttgccatggttctgctcatttttcctgcaattctcagcatggatttatatcgacgcgaggacaggagactggatattttctgctgttttacaagcccctgcgtcagcagagtgattcaggttgaacctcaggcctacaccgacacacacgacaatacccgctacagccccccacctccctacagcagccacagctttgcccatgaaacgcagattaccatgcagtccactgtccagctccgcacggagtacgacccccacacgcacgtgtactacaccaccgctgagccgcgctccgagatctctgtgcagcccgtcaccgtgacacaggacaccctcagctgccagagcccagagagcaccagctccacaagggacctgctctcccagttctccgactccagcctccactgcctcgagcccccctgtacgaagtggacactctcatcttttgctgagaagcactatgctcctttcctcttgaaaccaaaagccaaggtagtggtgatcttcctttttctgggcttgctgggggtcagcctttatggcaccacccgagtgagagacgggctggaccttacggacattgtacctcgggaaaccagagaatatgactttattgctgcacaattcaaatacttttctttctacaacatgtatatagtcacccagaaagcagactacccgaatatccagcacttactttacgacctacacaggagtttcagtaacgtgaagtatgtcatgttggaagaaaacaaacagcttcccaaaatgtggctgcactacttcagagactggcttcagggacttcaggatgcatttgacagtgactgggaaaccgggaaaatcatgccaaacaattacaagaatggatcagacgatggagtccttgcctacaaactcctggtgcaaaccggcagccgcgataagcccatcgacatcagccagttgactaaacagcgtctggtggatgcagatggcatcattaatcccagcgctttctacatctacctgacggcttgggtcagcaacgaccccgtcgcgtatgctgcctcccaggccaacatccggccacaccgaccagaatgggtccacgacaaagccgactacatgcctgaaacaaggctgagaatcccggcagcagagcccatcgagtatgcccagttccctttctacctcaacggcttgcgggacacctcagactttgtggaggcaattgaaaaagtaaggaccatctgcagcaactatacgagcctggggctgtccagttaccccaacggctaccccttcctcttctgggagcagtacatcggcctccgccactggctgctgctgttcatcagcgtggtgttggcctgcacattcctcgtgtgcgctgtcttccttctgaacccctggacggccgggatcattgtgatggtcctggcgctgatgacggtcgagctgttcggcatgatgggcctcatcggaatcaagctcagtgccgtgcccgtggtcatcctgatcgcttctgttggcataggagtggagttcaccgttcacgttgctttggcctttctgacggccatcggcgacaagaaccgcagggctgtgcttgccctggagcacatgtttgcacccgtcctggatggcgccgtgtccactctgctgggagtgctgatgctggcgggatctgagttcgacttcattgtcaggtatttctttgctgtgctggcgatcctcaccatcctcggcgttctcaatgggctggttttgcttcccgtgcttttgtctttctttggaccatatcctgaggtgtctccagccaacggcttgaaccgcctgcccacaccctcccctgagccaccccccagcgtggtccgcttcgccatgccgcccggccacacgcacagcgggtctgattcctccgactcggagtatagttcccagacgacagtgtcaggcctcagcgaggagcttcggcactacgaggcccagcagggcgcgggaggccctgcccaccaagtgatcgtggaagccacagaaaaccccgtcttcgcccactccactgtggtccatcccgaatccaggcatcacccaccctcgaacccgagacagcagccccacctggactcagggtccctgcctcccggacggcaaggccagcagccccgcagggacccccccagagaaggcttgtggccacccccctacagaccgcgcagagacgcttttgaaatttctactgaagggcattctggccctagcaatagggcccgctggggccctcgcggggcccgttctcacaaccctcggaacccagcgtccactgccatgggcagctccgtgcccggctactgccagcccatcaccactgtgacggcttctgcctccgtgactgtcgccgtgcacccgccgcctgtccctgggcctgggcggaacccccgagggggactctgcccaggctaccctgagactgaccacggcctgtttgaggacccccacgtgcctttccacgtccggtgtgagaggagggattcgaaggtggaagtcattgagctgcaggacgtggaatgcgaggagaggccccggggaagcagctccaactgagggtgattaaaatctgaagcaaagaggccaaagattggaaaccccccacccccacctctttccagaactgcttgaagagaactggttggagttatggaaaagatgccctgtgccaggacagcagttcattgttactgtaaccgattgtattattttgttaaatatttctataaatatttaagagatgtacacatgtgtaatataggaaggaaggatgtaaagtggtatgatctggggcttctccactcctgccccagagtgtggaggccacagtggggcctctccgtatttgtgcattgggctccgtgccacaaccaagcttcattagtcttaaatttcagcatatgttgctgctgcttaaatattgtataatttacttgtataattctatgcaaatattgcttatgtaataggattattttgtaaaggtttctgtttaaaatattttaaatttgcatatcacaaccctgtggtagtatgaaatgttactgttaactttcaaacacgctatgcgtgataatttttttgtttaatgagcagatatgaagaaagcacgttaatcctggtggcttctctaggtgtcgttgtgtgcggtcctcttgtttggctgtgcgtgtgaacacgtgtgtgagttcaccatgtactgtactgtgattttttttttgtcttgttttgtttctctacactgtctgtaacctgtagtaggctctgacctagtcaggctggaagcgtcaggatatcttttcttcgtgctggtgagggctggccctaaacatccacctaatcctttcaaatcagcccggcaaaagctagactctcctcgtgtctacggcatctcttatgatcattggctgccatccaggaccccaatttgtgcttcagggggataatctccttctctcggatcattgtgatggatgctggaacctcagggtatggagctcacatcagttcatcatggtgggtgttagagaattcggtgacatgcctagtgctgagccttggctgggccatgagagtctgtatactctaaaaagcatgcagcatggtgcccctcttctgaccaacacacacacgacccctcccccaacacccccaaattcaagagtggatgtggccctgtcacaggtagaaaaacctatttagttaattctttcttggcccacagtctcccagaaatgatgttttgagtccctatagtttaaactccctctcttaaatggagcagctggttgaggctttctagatctgtttgcatcttctttaaaactaagtggtgagcatgcattgtggtgtagaggcaggcattatgtaggataagagctccggggggattcttcatgcaccagtgtttagggtacgtgcttcctaagtaaatccaaacattgtctccatcctccccgtcattagtgctctttcaatgtgatgtgggaaagcaggaggatggacacaccccactgaaagatgtaggcaggggcaggtctctcaaccaggcatatttttaaaagttgcttctgtactggttctcttcttttgctctgaggtgtgggctccctcatctcgtaaccagagaccagcacatgtcagggaagcacccagtgtcggctccccatccaaatccacaccagcaccttgttacagacaagaagtcagaggaaagggcggggtccctgcagggctgaagcctaagctactgtgaggcgctcacgagtggcagctcctgttactcccttttaaattacctgggaaatcttaacagaaaggtaatgggcccccagaaatacccacagcatagtgacctcagaccctgatactcaccacaaaacttttaagatgctgattgggagccgcttgtggctgctgggtgtgtgtgtgtgtgtgtgcgtgcgtgcgtgtgtgtgtgtctctgctggggaccctggccacccccctgctgctgtcttggtgcctgtcacccacatggtctgccatcctaacacccagctctgctcagaaaacgtcctgcgtggaggagggatgatgcagaattctgaagtcgacttccctctggctcctggcgtgccctcgctcccttcctgagcccagctcgtgttgcgccggaggctgcgcggcccctgatttctgcatggtgtagaactttctccaatagtcacattggcaaagggagaactggggtgggcggggggtggggctggcagggaattagaatttctctctctcttttaatagtt

SEQ ID NO: 37669 - DNA, 8232 bp, Artificial Sequence
  derived and/or modified sequence
cggccgcggggggcggggagagggtggctaggctcgcgggagctcgccgggcagggcgcctcccaggaaggcggggaggggagcgcctgtttacccaggagggctgtgctgatagcacgttcctcgagtttactttgctttccttgagtttattgtaaaggggtaaagttttcggatccgtcacgtgaccctgacaggtcctgcctatggcgcggcagaccacccacgccgagggccatggaactgcttaatagaaacaggcttgtaattgtgagtccgcgctgcactccgccgaaagcctccggcggcccagcgcgccggggtttttacactttccgttccttttgtaaagacggaggaggaggagaagaagaagaagaaaacggaggagaagaaaaagacgacaggggagacaaagagacccgcagcgacaaggcaagggggagacgagggaagactgggagaagacggaggagcggaggacgaggaaaggggggccagggaaaaaaaaggaattgatgtgaaatccaagcccagcgtccgcgccatcggcacccgcgctccgagcaggggttgacggccggctatggggaaggctactggccggaaagcgccgctgtggctgagagcgaagtttcagagactcttatttaaactgggttgttacattcaaaaaaactgcggcaagttcttggttgtgggcctcctcatatttggggccttcgcggtgggattaaaagcagcgaacctcgagaccaacgtggaggagctgtgggtggaagttggaggacgagtaagtcgtgaattaaattatactcgccagaagattggagaagaggctatgtttaatcctcaactcatgatacagacccctaaagaagaaggtgctaatgtcctgaccacagaagcgctcctacaacacctggactcggcactccaggccagccgtgtccatgtatacatgtacaacaggcagtggaaattggaacatttgtgttacaaatcaggagagcttatcacagaaacaggttacatggatcagataatagaatatctttacccttgtttgattattacacctttggactgcttctgggaaggggcgaaattacagtctgggacagcatacctcctaggtaaacctcctttgcggtggacaaacttcgaccctttggaattcctggaagagttaaagaaaataaactatcaagtggacagctgggaggaaatgctgaataaggctgaggttggtcatggttacatggaccgcccctgcctcaatccggccgatccagactgccccgccacagcccccaacaaaaattcaaccaaacctcttgatatggcccttgttttgaatggtggatgtcatggcttatccagaaagtatatgcactggcaggaggagttgattgtgggtggcacagtcaagaacagcactggaaaactcgtcagcgcccatgccctgcagaccatgttccagttaatgactcccaagcaaatgtacgagcacttcaaggggtacgagtatgtctcacacatcaactggaacgaggacaaagcggcagccatcctggaggcctggcagaggacatatgtggaggtggttcatcagagtgtcgcacagaactccactcaaaaggtgctttccttcaccaccacgaccctggacgacatcctgaaatccttctctgacgtcagtgtcatccgcgtggccagcggctacttactcatgctcgcctatgcctgtctaaccatgctgcgctgggactgctccaagtcccagggtgccgtggggctggctggcgtcctgctggttgcactgtcagtggctgcaggactgggcctgtgctcattgatcggaatttcctttaacgctgcaacaactcaggttttgccatttctcgctcttggtgttggtgtggatgatgtttttcttctggcccacgccttcagtgaaacaggacagaataaaagaatcccttttgaggacaggaccggggagtgcctgaagcgcacaggagccagcgtggccctcacgtccatcagcaatgtcacagccttcttcatggccgcgttaatcccaattcccgctctgcgggcgttctccctccaggcagcggtagtagtggtgttcaattttgccatggttctgctcatttttcctgcaattctcagcatggatttatatcgacgcgaggacaggagactggatattttctgctgttttacaagcccctgcgtcagcagagtgattcaggttgaacctcaggcctacaccgacacacacgacaatacccgctacagccccccacctccctacagcagccacagctttgcccatgaaacgcagattaccatgcagtccactgtccagctccgcacggagtacgacccccacacgcacgtgtactacaccaccgctgagccgcgctccgagatctctgtgcagcccgtcaccgtgacacaggacaccctcagctgccagagcccagagagcaccagctccacaagggacctgctctcccagttctccgactccagcctccactgcctcgagcccccctgtacgaagtggacactctcatcttttgctgagaagcactatgctcctttcctcttgaaaccaaaagccaaggtagtggtgatcttcctttttctgggcttgctgggggtcagcctttatggcaccacccgagtgagagacgggctggaccttacggacattgtacctcgggaaaccagagaatatgactttattgctgcacaattcaaatacttttctttctacaacatgtatatagtcacccagaaagcagactacccgaatatccagcacttactttacgacctacacaggagtttcagtaacgtgaagtatgtcatgttggaagaaaacaaacagcttcccaaaatgtggctgcactacttcagagactggcttcagggacttcaggatgcatttgacagtgactgggaaaccgggaaaatcatgccaaacaattacaagaatggatcagacgatggagtccttgcctacaaactcctggtgcaaaccggcagccgcgataagcccatcgacatcagccagttgactaaacagcgtctggtggatgcagatggcatcattaatcccagcgctttctacatctacctgacggcttgggtcagcaacgaccccgtcgcgtatgctgcctcccaggccaacatccggccacaccgaccagaatgggtccacgacaaagccgactacatgcctgaaacaaggctgagaatcccggcagcagagcccatcgagtatgcccagttccctttctacctcaacggcttgcgggacacctcagactttgtggaggcaattgaaaaagtaaggaccatctgcagcaactatacgagcctggggctgtccagttaccccaacggctaccccttcctcttctgggagcagtacatcggcctccgccactggctgctgctgttcatcagcgtggtgttggcctgcacattcctcgtgtgcgctgtcttccttctgaacccctggacggccgggatcattgtgatggtcctggcgctgatgacggtcgagctgttcggcatgatgggcctcatcggaatcaagctcagtgccgtgcccgtggtcatcctgatcgcttctgttggcataggagtggagttcaccgttcacgttgctttggcctttctgacggccatcggcgacaagaaccgcagggctgtgcttgccctggagcacatgtttgcacccgtcctggatggcgccgtgtccactctgctgggagtgctgatgctggcgggatctgagttcgacttcattgtcaggtatttctttgctgtgctggcgatcctcaccatcctcggcgttctcaatgggctggttttgcttcccgtgcttttgtctttctttggaccatatcctgaggtgtctccagccaacggcttgaaccgcctgcccacaccctcccctgagccaccccccagcgtggtccgcttcgccatgccgcccggccacacgcacagcgggtctgattcctccgactcggagtatagttcccagacgacagtgtcaggcctcagcgaggagcttcggcactacgaggcccagcagggcgcgggaggccctgcccaccaagtgatcgtggaagccacagaaaaccccgtcttcgcccactccactgtggtccatcccgaatccaggcatcacccaccctcgaacccgagacagcagccccacctggactcagggtccctgcctcccggacggcaaggccagcagccccgcagggacccccccagagaaggcttgtggccacccccctacagaccgcgcagagacgcttttgaaatttctactgaagggcattctggccctagcaatagggcccgctggggccctcgcggggcccgttctcacaaccctcggaacccagcgtccactgccatgggcagctccgtgcccggctactgccagcccatcaccactgtgacggcttctgcctccgtgactgtcgccgtgcacccgccgcctgtccctgggcctgggcggaacccccgagggggactctgcccaggctaccctgagactgaccacggcctgtttgaggacccccacgtgcctttccacgtccggtgtgagaggagggattcgaaggtggaagtcattgagctgcaggacgtggaatgcgaggagaggccccggggaagcagctccaactgaggtgagtgccactgacaagggcagccaagggacctagagccaggcaaagaggaggacaaggttctcctggggttctcggcatccccgaggggctgtggcgctcgggcacatcccacgctggaccccagtgaccttttatccccagagcaaggctgatgtgtccaagctttgtcatccttggggaaccagtccagctccacactgctctcttcccccactgctaacctgcggagggtcggtgcagcgccacaaggacacaaacagcaccaccttttaccaatatttgccagtctttatggaggtgcatgccacagcgaattggtcacatgggaacgcatccgtgtaaccagcccccagatgaagggagaggtcacaagcagcccccagggacacctcaggcccacaccccactctcgtgatttctaataccaaggttactgctgcctgcttttgtactttataaatacggacttgcacacctcttactctgttcaacttccttttttgcttccttttaaagggtgattaaaatctgaagcaaagaggccaaagattggaaaccccccacccccacctctttccagaactgcttgaagagaactggttggagttatggaaaagatgccctgtgccaggacagcagttcattgttactgtaaccgattgtattattttgttaaatatttctataaatatttaagagatgtacacatgtgtaatataggaaggaaggatgtaaagtggtatgatctggggcttctccactcctgccccagagtgtggaggccacagtggggcctctccgtatttgtgcattgggctccgtgccacaaccaagcttcattagtcttaaatttcagcatatgttgctgctgcttaaatattgtataatttacttgtataattctatgcaaatattgcttatgtaataggattattttgtaaaggtttctgtttaaaatattttaaatttgcatatcacaaccctgtggtagtatgaaatgttactgttaactttcaaacacgctatgcgtgataatttttttgtttaatgagcagatatgaagaaagcacgttaatcctggtggcttctctaggtgtcgttgtgtgcggtcctcttgtttggctgtgcgtgtgaacacgtgtgtgagttcaccatgtactgtactgtgattttttttttgtcttgttttgtttctctacactgtctgtaacctgtagtaggctctgacctagtcaggctggaagcgtcaggatatcttttcttcgtgctggtgagggctggccctaaacatccacctaatcctttcaaatcagcccggcaaaagctagactctcctcgtgtctacggcatctcttatgatcattggctgccatccaggaccccaatttgtgcttcagggggataatctccttctctcggatcattgtgatggatgctggaacctcagggtatggagctcacatcagttcatcatggtgggtgttagagaattcggtgacatgcctagtgctgagccttggctgggccatgagagtctgtatactctaaaaagcatgcagcatggtgcccctcttctgaccaacacacacacgacccctcccccaacacccccaaattcaagagtggatgtggccctgtcacaggtagaaaaacctatttagttaattctttcttggcccacagtctcccagaaatgatgttttgagtccctatagtttaaactccctctcttaaatggagcagctggttgaggctttctagatctgtttgcatcttctttaaaactaagtggtgagcatgcattgtggtgtagaggcaggcattatgtaggataagagctccggggggattcttcatgcaccagtgtttagggtacgtgcttcctaagtaaatccaaacattgtctccatcctccccgtcattagtgctctttcaatgtgatgtgggaaagcaggaggatggacacaccccactgaaagatgtaggcaggggcaggtctctcaaccaggcatatttttaaaagttgcttctgtactggttctcttcttttgctctgaggtgtgggctccctcatctcgtaaccagagaccagcacatgtcagggaagcacccagtgtcggctccccatccaaatccacaccagcaccttgttacagacaagaagtcagaggaaagggcggggtccctgcagggctgaagcctaagctactgtgaggcgctcacgagtggcagctcctgttactcccttttaaattacctgggaaatcttaacagaaaggtaatgggcccccagaaatacccacagcatagtgacctcagaccctgatactcaccacaaaacttttaagatgctgattgggagccgcttgtggctgctgggtgtgtgtgtgtgtgtgtgcgtgcgtgcgtgtgtgtgtgtctctgctggggaccctggccacccccctgctgctgtcttggtgcctgtcacccacatggtctgccatcctaacacccagctctgctcagaaaacgtcctgcgtggaggagggatgatgcagaattctgaagtcgacttccctctggctcctggcgtgccctcgctcccttcctgagcccagctcgtgttgcgccggaggctgcgcggcccctgatttctgcatggtgtagaactttctccaatagtcacattggcaaagggagaactggggtgggcggggggtggggctggcagggaattagaatttctctctctcttttaatagttttattttgtctgtcctgtttgttcatttggatgttttaatttttaaaaaaaaaaaaactttgctgatatttataattttgtatcataagaatgttttcctctacagtatttgtcatgccagtttataacaaaaaaaaatgcagggattttatttctattggaaacattacagctatgttttacttttggacagaatttttatttgtatagagtgcttactaatgttaaatagttcagagtatataacatttacattaaggactcatggtaggttttagggtaaggagtttaaaggaaataaatattcaaactgggtctcattgccaattttggtggaaatgagtttgtgtcatttcaattacaaagataaaagtatgccatataatttatttatatgaagatttatttttgtagtgtacatagtagtcatcaagtcttttgacagaagtatatttttaaagaatttatatgtgatgaatccataatgtctggaactttgctgagacatgagtgggcacagttttcattgtaaattacagcaaggaaagaaaatgtttaacagtgttaagagagtcagagcagagtggatattcatgcgattatgaagtgtttattagttaccattggcgacctagcatgcttctcatttcaaaccttggaaggtgaaaatgtacaaactctctaaataattaatgttcaaacactgatagaaattctaacatgaataaaaaataatataacttgttggtt

SEQ ID NO: 37670 - DNA, 8049 bp, Artificial Sequence
  derived and/or modified sequence
acccaggagggctgtgctgatagcacgttcctcgagtttactttgctttccttgagtttattgtaaaggggtaaagttttcggatccgtcacgtgaccctgacaggtcctgcctatggcgcggcagaccacccacgccgagggccatggaactgcttaatagaaacaggcttgtaattgtgagtccgcgctgcactccgccgaaagcctccggcggcccagcgcgccggggtttttacactttccgttccttttgtaaagacggaggaggaggagaagaagaagaagaaaacggaggagaagaaaaagacgacaggggagacaaagagacccgcagcgacaaggcaagggggagacgagggaagactgggagaagacggaggagcggaggacgaggaaaggggggccagggaaaaaaaaggaattgatgtgaaatccaagcccagcgtccgcgccatcggcacccgcgctccgagcaggggttgacggccggctatggggaaggctactggccggaaagcgccgctgtggctgagagcgaagtttcagagactcttatttaaactgggttgttacattcaaaaaaactgcggcaagttcttggttgtgggcctcctcatatttggggccttcgcggtgggattaaaagcagcgaacctcgagaccaacgtggaggagctgtgggtggaagttggaggacgagtaagtcgtgaattaaattatactcgccagaagattggagaagaggctatgtttaatcctcaactcatgatacagacccctaaagaagaaggtgctaatgtcctgaccacagaagcgctcctacaacacctggactcggcactccaggccagccgtgtccatgtatacatgtacaacaggcagtggaaattggaacatttgtgttacaaatcaggagagcttatcacagaaacaggttacatggatcagataatagaatatctttacccttgtttgattattacacctttggactgcttctgggaaggggcgaaattacagtctgggacagcatacctcctaggtaaacctcctttgcggtggacaaacttcgaccctttggaattcctggaagagttaaagaaaataaactatcaagtggacagctgggaggaaatgctgaataaggctgaggttggtcatggttacatggaccgcccctgcctcaatccggccgatccagactgccccgccacagcccccaacaaaaattcaaccaaacctcttgatatggcccttgttttgaatggtggatgtcatggcttatccagaaagtatatgcactggcaggaggagttgattgtgggtggcacagtcaagaacagcactggaaaactcgtcagcgcccatgccctgcagaccatgttccagttaatgactcccaagcaaatgtacgagcacttcaaggggtacgagtatgtctcacacatcaactggaacgaggacaaagcggcagccatcctggaggcctggcagaggacatatgtggaggtggttcatcagagtgtcgcacagaactccactcaaaaggtgctttccttcaccaccacgaccctggacgacatcctgaaatccttctctgacgtcagtgtcatccgcgtggccagcggctacttactcatgctcgcctatgcctgtctaaccatgctgcgctgggactgctccaagtcccagggtgccgtggggctggctggcgtcctgctggttgcactgtcagtggctgcaggactgggcctgtgctcattgatcggaatttcctttaacgctgcaacaactcaggttttgccatttctcgctcttggtgttggtgtggatgatgtttttcttctggcccacgccttcagtgaaacaggacagaataaaagaatcccttttgaggacaggaccggggagtgcctgaagcgcacaggagccagcgtggccctcacgtccatcagcaatgtcacagccttcttcatggccgcgttaatcccaattcccgctctgcgggcgttctccctccaggcagcggtagtagtggtgttcaattttgccatggttctgctcatttttcctgcaattctcagcatggatttatatcgacgcgaggacaggagactggatattttctgctgttttacaagcccctgcgtcagcagagtgattcaggttgaacctcaggcctacaccgacacacacgacaatacccgctacagccccccacctccctacagcagccacagctttgcccatgaaacgcagattaccatgcagtccactgtccagctccgcacggagtacgacccccacacgcacgtgtactacaccaccgctgagccgcgctccgagatctctgtgcagcccgtcaccgtgacacaggacaccctcagctgccagagcccagagagcaccagctccacaagggacctgctctcccagttctccgactccagcctccactgcctcgagcccccctgtacgaagtggacactctcatcttttgctgagaagcactatgctcctttcctcttgaaaccaaaagccaaggtagtggtgatcttcctttttctgggcttgctgggggtcagcctttatggcaccacccgagtgagagacgggctggaccttacggacattgtacctcgggaaaccagagaatatgactttattgctgcacaattcaaatacttttctttctacaacatgtatatagtcacccagaaagcagactacccgaatatccagcacttactttacgacctacacaggagtttcagtaacgtgaagtatgtcatgttggaagaaaacaaacagcttcccaaaatgtggctgcactacttcagagactggcttcagggacttcaggatgcatttgacagtgactgggaaaccgggaaaatcatgccaaacaattacaagaatggatcagacgatggagtccttgcctacaaactcctggtgcaaaccggcagccgcgataagcccatcgacatcagccagttgactaaacagcgtctggtggatgcagatggcatcattaatcccagcgctttctacatctacctgacggcttgggtcagcaacgaccccgtcgcgtatgctgcctcccaggccaacatccggccacaccgaccagaatgggtccacgacaaagccgactacatgcctgaaacaaggctgagaatcccggcagcagagcccatcgagtatgcccagttccctttctacctcaacggcttgcgggacacctcagactttgtggaggcaattgaaaaagtaaggaccatctgcagcaactatacgagcctggggctgtccagttaccccaacggctaccccttcctcttctgggagcagtacatcggcctccgccactggctgctgctgttcatcagcgtggtgttggcctgcacattcctcgtgtgcgctgtcttccttctgaacccctggacggccgggatcattgtgatggtcctggcgctgatgacggtcgagctgttcggcatgatgggcctcatcggaatcaagctcagtgccgtgcccgtggtcatcctgatcgcttctgttggcataggagtggagttcaccgttcacgttgctttggcctttctgacggccatcggcgacaagaaccgcagggctgtgcttgccctggagcacatgtttgcacccgtcctggatggcgccgtgtccactctgctgggagtgctgatgctggcgggatctgagttcgacttcattgtcaggtatttctttgctgtgctggcgatcctcaccatcctcggcgttctcaatgggctggttttgcttcccgtgcttttgtctttctttggaccatatcctgaggtgtctccagccaacggcttgaaccgcctgcccacaccctcccctgagccaccccccagcgtggtccgcttcgccatgccgcccggccacacgcacagcgggtctgattcctccgactcggagtatagttcccagacgacagtgtcaggcctcagcgaggagcttcggcactacgaggcccagcagggcgcgggaggccctgcccaccaagtgatcgtggaagccacagaaaaccccgtcttcgcccactccactgtggtccatcccgaatccaggcatcacccaccctcgaacccgagacagcagccccacctggactcagggtccctgcctcccggacggcaaggccagcagccccgcagggacccccccagagaaggcttgtggccacccccctacagaccgcgcagagacgcttttgaaatttctactgaagggcattctggccctagcaatagggcccgctggggccctcgcggggcccgttctcacaaccctcggaacccagcgtccactgccatgggcagctccgtgcccggctactgccagcccatcaccactgtgacggcttctgcctccgtgactgtcgccgtgcacccgccgcctgtccctgggcctgggcggaacccccgagggggactctgcccaggctaccctgagactgaccacggcctgtttgaggacccccacgtgcctttccacgtccggtgtgagaggagggattcgaaggtggaagtcattgagctgcaggacgtggaatgcgaggagaggccccggggaagcagctccaactgagggtgattaaaatctgaagcaaagaggccaaagattggaaaccccccacccccacctctttccagaactgcttgaagagaactggttggagttatggaaaagatgccctgtgccaggacagcagttcattgttactgtaaccgattgtattattttgttaaatatttctataaatatttaagagatgtacacatgtgtaatataggaaggaaggatgtaaagtggtatgatctggggcttctccactcctgccccagagtgtggaggccacagtggggcctctccgtatttgtgcattgggctccgtgccacaaccaagcttcattagtcttaaatttcagcatatgttgctgctgcttaaatattgtataatttacttgtataattctatgcaaatattgcttatgtaataggattattttgtaaaggtttctgtttaaaatattttaaatttgcatatcacaaccctgtggtagtatgaaatgttactgttaactttcaaacacgctatgcgtgataatttttttgtttaatgagcagatatgaagaaagcacgttaatcctggtggcttctctaggtgtcgttgtgtgcggtcctcttgtttggctgtgcgtgtgaacacgtgtgtgagttcaccatgtactgtactgtgattttttttttgtcttgttttgtttctctacactgtctgtaacctgtagtaggctctgacctagtcaggctggaagcgtcaggatatcttttcttcgtgctggtgagggctggccctaaacatccacctaatcctttcaaatcagcccggcaaaagctagactctcctcgtgtctacggcatctcttatgatcattggctgccatccaggaccccaatttgtgcttcagggggataatctccttctctcggatcattgtgatggatgctggaacctcagggtatggagctcacatcagttcatcatggtgggtgttagagaattcggtgacatgcctagtgctgagccttggctgggccatgagagtctgtatactctaaaaagcatgcagcatggtgcccctcttctgaccaacacacacacgacccctcccccaacacccccaaattcaagagtggatgtggccctgtcacaggtagaaaaacctatttagttaattctttcttggcccacagtctcccagaaatgatgttttgagtccctatagtttaaactccctctcttaaatggagcagctggttgaggctttctagatctgtttgcatcttctttaaaactaagtggtgagcatgcattgtggtgtagaggcaggcattatgtaggataagagctccggggggattcttcatgcaccagtgtttagggtacgtgcttcctaagtaaatccaaacattgtctccatcctccccgtcattagtgctctttcaatgtgatgtgggaaagcaggaggatggacacaccccactgaaagatgtaggcaggggcaggtctctcaaccaggcatatttttaaaagttgcttctgtactggttctcttcttttgctctgaggtgtgggctccctcatctcgtaaccagagaccagcacatgtcagggaagcacccagtgtcggctccccatccaaatccacaccagcaccttgttacagacaagaagtcagaggaaagggcggggtccctgcagggctgaagcctaagctactgtgaggcgctcacgagtggcagctcctgttactcccttttaaattacctgggaaatcttaacagaaaggtaatgggcccccagaaatacccacagcatagtgacctcagaccctgatactcaccacaaaacttttaagatgctgattgggagccgcttgtggctgctgggtgtgtgtgtgtgtgtgtgcgtgcgtgcgtgtgtgtgtgtctctgctggggaccctggccacccccctgctgctgtcttggtgcctgtcacccacatggtctgccatcctaacacccagctctgctcagaaaacgtcctgcgtggaggagggatgatgcagaattctgaagtcgacttccctctggctcctggcgtgccctcgctcccttcctgagcccagctcgtgttgcgccggaggctgcgcggcccctgatttctgcatggtgtagaactttctccaatagtcacattggcaaagggagaactggggtgggcggggggtggggctggcagggaattagaatttctctctctcttttaatagttttattttgtctgtcctgtttgttcatttggatgttttaatttttaaaaaaaaaaaaactttgctgatatttataattttgtatcataagaatgttttcctctacagtatttgtcatgccagtttataacaaaaaaaaatgcagggattttatttctattggaaacattacagctatgttttacttttggacagaatttttatttgtatagagtgcttactaatgttaaatagttcagagtatataacatttacattaaggactcatggtaggttttagggtaaggagtttaaaggaaataaatattcaaactgggtctcattgccaattttggtggaaatgagtttgtgtcatttcaattacaaagataaaagtatgccatataatttatttatatgaagatttatttttgtagtgtacatagtagtcatcaagtcttttgacagaagtatatttttaaagaatttatatgtgatgaatccataatgtctggaactttgctgagacatgagtgggcacagttttcattgtaaattacagcaaggaaagaaaatgtttaacagtgttaagagagtcagagcagagtggatattcatgcgattatgaagtgtttattagttaccattggcgacctagcatgcttctcatttcaaaccttggaaggtgaaaatgtacaaactctctaaataattaatgttcaaacactgatagaaattctaacatgaataaaaaataatataacttgttggttatatctttgtttgtagaatgctttttttctttaaaatacttgggagagacagttagtgttggagccatcagaaactgttgtttcatcttgctgaccttgtgacactcttcttttttgctctatctgatggagagagttttaggttttcctcctttttgttttgtataaatagtgggtataagcatagctctgttacatggatgtattacaaagtgggggctgagcttttagtgtgatcatcacccaaatagtgtacattgtacccattaattaatttcttatcacctgaccctatttttgttttctcataccaagaaacttcctaagttaaccatcaaaattagtccttctgtcatctctcttagcatacttatttcccttatgtgatgcctaataatgagggaacataaataaagccaaattcaaag

SEQ ID NO: 37671 - protein, 1446 aa, Artificial Sequence
  derived and/or modified sequence
MELLNRNRLVIVSPRCTPPKASGGPARRGFYTFRSFCKDGGGGEEEEENGGEEKDDRGDKETRSDKGKATGRKAPLWLRAKFQRLLFKLGCYIQKNCGKFLVVGLLIFGAFAVGLKAANLETNVEELWVEVGGRVSRELNYTRQKIGEEAMFNPQLMIQTPKEEGANVLTTEALLQHLDSALQASRVHVYMYNRQWKLEHLCYKSGELITETGYMDQIIEYLYPCLIITPLDCFWEGAKLQSGTAYLLGKPPLRWTNFDPLEFLEELKKINYQVDSWEEMLNKAEVGHGYMDRPCLNPADPDCPATAPNKNSTKPLDMALVLNGGCHGLSRKYMHWQEELIVGGTVKNSTGKLVSAHALQTMFQLMTPKQMYEHFKGYEYVSHINWNEDKAAAILEAWQRTYVEVVHQSVAQNSTQKVLSFTTTTLDDILKSFSDVSVIRVASGYLLMLAYACLTMLRWDCSKSQGAVGLAGVLLVALSVAAGLGLCSLIGISFNAATTQVLPFLALGVGVDDVFLLAHAFSETGQNKRIPFEDRTGECLKRTGASVALTSISNVTAFFMAALIPIPALRAFSLQAAVVVVFNFAMVLLIFPAILSMDLYRREDRRLDIFCCFTSPCVSRVIQVEPQAYTDTHDNTRYSPPPPYSSHSFAHETQITMQSTVQLRTEYDPHTHVYYTTAEPRSEISVQPVTVTQDTLSCQSPESTSSTRDLLSQFSDSSLHCLEPPCTKWTLSSFAEKHYAPFLLKPKAKVVVIFLFLGLLGVSLYGTTRVRDGLDLTDIVPRETREYDFIAAQFKYFSFYNMYIVTQKADYPNIQHLLYDLHRSFSNVKYVMLEENKQLPKMWLHYFRDWLQGLQDAFDSDWETGKIMPNNYKNGSDDGVLAYKLLVQTGSRDKPIDISQLTKQRLVDADGIINPSAFYIYLTAWVSNDPVAYAASQANIRPHRPEWVHDKADYMPETRLRIPAAEPIEYAQFPFYLNGLRDTSDFVEAIEKVRTICSNYTSLGLSSYPNGYPFLFWEQYIGLRHWLLLFISVVLACTFLVCAVFLLNPWTAGIIVMVLALMTVELFGMMGLIGIKLSAVPVVILIASVGIGVEFTVHVALAFLTAIGDKNRRAVLALEHMFAPVLDGAVSTLLGVLMLAGSEFDFIVRYFFAVLAILTILGVLNGLVLLPVLLSFFGPYPEVSPANGLNRLPTPSPEPPPSVVRFAMPPGHTHSGSDSSDSEYSSQTTVSGLSEELRHYEAQQGAGGPAHQVIVEATENPVFAHSTVVHPESRHHPPSNPRQQPHLDSGSLPPGRQGQQPRRDPPREGLWPPPYRPRRDAFEISTEGHSGPSNRARWGPRGARSHNPRNPASTAMGSSVPGYCQPITTVTASASVTVAVHPPPVPGPGRNPRGGLCPGYPETDHGLFEDPHVPFHVRCERRDSKVEVIELQDVECEERPRGSSSN

SEQ ID NO: 37672 - DNA, 4341 bp, Artificial Sequence
  derived and/or modified sequence
atggagctgctgaacagaaacagactggtgatcgtgagccccagatgcaccccccccaaggccagcggcggccccgccagaagaggcttctacaccttcagaagcttctgcaaggacggcggcggcggcgaggaggaggaggagaacggcggcgaggagaaggacgacagaggcgacaaggagaccagaagcgacaagggcaaggccaccggcagaaaggcccccctgtggctgagagccaagttccagagactgctgttcaagctgggctgctacatccagaagaactgcggcaagttcctggtggtgggcctgctgatcttcggcgccttcgccgtgggcctgaaggccgccaacctggagaccaacgtggaggagctgtgggtggaggtgggcggcagagtgagcagagagctgaactacaccagacagaagatcggcgaggaggccatgttcaacccccagctgatgatccagacccccaaggaggagggcgccaacgtgctgaccaccgaggccctgctgcagcacctggacagcgccctgcaggccagcagagtgcacgtgtacatgtacaacagacagtggaagctggagcacctgtgctacaagagcggcgagctgatcaccgagaccggctacatggaccagatcatcgagtacctgtacccctgcctgatcatcacccccctggactgcttctgggagggcgccaagctgcagagcggcaccgcctacctgctgggcaagccccccctgagatggaccaacttcgaccccctggagttcctggaggagctgaagaagatcaactaccaggtggacagctgggaggagatgctgaacaaggccgaggtgggccacggctacatggacagaccctgcctgaaccccgccgaccccgactgccccgccaccgcccccaacaagaacagcaccaagcccctggacatggccctggtgctgaacggcggctgccacggcctgagcagaaagtacatgcactggcaggaggagctgatcgtgggcggcaccgtgaagaacagcaccggcaagctggtgagcgcccacgccctgcagaccatgttccagctgatgacccccaagcagatgtacgagcacttcaagggctacgagtacgtgagccacatcaactggaacgaggacaaggccgccgccatcctggaggcctggcagagaacctacgtggaggtggtgcaccagagcgtggcccagaacagcacccagaaggtgctgagcttcaccaccaccaccctggacgacatcctgaagagcttcagcgacgtgagcgtgatcagagtggccagcggctacctgctgatgctggcctacgcctgcctgaccatgctgagatgggactgcagcaagagccagggcgccgtgggcctggccggcgtgctgctggtggccctgagcgtggccgccggcctgggcctgtgcagcctgatcggcatcagcttcaacgccgccaccacccaggtgctgcccttcctggccctgggcgtgggcgtggacgacgtgttcctgctggcccacgccttcagcgagaccggccagaacaagagaatccccttcgaggacagaaccggcgagtgcctgaagagaaccggcgccagcgtggccctgaccagcatcagcaacgtgaccgccttcttcatggccgccctgatccccatccccgccctgagagccttcagcctgcaggccgccgtggtggtggtgttcaacttcgccatggtgctgctgatcttccccgccatcctgagcatggacctgtacagaagagaggacagaagactggacatcttctgctgcttcaccagcccctgcgtgagcagagtgatccaggtggagccccaggcctacaccgacacccacgacaacaccagatacagccccccccccccctacagcagccacagcttcgcccacgagacccagatcaccatgcagagcaccgtgcagctgagaaccgagtacgacccccacacccacgtgtactacaccaccgccgagcccagaagcgagatcagcgtgcagcccgtgaccgtgacccaggacaccctgagctgccagagccccgagagcaccagcagcaccagagacctgctgagccagttcagcgacagcagcctgcactgcctggagcccccctgcaccaagtggaccctgagcagcttcgccgagaagcactacgcccccttcctgctgaagcccaaggccaaggtggtggtgatcttcctgttcctgggcctgctgggcgtgagcctgtacggcaccaccagagtgagagacggcctggacctgaccgacatcgtgcccagagagaccagagagtacgacttcatcgccgcccagttcaagtacttcagcttctacaacatgtacatcgtgacccagaaggccgactaccccaacatccagcacctgctgtacgacctgcacagaagcttcagcaacgtgaagtacgtgatgctggaggagaacaagcagctgcccaagatgtggctgcactacttcagagactggctgcagggcctgcaggacgccttcgacagcgactgggagaccggcaagatcatgcccaacaactacaagaacggcagcgacgacggcgtgctggcctacaagctgctggtgcagaccggcagcagagacaagcccatcgacatcagccagctgaccaagcagagactggtggacgccgacggcatcatcaaccccagcgccttctacatctacctgaccgcctgggtgagcaacgaccccgtggcctacgccgccagccaggccaacatcagaccccacagacccgagtgggtgcacgacaaggccgactacatgcccgagaccagactgagaatccccgccgccgagcccatcgagtacgcccagttccccttctacctgaacggcctgagagacaccagcgacttcgtggaggccatcgagaaggtgagaaccatctgcagcaactacaccagcctgggcctgagcagctaccccaacggctaccccttcctgttctgggagcagtacatcggcctgagacactggctgctgctgttcatcagcgtggtgctggcctgcaccttcctggtgtgcgccgtgttcctgctgaacccctggaccgccggcatcatcgtgatggtgctggccctgatgaccgtggagctgttcggcatgatgggcctgatcggcatcaagctgagcgccgtgcccgtggtgatcctgatcgccagcgtgggcatcggcgtggagttcaccgtgcacgtggccctggccttcctgaccgccatcggcgacaagaacagaagagccgtgctggccctggagcacatgttcgcccccgtgctggacggcgccgtgagcaccctgctgggcgtgctgatgctggccggcagcgagttcgacttcatcgtgagatacttcttcgccgtgctggccatcctgaccatcctgggcgtgctgaacggcctggtgctgctgcccgtgctgctgagcttcttcggcccctaccccgaggtgagccccgccaacggcctgaacagactgcccacccccagccccgagcccccccccagcgtggtgagattcgccatgccccccggccacacccacagcggcagcgacagcagcgacagcgagtacagcagccagaccaccgtgagcggcctgagcgaggagctgagacactacgaggcccagcagggcgccggcggccccgcccaccaggtgatcgtggaggccaccgagaaccccgtgttcgcccacagcaccgtggtgcaccccgagagcagacaccacccccccagcaaccccagacagcagccccacctggacagcggcagcctgccccccggcagacagggccagcagcccagaagagacccccccagagagggcctgtggccccccccctacagacccagaagagacgccttcgagatcagcaccgagggccacagcggccccagcaacagagccagatggggccccagaggcgccagaagccacaaccccagaaaccccgccagcaccgccatgggcagcagcgtgcccggctactgccagcccatcaccaccgtgaccgccagcgccagcgtgaccgtggccgtgcaccccccccccgtgcccggccccggcagaaaccccagaggcggcctgtgccccggctaccccgagaccgaccacggcctgttcgaggacccccacgtgcccttccacgtgagatgcgagagaagagacagcaaggtggaggtgatcgagctgcaggacgtggagtgcgaggagagacccagaggcagcagcagcaactag

SEQ ID NO: 37673 - DNA, 4341 bp, Artificial Sequence
  derived and/or modified sequence
atggagctgcttaatcgaaaccggcttgtgatcgtcagcccaagatgtactccacccaaagcctcaggaggtccagcccggcggggattctacaccttccgcagtttctgtaaggacggcggcggcggagaggaagaagaagagaatggtggagaagaaaaggacgatcgcggcgacaaagaaactcggtcagataagggtaaggctaccggacgaaaagccccgctgtggctgagagccaagtttcagcgacttctattcaaactgggatgctacatccagaagaactgcgggaaattcctcgtggtgggtttattgatcttcggagccttcgccgtaggattgaaagccgcaaacctagaaacaaatgtggaagagctatgggtcgaggtaggcggccgggttagtcgtgaattaaattatacccgccagaagataggagaagaggccatgtttaacccccagctcatgatacagacacctaaagaggagggagcaaatgtgttaaccaccgaggccctgctccagcacttagacagcgccctccaggcctctagggtgcacgtgtacatgtacaatcgacagtggaagctggagcacctgtgttacaagtctggagagttgataactgagacgggctatatggaccaaatcattgagtacctctacccctgcctcatcatcacccccttggactgcttctgggagggagcaaagctgcagtccgggactgcctatctgttagggaagccgcccttgcgatggacgaatttcgatcccctcgagtttctggaggagctcaagaaaatcaactatcaggttgatagttgggaggaaatgttgaataaggcggaagttgggcatggatatatggatcgcccctgcttaaatccagcggatccagactgcccggcgaccgctcctaataagaacagcactaagccactcgacatggcgctcgttcttaacgggggatgtcatggactgagccggaaatacatgcactggcaggaggaactcatcgtaggggggaccgtcaagaactcgaccgggaagttggtgagcgcgcatgccctgcagacaatgttccagctgatgacccctaagcagatgtacgagcatttcaagggctacgaatatgtttcacacatcaattggaatgaagataaagctgcggccatccttgaggcttggcaaaggacctatgtggaagtggtgcatcagagtgtggcccagaatagcacgcaaaaggtgctgagttttaccaccaccactctcgatgatatactgaagtctttctccgacgtgagtgtgatcagagttgccagcggctacctactcatgctggcttacgcttgcctgaccatgctgagatgggactgcagcaagtctcagggtgccgtgggtctggccggagtgttgctggttgcactcagtgtggcagcaggcctggggttgtgtagcctgattggcatatcctttaacgcagctacaactcaggtgctcccctttcttgccttgggtgtgggcgtagacgatgtgttcctgctggcccacgcattctccgaaaccggccagaacaaacggattccgtttgaagacagaacgggtgagtgtttgaaacggactggagcttcagtggccctcaccagcatatcaaatgtgaccgctttttttatggcagcacttattccgatcccagccctccgggccttttctctgcaagccgccgtggtcgtggtgtttaattttgcaatggtccttttaatttttcctgctatcctgtccatggacttgtacagaagggaggatcgcagactagacatcttctgttgtttcacatctccatgcgtctcaagggtgatccaggtagagcctcaggcatatacggatactcatgataatactagatacagtcctcccccgccgtactcttctcatagtttcgcccacgaaacacagatcacaatgcagagcactgtgcagctgcgtaccgagtacgacccccacacccacgtttactacactacagccgaaccacgttccgagatctctgtacagcctgtcactgtgacccaggatactctgtcctgtcaatcaccagaatctacttccagcacccgggacctcttgagccaatttagcgacagcagccttcactgcttagaacctccatgtacgaagtggaccctttcatcattcgccgagaagcactacgccccttttctcctgaagccgaaggccaaggttgtagtcatctttctgtttttgggcctgctgggggtttccctatacggtacaaccagggtcagggatggtctcgacctcacagacatcgtgcccagagaaactagagagtatgatttcatcgccgctcagttcaagtatttttccttttataacatgtacatcgtgacacaaaaagctgattatcctaatattcagcatctgctgtatgacctgcataggagcttctccaatgtcaagtatgtgatgctggaggagaataagcagctcccaaagatgtggctccactactttcgagattggttacaaggattgcaggatgcattcgactcggactgggaaacaggcaaaattatgcccaacaattacaaaaatgggagtgacgacggagtcctggcctacaaactgttggtacagactggtagcagggacaaacccatagacatttcacagctgactaagcagaggctcgttgatgcagacggcataatcaatccatctgcattttacatctatttgacggcctgggtttccaatgatccagtggcctatgccgcttctcaagccaacatccgcccccataggcccgaatgggtacatgataaggcagactacatgcccgaaaccagattgcggataccagctgccgaaccaatcgagtatgctcagttcccattttatctgaacgggctgcgtgacaccagcgacttcgttgaggctattgagaaagtgagaaccatatgctcgaactacacttccttgggactgtcctcataccccaatgggtacccttttctgttttgggagcagtacattggccttcgccactggctgctgctatttatctcagtggtgcttgcttgtacattcctggtgtgtgcagtgtttctgcttaacccatggacagcgggcatcatcgttatggtgctagccctcatgacggtggagctcttcgggatgatggggctgatcggtattaaactatcagccgtcccagtcgtgatccttatagcctcagttggcatcggtgttgaatttacagtacatgtggccttggcatttttgacagccataggtgataagaatagaagagcagttctggccctggagcacatgttcgctccagtcttagacggagcggtctccaccttactgggagtcctaatgctcgcaggttcagaatttgattttatcgtccgctacttctttgctgtgcttgcaattttgaccatacttggcgtccttaatggcctggttctcttgccggtgctgctctcgttctttggaccttatccagaggtgtctccagctaatggcctcaatcgactgcctacccccagtcccgagccacccccatccgtggttagatttgccatgccccctgggcacacccactcaggatcagattcaagtgacagtgaatattcgtctcagactactgtatctggtttatccgaggaactgcgccattatgaagcgcagcaaggggccggagggcctgctcaccaggttatcgtggaagcaactgagaacccggtgttcgcacacagtacggttgttcaccctgaatcacgccaccaccccccgtccaacccccgccaacagccacacctcgacagcggatctctccctcctggtcggcaaggacagcaaccaagacgagatccaccacgagaaggactgtggcctccgccttaccgcccccgcagagacgccttcgagatctcaaccgaaggacactctggccctagcaaccgcgctcgctggggtcctcggggcgcgcgcagccacaacccacgaaaccctgccagtactgcgatggggtcttctgtacctgggtattgccagccgatcactacagtgaccgcctccgcatctgttacggtggcagtgcatccaccacctgtcccagggcctggccgaaacccacggggaggattgtgcccggggtacccagaaacagatcacggcctctttgaggaccctcacgtgcctttccatgttaggtgcgaacggcgggatagcaaggtggaggtgattgagctccaggacgtagaatgcgaagaacggcctagaggctcatcaagcaactag

SEQ ID NO: 37674 - DNA, 4341 bp, Artificial Sequence
  derived and/or modified sequence
atggagctgctgaacagaaaccggctggtgattgtgagcccccgctgcaccccacccaaggccagcggcggccctgcccggcggggcttctacaccttccgctccttctgcaaggatggcggcggcggggaggaggaggaggagaatggaggagaggagaaggatgacagaggagacaaggagaccaggagtgacaagggcaaggccaccggcaggaaggcccccctgtggctgcgggccaagttccagaggctgctcttcaagctgggctgctacatccagaagaactgtgggaagttcctggtggtgggcctgctgatctttggagcctttgctgtgggcctgaaggccgccaacctggagaccaacgtggaggagctgtgggtggaggtgggcggccgggtgtcccgggagctgaactacacccggcagaagatcggggaggaggccatgttcaacccccagctgatgatccagacccccaaggaggagggcgccaacgtgctgaccacagaggccctgctgcagcacctggacagcgccctgcaggccagccgggtgcacgtgtacatgtacaaccggcagtggaagctggagcacctgtgctacaagtctggagagctgatcacagagaccggctacatggaccagatcatcgagtacctgtacccctgcctgatcatcacccccctggactgcttctgggagggcgccaagctgcagagcggcacagcctacctgctgggcaagccacccctgcgctggaccaactttgaccccctggagttcctggaggagctgaagaagatcaactaccaggtggacagctgggaggagatgctgaacaaggccgaggtgggccacggctacatggaccggccctgcctgaacccagctgaccctgactgcccagccacagcccccaacaagaacagcaccaagcccctggacatggccctggtgctgaatggaggctgccacggcctgagcaggaagtacatgcactggcaggaggagctgattgtgggcggcaccgtgaagaacagcacaggcaagctggtgtctgcccacgccctgcagaccatgttccagctgatgacccccaagcagatgtatgagcacttcaagggctatgaatatgtgagccacatcaactggaatgaagacaaggccgccgccatcctggaggcctggcagaggacctacgtggaggtggtgcaccagagcgtggcccagaacagcacccagaaggtgctgtccttcaccaccaccaccctggatgacatcctgaagagcttcagtgatgtgtctgtcatccgggtggccagcggctacctgctgatgctggcctatgcctgcctgaccatgctgcgctgggactgcagcaagagccagggcgctgtgggcctggccggcgtgctgctggtggccctgtctgtggccgccggcctgggcctgtgcagcctcatcggcatctccttcaatgctgccaccacccaggtgctgcccttcctggccctgggcgtgggcgtggatgatgtgttcctgctggcccacgccttcagcgagaccggccagaacaagaggatcccctttgaggacagaactggagagtgcctgaagaggactggagcctctgtggccctgaccagcatcagcaatgtgacagccttcttcatggccgccctgatccccatcccagccctgcgggccttcagcctgcaggccgctgtggtggtggtgttcaactttgccatggtgctgctgatcttccctgccatcctgtccatggacctgtacagaagagaagatagaaggctggacatcttctgctgcttcaccagcccctgtgtgtccagggtcatccaggtggagccccaggcctacacagacacccatgacaacacccgctacagccccccaccaccctacagcagccacagctttgcccacgagacccagatcaccatgcagagcacagtgcagctgaggacagaatatgacccccacacccacgtgtactacaccacagctgagcccaggtctgagatctctgtgcagcctgtgacagtgacccaggacaccctgagctgccagagccctgagagcaccagcagcacccgggacctgctgagccagttcagtgacagcagcctgcactgcctggagcccccctgcaccaagtggaccctgagcagctttgctgagaagcactacgcccccttcctgctgaagcccaaggccaaggtggtggtgatcttcctgttcctgggcctgctgggcgtgtccctgtatggcaccaccagggtgagagatggcctggacctgacagacatcgtgccccgggagacccgggagtatgacttcatcgccgcccagttcaagtacttctccttctacaacatgtacatcgtgacccagaaggctgactaccccaacatccagcacctgctgtatgacctgcacaggagcttcagcaatgtgaagtatgtgatgctggaggagaacaagcagctgcccaagatgtggctgcactacttccgggactggctgcagggcctgcaggatgcctttgacagcgactgggagaccgggaagatcatgcccaacaactacaagaatggaagtgatgatggagtgctggcctacaagctgctggtgcagacaggcagccgggacaagcccatcgacatcagccagctgaccaagcagaggctggtggatgctgatggcatcatcaaccccagcgccttctacatctacctgacagcctgggtgtccaatgaccctgtggcctatgctgccagccaggccaacatccggccccacaggcctgagtgggtgcatgacaaggctgactacatgcctgagacccggctgcgcatcccagctgctgagcccatcgagtatgcccagttccccttctacctgaatggcctgcgggacaccagtgactttgtggaggccatcgagaaggtgaggaccatctgcagcaactacaccagcctgggcctgagcagctaccccaacggctaccccttcctgttctgggagcagtacatcggcctgcggcactggctgctgctcttcatctctgtggtgctggcctgcaccttcctggtgtgtgctgtgttcctgctgaacccctggacagctggcatcatcgtgatggtgctggccctgatgacagtggagctgtttggcatgatgggcctgattggcatcaagctgtctgctgtgcctgtggtgatcctgattgcctctgtgggcattggagtggagttcaccgtgcacgtggccctggccttcctgacagccatcggggacaagaacagaagagctgtgctggccctggagcacatgtttgcccctgtgctggatggagctgtgtccaccctgctgggcgtgctgatgctggccggcagcgagtttgacttcatcgtgcgctacttctttgctgtgctggccatcctgaccatcctgggcgtgctgaatggcctggtgctgctgcctgtgctgctgtccttcttcggcccctacccagaggtgtccccagccaacggcctgaaccggctgcccacccccagccctgagcccccacccagcgtggtgcgctttgccatgcctcctggccacacccacagcggcagtgacagcagtgacagcgagtacagcagccagaccaccgtgtctggcctgtctgaggagctgcggcactatgaggcccagcagggcgctgggggccctgcccaccaggtgattgtggaggccacagaaaatcctgtgtttgcccacagcacagtggtgcaccctgagagccgccaccacccccccagcaacccccggcagcagccccacctggacagcggcagcctgcccccaggccggcagggccagcagccccggcgggaccccccccgggagggcctgtggcccccaccctaccggcccaggagagatgcctttgagatcagcacagagggccacagcggccccagcaacagagcccgctggggccccaggggggcccggagccacaaccccagaaatcctgccagcacagccatgggcagctctgtgcccggctactgccagcccatcaccaccgtgacagccagcgcctctgtgacagtggccgtgcaccccccacctgtgcccggccctggcaggaacccccggggcggcctgtgccccggctacccagagacagaccacggcctgtttgaggacccccacgtgcccttccacgtgcgctgtgaaagaagagacagcaaggtggaggtgattgagctgcaggatgtggagtgtgaggagcggccccggggcagcagcagcaactag

SEQ ID NO: 37675 - DNA, 4341 bp, Artificial Sequence
  derived and/or modified sequence
atggagctgctgaaccggaaccggctggtgatcgtgagcccccggtgcacacctccaaaggccagtggagggcccgccagaagaggtttttacacattcaggtctttctgtaaggatggaggtgggggggaggaggaggaagaaaatggaggggaggaaaaggacgatcggggggacaaagagacacggtccgacaaagggaaggccacaggccgtaaggcccccctgtggctccgggcaaagttccaaaggttgctgttcaagctgggctgctacattcaaaaaaattgcggcaagtttctggtggtaggtctgctgatctttggggccttcgccgtgggtttgaaagctgccaatctggaaacaaacgttgaggagctctgggtggaggtgggcggccgtgtgagcagagagctgaattatacaagacaaaaaattggcgaagaggcaatgtttaaccctcagttgatgatccaaacacctaaggaagagggcgccaacgtactcactaccgaggcactgcttcagcacctggacagcgctctgcaagcatccagggtgcacgtttacatgtacaatcggcaatggaaacttgagcatctttgctacaagtctggagagctgatcaccgagaccgggtacatggaccagattatagaatacttgtacccttgcctgatcataacgccattggattgcttctgggaaggagcgaagcttcagagcggcacagcctacctgctgggtaaacctcccctgagatggacaaacttcgaccccctcgagtttctggaagagctgaagaagatcaactatcaggtggacagttgggaggagatgctgaataaagccgaggtgggccacgggtacatggaccgtccctgtctgaaccctgccgaccccgactgtccggccacagcaccaaacaagaatagcactaagcccttggacatggctttggtacttaatggaggttgccacggtctgagtagaaagtacatgcactggcaggaagaactgatcgttggcggcaccgtgaaaaacagcaccggcaaactcgtttccgcccatgctctgcagacgatgttccagctgatgacaccgaagcagatgtacgaacatttcaagggctacgagtacgtgtcccacattaactggaatgaggacaaagcagcagctattctagaagcatggcagaggacttatgtagaagttgtgcatcagtctgtcgctcagaactcaacacagaaagtgctatcattcaccactacaactctcgatgacatcctgaagtccttcagcgatgtgtcagttatcagggtcgcatccggatacctcctcatgcttgcctacgcctgtctgacaatgctcagatgggactgctctaagtcccagggagcggtcggcctggcaggagtgttgctggtggcactaagtgtggcggccggcctgggcctctgttccttgatcggaattagcttcaacgcggctactactcaggttctgccattcctagccttgggagtcggcgtggacgacgtgttcctcctagcccatgcgttctcagagaccggacaaaataaaaggatcccctttgaggatcgaaccggagaatgcctgaagagaacaggggcctccgtcgctctgacctcaatttctaacgtcaccgccttcttcatggctgcacttatacccatacccgcccttcgagctttctccctccaggccgccgtggttgtggtatttaacttcgctatggttttgctgattttccctgctattctgagcatggatctgtataggcgcgaggacaggcgcctggacatcttttgttgcttcactagtccttgcgtgtccagagtgatacaggttgagcctcaggcctacacagatacacatgacaatacgcggtactccccaccgcccccctactcaagccactcattcgctcatgaaacgcaaattaccatgcaaagcacggtccagctgaggaccgagtatgatcctcacacacatgtgtattatacaacagccgagcccaggagtgaaatttctgtccaaccagttaccgtaactcaagatactctttcctgtcagtcccctgagtcgacctccagtacacgcgacctgttgtcacagttcagtgactcatccctccactgcctcgaacccccttgtaccaaatggactctgagcagttttgcggaaaaacactacgccccatttcttctaaagccaaaggccaaagtcgtggtgatcttcttgttcctgggccttctcggcgtatcactgtacggaacaacaagagtgcgtgatggactggatctaaccgatatcgtgcccagagaaacgcgcgaatatgactttatagcggcgcaattcaaatactttagtttttacaacatgtatatcgtaacccaaaaagccgactacccgaatatccagcacctgctgtatgatctgcacagatcctttagtaacgttaaatacgtgatgctggaagagaacaaacagctccccaagatgtggctacattatttccgggactggctccaagggctccaggacgcattcgacagtgactgggagacgggaaagattatgccgaataactacaagaacggtagcgacgacggagtactagcctataagctcctcgtacaaactggaagtcgagacaaacccatagacattagccagctgacaaaacagaggctggtcgatgccgacgggataatcaaccccagcgccttttatatatatctaaccgcttgggtgtcgaatgacccagtggcctatgccgcgtcccaagcaaatattagaccacatcggccagagtgggtgcacgacaaggccgactacatgccagagaccagattgagaattccagcggcagagcctatcgagtatgctcaattccctttctatctcaacggcctgagagacaccagcgattttgtagaagcgatagagaaagtccgcaccatctgctccaattatacgtccctgggcttgtcatcctaccccaacggatacccctttctcttctgggagcagtatattggcctgagacattggctactactgttcatctccgtggtgctggcttgtaccttcctggtgtgcgctgtctttctcttaaacccatggaccgcagggattattgttatggtgcttgcgctgatgacggtggagctgtttggcatgatgggtcttatcggcattaagctgagtgccgtacccgtagtgatcctgattgctagcgtggggattggggttgaattcaccgtgcatgtggccctggcctttctcaccgcgataggtgacaagaacagacgagccgtccttgctttagagcacatgtttgccccagtgctggatggcgctgtctccacccttctgggcgtgctgatgttggcgggatccgaatttgatttcatcgtaagatacttcttcgccgttttagcgatcctcaccatactgggcgtgcttaacggacttgtattgctgcccgtgttgctgtctttcttcggcccatacccggaagtgtcccccgccaacgggctgaatagactgcccacgccaagtcccgagcccccacctagcgtggtcaggtttgccatgccacccgggcatacgcactctggctccgatagttcggactccgagtactccagccagaccactgtaagtggactgtctgaggagctgagacactatgaggcgcagcagggagccggaggcccagcacatcaggtcattgtggaggccaccgaaaatcccgtctttgcccatagtactgttgtacatcctgaatctaggcaccacccaccatcaaaccctagacagcagccgcacttggattctggcagcctgcccccgggccgacagggacagcaaccaaggcgcgatcctcccagggaggggctctggccacccccctacagaccgcgcagggacgcctttgagatctcaactgaaggtcacagcggaccctccaaccgagcgaggtggggaccacgcggagccaggtcccacaaccctcgaaatccggcgtccacagctatgggatcttccgtgcccggctactgccagccaatcaccactgttaccgcttctgcctccgtaactgtcgccgtgcaccctcctccagtgcctgggccaggccgaaatccccggggagggctttgcccaggctaccccgaaacggatcacggcttgttcgaggacccacatgtaccctttcatgtgcggtgtgaaagaagagatagtaaggtggaagtgatcgagctgcaggacgtcgagtgcgaggaacgccctaggggttccagtagtaactag

SEQ ID NO: 37676 - DNA, 4341 bp, Artificial Sequence
  derived and/or modified sequence
atggaactcctgaaccggaatcgcctggtgattgtgagccccagatgtacacctcccaaagcatccggcggacccgcacgcagaggcttctacacattccggtctttttgcaaagatgggggtgggggagaggaggaagaggagaacggaggcgaggagaaagacgatcgcggagataaagaaacacgttctgataagggaaaggccaccggtagaaaagcgccactatggttgcgggcaaaattccaacgactgttgttcaaactgggatgctacatccagaaaaactgtggaaaattcctcgtggtgggattgttgatttttggggcattcgccgtgggtctaaaggcggctaaccttgaaactaatgtagaagaactctgggtggaagtggggggtcgcgtcagtagagagctcaactacactaggcagaaaattggggaagaagcaatgttcaatccccagttgatgattcagacaccgaaagaggagggcgcaaacgtgttaactaccgaggctctgctacaacacctggattcggctcttcaagccagtagggtccatgtgtacatgtacaaccggcagtggaagctagaacacctctgctataagagcggtgaactgatcacagagacgggctacatggaccagattatcgagtatctgtatccttgtctgatcattaccccactcgattgcttttgggagggcgctaagttacaatcgggcacggcctaccttctaggtaagcctcccctgcgttggacaaatttcgaccccctcgaatttttggaggagcttaaaaaaatcaactatcaagtggatagttgggaagaaatgttaaacaaggctgaagtgggacatggctacatggatagaccctgcctgaatccagccgatccggattgccccgcaactgccccaaacaaaaactccactaagccattggatatggcactcgtgctgaacgggggatgccacgggctatcgaggaagtacatgcattggcaggaagaattaattgtcggcggaaccgtgaagaactctacgggaaagttggtgtcggcacatgccttgcaaaccatgtttcagctgatgacgcctaagcagatgtacgagcattttaaaggctatgaatatgtaagtcatattaactggaacgaagataaggccgctgcgatattagaggcctggcaacgcacctacgtggaggtcgtacatcagtcggtggcgcagaattctacccagaaggtgctctcctttacgactactactcttgacgacatcctcaaaagtttcagtgacgtgtctgtgatcagagtcgccagtgggtatctcttgatgctagcctatgcctgtctaacgatgttacgctgggattgctcgaagagccagggagcagtgggactggcgggtgtgttacttgttgcactgtctgtggccgctggactaggtctatgcagtctcatcggaatttcattcaacgcagctaccacccaggtactgccttttctggctcttggagtcggcgtagatgatgtatttctgcttgcccacgccttctccgagaccggccaaaataagcgtatcccctttgaggatcggaccggggagtgtctaaaacggacaggagcaagcgtggccctgacatcaatcagtaatgttacggcattttttatggccgcactgattcccatcccagccctgcgcgcattctccttgcaggccgctgttgtggtcgtgtttaactttgccatggtgttgctgatcttccccgcaattctctcgatggatttgtacagaagagaggaccgtcgcctggacatattttgctgctttacaagtccctgtgttagtagggtgattcaggtcgagccccaggcttataccgacacacatgacaacacccgatattccccccctccaccctattcttctcactcattcgcacacgaaacccagatcacaatgcaaagcacggtccagcttcgaaccgagtacgatcctcacacacacgtctactacaccacagcagaacctaggtccgagatcagcgtacagccggtgaccgttacacaggataccttatcttgccagagcccggagagcacctctagcaccagggacttactgtcccaattcagtgatagtagtttgcattgcctggagcctccgtgcaccaaatggaccctgtccagcttcgcggagaagcattatgcaccctttttgctgaaacccaaggctaaggttgtcgtgatttttcttttcctcggtctgcttggagtgagcttatatggaaccacaagggtcagagacggactggatctgaccgatattgtgcctagggagacacgggagtacgatttcattgcagcacagttcaagtacttttctttttacaacatgtatatcgtgacgcagaaggccgattaccccaacatacagcacctgttatacgacctgcaccgctcttttagcaacgtgaagtatgttatgctggaagagaacaagcagttacccaagatgtggttgcattatttcagggactggctgcaaggtctccaagatgcttttgacagcgattgggagaccgggaagatcatgcctaacaattataagaacggatccgatgatggcgttctggcatataagctgcttgtccaaaccggcagcagggataagccaatagacatttcacagttgaccaaacagcgcctagttgacgcagatggtatcattaacccctctgctttttacatttacttaaccgcttgggtcagcaatgacccggtggcttacgccgcttcacaggcaaatataagacctcaccggccagagtgggtgcacgataaagctgattatatgcctgagacccgtctccgaatcccggcagctgagcctatcgagtacgctcagttcccattttacctcaacggactccgagataccagtgacttcgttgaggccatcgaaaaagtacggaccatctgcagcaattacaccagtctcgggctatcttcctaccccaatggatacccattcctgttctgggagcagtatatcggcctgaggcattggctcctgttgttcattagcgtcgtgctcgcctgcaccttcctggtctgtgctgtgttcctattaaacccgtggaccgctggcatcatcgttatggtgctggctctgatgacggtggaactatttggcatgatgggattgattggcattaaactgtccgctgttcccgtcgtgatcctgatcgcaagcgtggggattggagtcgagttcactgtgcacgttgccctagccttcctcactgccattggagacaagaacagacgcgcagttctagcgctggaacacatgttcgcgcctgtgctggacggggctgtgtctactctcctgggagttctaatgcttgctggatccgagttcgactttatcgtgaggtattttttcgcagtccttgcaattctcacgatccttggagtcctcaacgggttggtgctccttccggtgctactgagcttctttggaccatatcctgaggtgagccccgctaacggcctgaacagactgcccacaccatcccccgagccaccaccatcagtggtccgattcgctatgcctccaggccatactcactctggcagtgattcctccgactctgaatacagcagccaaacaacagtctccggattgtccgaggaattgagacactatgaagcccagcagggagctggaggccctgctcaccaggtaatagtggaagccacagaaaatccagtgttcgctcattctactgtggtgcatcccgaatcccgccaccatccgccatccaacccacgccagcagccccacctggattctggcagcttgccccctggccgtcagggacaacagcccaggagggacccaccacgggagggtctgtggccaccaccttacagacccagacgagatgccttcgagatttcaactgagggccactctggaccgtccaacagagcgagatgggggccacggggagcccgaagtcacaacccgagaaacccggcatcaacagcaatgggttctagcgtgccagggtactgccagcccatcactaccgtaacagcaagcgcctcagtcactgtggctgtgcatcctcctcctgttcccggacccggtcggaaccctagaggcggtctatgtcccggatatcccgaaacagatcatgggcttttcgaggacccgcacgtgcctttccatgtgaggtgtgaacggcgagacagcaaagtggaggtgattgaactgcaggacgtggagtgcgaagagaggcctcgtggctcttcttccaattag

SEQ ID NO: 37677 - DNA, 4720 bp, Artificial Sequence
  derived and/or modified sequence
acccaggagggctgtgctgatagcacgttcctcgagtttactttgctttccttgagtttattgtaaaggggtaaagttttcggatccgtcacgtgaccctgacaggtcctgcctatggcgcggcagaccacccacgccgagggccatggaactgcttaatagaaacaggcttgtaattgtgagtccgcgctgcactccgccgaaagcctccggcggcccagcgcgccggggtttttacactttccgttccttttgtaaagacggaggaggaggagaagaagaagaagaaaacggaggagaagaaaaagacgacaggggagacaaagagacccgcagcgacaaggggaaggctactggccggaaagcgccgctgtggctgagagcgaagtttcagagactcttatttaaactgggttgttacattcaaaaaaactgcggcaagttcttggttgtgggcctcctcatatttggggccttcgcggtgggattaaaagcagcgaacctcgagaccaacgtggaggagctgtgggtggaagttggaggacgagtaagtcgtgaattaaattatactcgccagaagattggagaagaggctatgtttaatcctcaactcatgatacagacccctaaagaagaaggtgctaatgtcctgaccacagaagcgctcctacaacacctggactcggcactccaggccagccgtgtccatgtatacatgtacaacaggcagtggaaattggaacatttgtgttacaaatcaggagagcttatcacagaaacaggttacatggatcagataatagaatatctttacccttgtttgattattacacctttggactgcttctgggaaggggcgaaattacagtctgggacagcatacctcctaggtaaacctcctttgcggtggacaaacttcgaccctttggaattcctggaagagttaaagaaaataaactatcaagtggacagctgggaggaaatgctgaataaggctgaggttggtcatggttacatggaccgcccctgcctcaatccggccgatccagactgccccgccacagcccccaacaaaaattcaaccaaacctcttgatatggcccttgttttgaatggtggatgtcatggcttatccagaaagtatatgcactggcaggaggagttgattgtgggtggcacagtcaagaacagcactggaaaactcgtcagcgcccatgccctgcagaccatgttccagttaatgactcccaagcaaatgtacgagcacttcaaggggtacgagtatgtctcacacatcaactggaacgaggacaaagcggcagccatcctggaggcctggcagaggacatatgtggaggtggttcatcagagtgtcgcacagaactccactcaaaaggtgctttccttcaccaccacgaccctggacgacatcctgaaatccttctctgacgtcagtgtcatccgcgtggccagcggctacttactcatgctcgcctatgcctgtctaaccatgctgcgctgggactgctccaagtcccagggtgccgtggggctggctggcgtcctgctggttgcactgtcagtggctgcaggactgggcctgtgctcattgatcggaatttcctttaacgctgcaacaactcaggttttgccatttctcgctcttggtgttggtgtggatgatgtttttcttctggcccacgccttcagtgaaacaggacagaataaaagaatcccttttgaggacaggaccggggagtgcctgaagcgcacaggagccagcgtggccctcacgtccatcagcaatgtcacagccttcttcatggccgcgttaatcccaattcccgctctgcgggcgttctccctccaggcagcggtagtagtggtgttcaattttgccatggttctgctcatttttcctgcaattctcagcatggatttatatcgacgcgaggacaggagactggatattttctgctgttttacaagcccctgcgtcagcagagtgattcaggttgaacctcaggcctacaccgacacacacgacaatacccgctacagccccccacctccctacagcagccacagctttgcccatgaaacgcagattaccatgcagtccactgtccagctccgcacggagtacgacccccacacgcacgtgtactacaccaccgctgagccgcgctccgagatctctgtgcagcccgtcaccgtgacacaggacaccctcagctgccagagcccagagagcaccagctccacaagggacctgctctcccagttctccgactccagcctccactgcctcgagcccccctgtacgaagtggacactctcatcttttgctgagaagcactatgctcctttcctcttgaaaccaaaagccaaggtagtggtgatcttcctttttctgggcttgctgggggtcagcctttatggcaccacccgagtgagagacgggctggaccttacggacattgtacctcgggaaaccagagaatatgactttattgctgcacaattcaaatacttttctttctacaacatgtatatagtcacccagaaagcagactacccgaatatccagcacttactttacgacctacacaggagtttcagtaacgtgaagtatgtcatgttggaagaaaacaaacagcttcccaaaatgtggctgcactacttcagagactggcttcagggacttcaggatgcatttgacagtgactgggaaaccgggaaaatcatgccaaacaattacaagaatggatcagacgatggagtccttgcctacaaactcctggtgcaaaccggcagccgcgataagcccatcgacatcagccagttgactaaacagcgtctggtggatgcagatggcatcattaatcccagcgctttctacatctacctgacggcttgggtcagcaacgaccccgtcgcgtatgctgcctcccaggccaacatccggccacaccgaccagaatgggtccacgacaaagccgactacatgcctgaaacaaggctgagaatcccggcagcagagcccatcgagtatgcccagttccctttctacctcaacggcttgcgggacacctcagactttgtggaggcaattgaaaaagtaaggaccatctgcagcaactatacgagcctggggctgtccagttaccccaacggctaccccttcctcttctgggagcagtacatcggcctccgccactggctgctgctgttcatcagcgtggtgttggcctgcacattcctcgtgtgcgctgtcttccttctgaacccctggacggccgggatcattgtgatggtcctggcgctgatgacggtcgagctgttcggcatgatgggcctcatcggaatcaagctcagtgccgtgcccgtggtcatcctgatcgcttctgttggcataggagtggagttcaccgttcacgttgctttggcctttctgacggccatcggcgacaagaaccgcagggctgtgcttgccctggagcacatgtttgcacccgtcctggatggcgccgtgtccactctgctgggagtgctgatgctggcgggatctgagttcgacttcattgtcaggtatttctttgctgtgctggcgatcctcaccatcctcggcgttctcaatgggctggttttgcttcccgtgcttttgtctttctttggaccatatcctgaggtgtctccagccaacggcttgaaccgcctgcccacaccctcccctgagccaccccccagcgtggtccgcttcgccatgccgcccggccacacgcacagcgggtctgattcctccgactcggagtatagttcccagacgacagtgtcaggcctcagcgaggagcttcggcactacgaggcccagcagggcgcgggaggccctgcccaccaagtgatcgtggaagccacagaaaaccccgtcttcgcccactccactgtggtccatcccgaatccaggcatcacccaccctcgaacccgagacagcagccccacctggactcagggtccctgcctcccggacggcaaggccagcagccccgcagggacccccccagagaaggcttgtggccacccccctacagaccgcgcagagacgcttttgaaatttctactgaagggcattctggccctagcaatagggcccgctggggccctcgcggggcccgttctcacaaccctcggaacccagcgtccactgccatgggcagctccgtgcccggctactgccagcccatcaccactgtgacggcttctgcctccgtgactgtcgccgtgcacccgccgcctgtccctgggcctgggcggaacccccgagggggactctgcccaggctaccctgagactgaccacggcctgtttgaggacccccacgtgcctttccacgtccggtgtgagaggagggattcgaaggtggaagtcattgagctgcaggacgtggaatgcgaggagaggccccggggaagcagctccaactgagggtgattaaaatctgaagcaaagaggccaaagattggaaaccccccacccccacctctttccagaactgcttgaagagaactggttggagttatggaaaagatgccctgtgccaggacagcagttcattgttactgtaaccgattgtattattttgttaaatatttctataaatatttaagagatgtacacatgtgtaatataggaaggaaggatgtaaagtggtatgatctg

SEQ ID NO: 37678 - DNA, 7815 bp, Artificial Sequence
  derived and/or modified sequence
aattcagctcacacagcctctccccacgctatggaaatgcgtcgggagtgaactccggcggccgcgctcaccacgtggatccccacttactaccattctcggcgggggtccagttgggggaacccgcaatatgttgttccaaagagcgctcgcccctagcgcccgtccccgagggtgatggacagagcaggactggtttgctggctcctgaaccttgggctccatcgctgggattacgcagcccctcccttctcagctctggggggaaggctactggccggaaagcgccgctgtggctgagagcgaagtttcagagactcttatttaaactgggttgttacattcaaaaaaactgcggcaagttcttggttgtgggcctcctcatatttggggccttcgcggtgggattaaaagcagcgaacctcgagaccaacgtggaggagctgtgggtggaagttggaggacgagtaagtcgtgaattaaattatactcgccagaagattggagaagaggctatgtttaatcctcaactcatgatacagacccctaaagaagaaggtgctaatgtcctgaccacagaagcgctcctacaacacctggactcggcactccaggccagccgtgtccatgtatacatgtacaacaggcagtggaaattggaacatttgtgttacaaatcaggagagcttatcacagaaacaggttacatggatcagataatagaatatctttacccttgtttgattattacacctttggactgcttctgggaaggggcgaaattacagtctgggacagcatacctcctaggtaaacctcctttgcggtggacaaacttcgaccctttggaattcctggaagagttaaagaaaataaactatcaagtggacagctgggaggaaatgctgaataaggctgaggttggtcatggttacatggaccgcccctgcctcaatccggccgatccagactgccccgccacagcccccaacaaaaattcaaccaaacctcttgatatggcccttgttttgaatggtggatgtcatggcttatccagaaagtatatgcactggcaggaggagttgattgtgggtggcacagtcaagaacagcactggaaaactcgtcagcgcccatgccctgcagaccatgttccagttaatgactcccaagcaaatgtacgagcacttcaaggggtacgagtatgtctcacacatcaactggaacgaggacaaagcggcagccatcctggaggcctggcagaggacatatgtggaggtggttcatcagagtgtcgcacagaactccactcaaaaggtgctttccttcaccaccacgaccctggacgacatcctgaaatccttctctgacgtcagtgtcatccgcgtggccagcggctacttactcatgctcgcctatgcctgtctaaccatgctgcgctgggactgctccaagtcccagggtgccgtggggctggctggcgtcctgctggttgcactgtcagtggctgcaggactgggcctgtgctcattgatcggaatttcctttaacgctgcaacaactcaggttttgccatttctcgctcttggtgttggtgtggatgatgtttttcttctggcccacgccttcagtgaaacaggacagaataaaagaatcccttttgaggacaggaccggggagtgcctgaagcgcacaggagccagcgtggccctcacgtccatcagcaatgtcacagccttcttcatggccgcgttaatcccaattcccgctctgcgggcgttctccctccaggcagcggtagtagtggtgttcaattttgccatggttctgctcatttttcctgcaattctcagcatggatttatatcgacgcgaggacaggagactggatattttctgctgttttacaagcccctgcgtcagcagagtgattcaggttgaacctcaggcctacaccgacacacacgacaatacccgctacagccccccacctccctacagcagccacagctttgcccatgaaacgcagattaccatgcagtccactgtccagctccgcacggagtacgacccccacacgcacgtgtactacaccaccgctgagccgcgctccgagatctctgtgcagcccgtcaccgtgacacaggacaccctcagctgccagagcccagagagcaccagctccacaagggacctgctctcccagttctccgactccagcctccactgcctcgagcccccctgtacgaagtggacactctcatcttttgctgagaagcactatgctcctttcctcttgaaaccaaaagccaaggtagtggtgatcttcctttttctgggcttgctgggggtcagcctttatggcaccacccgagtgagagacgggctggaccttacggacattgtacctcgggaaaccagagaatatgactttattgctgcacaattcaaatacttttctttctacaacatgtatatagtcacccagaaagcagactacccgaatatccagcacttactttacgacctacacaggagtttcagtaacgtgaagtatgtcatgttggaagaaaacaaacagcttcccaaaatgtggctgcactacttcagagactggcttcagggacttcaggatgcatttgacagtgactgggaaaccgggaaaatcatgccaaacaattacaagaatggatcagacgatggagtccttgcctacaaactcctggtgcaaaccggcagccgcgataagcccatcgacatcagccagttgactaaacagcgtctggtggatgcagatggcatcattaatcccagcgctttctacatctacctgacggcttgggtcagcaacgaccccgtcgcgtatgctgcctcccaggccaacatccggccacaccgaccagaatgggtccacgacaaagccgactacatgcctgaaacaaggctgagaatcccggcagcagagcccatcgagtatgcccagttccctttctacctcaacggcttgcgggacacctcagactttgtggaggcaattgaaaaagtaaggaccatctgcagcaactatacgagcctggggctgtccagttaccccaacggctaccccttcctcttctgggagcagtacatcggcctccgccactggctgctgctgttcatcagcgtggtgttggcctgcacattcctcgtgtgcgctgtcttccttctgaacccctggacggccgggatcattgtgatggtcctggcgctgatgacggtcgagctgttcggcatgatgggcctcatcggaatcaagctcagtgccgtgcccgtggtcatcctgatcgcttctgttggcataggagtggagttcaccgttcacgttgctttggcctttctgacggccatcggcgacaagaaccgcagggctgtgcttgccctggagcacatgtttgcacccgtcctggatggcgccgtgtccactctgctgggagtgctgatgctggcgggatctgagttcgacttcattgtcaggtatttctttgctgtgctggcgatcctcaccatcctcggcgttctcaatgggctggttttgcttcccgtgcttttgtctttctttggaccatatcctgaggtgtctccagccaacggcttgaaccgcctgcccacaccctcccctgagccaccccccagcgtggtccgcttcgccatgccgcccggccacacgcacagcgggtctgattcctccgactcggagtatagttcccagacgacagtgtcaggcctcagcgaggagcttcggcactacgaggcccagcagggcgcgggaggccctgcccaccaagtgatcgtggaagccacagaaaaccccgtcttcgcccactccactgtggtccatcccgaatccaggcatcacccaccctcgaacccgagacagcagccccacctggactcagggtccctgcctcccggacggcaaggccagcagccccgcagggacccccccagagaaggcttgtggccacccccctacagaccgcgcagagacgcttttgaaatttctactgaagggcattctggccctagcaatagggcccgctggggccctcgcggggcccgttctcacaaccctcggaacccagcgtccactgccatgggcagctccgtgcccggctactgccagcccatcaccactgtgacggcttctgcctccgtgactgtcgccgtgcacccgccgcctgtccctgggcctgggcggaacccccgagggggactctgcccaggctaccctgagactgaccacggcctgtttgaggacccccacgtgcctttccacgtccggtgtgagaggagggattcgaaggtggaagtcattgagctgcaggacgtggaatgcgaggagaggccccggggaagcagctccaactgagggtgattaaaatctgaagcaaagaggccaaagattggaaaccccccacccccacctctttccagaactgcttgaagagaactggttggagttatggaaaagatgccctgtgccaggacagcagttcattgttactgtaaccgattgtattattttgttaaatatttctataaatatttaagagatgtacacatgtgtaatataggaaggaaggatgtaaagtggtatgatctggggcttctccactcctgccccagagtgtggaggccacagtggggcctctccgtatttgtgcattgggctccgtgccacaaccaagcttcattagtcttaaatttcagcatatgttgctgctgcttaaatattgtataatttacttgtataattctatgcaaatattgcttatgtaataggattattttgtaaaggtttctgtttaaaatattttaaatttgcatatcacaaccctgtggtagtatgaaatgttactgttaactttcaaacacgctatgcgtgataatttttttgtttaatgagcagatatgaagaaagcacgttaatcctggtggcttctctaggtgtcgttgtgtgcggtcctcttgtttggctgtgcgtgtgaacacgtgtgtgagttcaccatgtactgtactgtgattttttttttgtcttgttttgtttctctacactgtctgtaacctgtagtaggctctgacctagtcaggctggaagcgtcaggatatcttttcttcgtgctggtgagggctggccctaaacatccacctaatcctttcaaatcagcccggcaaaagctagactctcctcgtgtctacggcatctcttatgatcattggctgccatccaggaccccaatttgtgcttcagggggataatctccttctctcggatcattgtgatggatgctggaacctcagggtatggagctcacatcagttcatcatggtgggtgttagagaattcggtgacatgcctagtgctgagccttggctgggccatgagagtctgtatactctaaaaagcatgcagcatggtgcccctcttctgaccaacacacacacgacccctcccccaacacccccaaattcaagagtggatgtggccctgtcacaggtagaaaaacctatttagttaattctttcttggcccacagtctcccagaaatgatgttttgagtccctatagtttaaactccctctcttaaatggagcagctggttgaggctttctagatctgtttgcatcttctttaaaactaagtggtgagcatgcattgtggtgtagaggcaggcattatgtaggataagagctccggggggattcttcatgcaccagtgtttagggtacgtgcttcctaagtaaatccaaacattgtctccatcctccccgtcattagtgctctttcaatgtgatgtgggaaagcaggaggatggacacaccccactgaaagatgtaggcaggggcaggtctctcaaccaggcatatttttaaaagttgcttctgtactggttctcttcttttgctctgaggtgtgggctccctcatctcgtaaccagagaccagcacatgtcagggaagcacccagtgtcggctccccatccaaatccacaccagcaccttgttacagacaagaagtcagaggaaagggcggggtccctgcagggctgaagcctaagctactgtgaggcgctcacgagtggcagctcctgttactcccttttaaattacctgggaaatcttaacagaaaggtaatgggcccccagaaatacccacagcatagtgacctcagaccctgatactcaccacaaaacttttaagatgctgattgggagccgcttgtggctgctgggtgtgtgtgtgtgtgtgtgcgtgcgtgcgtgtgtgtgtgtctctgctggggaccctggccacccccctgctgctgtcttggtgcctgtcacccacatggtctgccatcctaacacccagctctgctcagaaaacgtcctgcgtggaggagggatgatgcagaattctgaagtcgacttccctctggctcctggcgtgccctcgctcccttcctgagcccagctcgtgttgcgccggaggctgcgcggcccctgatttctgcatggtgtagaactttctccaatagtcacattggcaaagggagaactggggtgggcggggggtggggctggcagggaattagaatttctctctctcttttaatagttttattttgtctgtcctgtttgttcatttggatgttttaatttttaaaaaaaaaaaaactttgctgatatttataattttgtatcataagaatgttttcctctacagtatttgtcatgccagtttataacaaaaaaaaatgcagggattttatttctattggaaacattacagctatgttttacttttggacagaatttttatttgtatagagtgcttactaatgttaaatagttcagagtatataacatttacattaaggactcatggtaggttttagggtaaggagtttaaaggaaataaatattcaaactgggtctcattgccaattttggtggaaatgagtttgtgtcatttcaattacaaagataaaagtatgccatataatttatttatatgaagatttatttttgtagtgtacatagtagtcatcaagtcttttgacagaagtatatttttaaagaatttatatgtgatgaatccataatgtctggaactttgctgagacatgagtgggcacagttttcattgtaaattacagcaaggaaagaaaatgtttaacagtgttaagagagtcagagcagagtggatattcatgcgattatgaagtgtttattagttaccattggcgacctagcatgcttctcatttcaaaccttggaaggtgaaaatgtacaaactctctaaataattaatgttcaaacactgatagaaattctaacatgaataaaaaataatataacttgttggttatatctttgtttgtagaatgctttttttctttaaaatacttgggagagacagttagtgttggagccatcagaaactgttgtttcatcttgctgaccttgtgacactcttcttttttgctctatctgatggagagagttttaggttttcctcctttttgttttgtataaatagtgggtataagcatagctctgttacatggatgtattacaaagtgggggctgagcttttagtgtgatcatcacccaaatagtgtacattgtacccattaattaatttcttatcacctgaccctatttttgttttctcataccaagaaacttcctaagttaaccatcaaaattagtccttctgtcatctctcttagcatacttatttcccttatgtgatgcctaataatgagggaacataaataaagccaaattcaaag

SEQ ID NO: 37679 - DNA, 7659 bp, Artificial Sequence
  derived and/or modified sequence
actcacacctctccaggaaaagcagcagacaaatggggattgaaaaattcaaaccctccctctggtcctgggaggaaagggctgtctgaggtccgcagggggtggaggggaaggctactggccggaaagcgccgctgtggctgagagcgaagtttcagagactcttatttaaactgggttgttacattcaaaaaaactgcggcaagttcttggttgtgggcctcctcatatttggggccttcgcggtgggattaaaagcagcgaacctcgagaccaacgtggaggagctgtgggtggaagttggaggacgagtaagtcgtgaattaaattatactcgccagaagattggagaagaggctatgtttaatcctcaactcatgatacagacccctaaagaagaaggtgctaatgtcctgaccacagaagcgctcctacaacacctggactcggcactccaggccagccgtgtccatgtatacatgtacaacaggcagtggaaattggaacatttgtgttacaaatcaggagagcttatcacagaaacaggttacatggatcagataatagaatatctttacccttgtttgattattacacctttggactgcttctgggaaggggcgaaattacagtctgggacagcatacctcctaggtaaacctcctttgcggtggacaaacttcgaccctttggaattcctggaagagttaaagaaaataaactatcaagtggacagctgggaggaaatgctgaataaggctgaggttggtcatggttacatggaccgcccctgcctcaatccggccgatccagactgccccgccacagcccccaacaaaaattcaaccaaacctcttgatatggcccttgttttgaatggtggatgtcatggcttatccagaaagtatatgcactggcaggaggagttgattgtgggtggcacagtcaagaacagcactggaaaactcgtcagcgcccatgccctgcagaccatgttccagttaatgactcccaagcaaatgtacgagcacttcaaggggtacgagtatgtctcacacatcaactggaacgaggacaaagcggcagccatcctggaggcctggcagaggacatatgtggaggtggttcatcagagtgtcgcacagaactccactcaaaaggtgctttccttcaccaccacgaccctggacgacatcctgaaatccttctctgacgtcagtgtcatccgcgtggccagcggctacttactcatgctcgcctatgcctgtctaaccatgctgcgctgggactgctccaagtcccagggtgccgtggggctggctggcgtcctgctggttgcactgtcagtggctgcaggactgggcctgtgctcattgatcggaatttcctttaacgctgcaacaactcaggttttgccatttctcgctcttggtgttggtgtggatgatgtttttcttctggcccacgccttcagtgaaacaggacagaataaaagaatcccttttgaggacaggaccggggagtgcctgaagcgcacaggagccagcgtggccctcacgtccatcagcaatgtcacagccttcttcatggccgcgttaatcccaattcccgctctgcgggcgttctccctccaggcagcggtagtagtggtgttcaattttgccatggttctgctcatttttcctgcaattctcagcatggatttatatcgacgcgaggacaggagactggatattttctgctgttttacaagcccctgcgtcagcagagtgattcaggttgaacctcaggcctacaccgacacacacgacaatacccgctacagccccccacctccctacagcagccacagctttgcccatgaaacgcagattaccatgcagtccactgtccagctccgcacggagtacgacccccacacgcacgtgtactacaccaccgctgagccgcgctccgagatctctgtgcagcccgtcaccgtgacacaggacaccctcagctgccagagcccagagagcaccagctccacaagggacctgctctcccagttctccgactccagcctccactgcctcgagcccccctgtacgaagtggacactctcatcttttgctgagaagcactatgctcctttcctcttgaaaccaaaagccaaggtagtggtgatcttcctttttctgggcttgctgggggtcagcctttatggcaccacccgagtgagagacgggctggaccttacggacattgtacctcgggaaaccagagaatatgactttattgctgcacaattcaaatacttttctttctacaacatgtatatagtcacccagaaagcagactacccgaatatccagcacttactttacgacctacacaggagtttcagtaacgtgaagtatgtcatgttggaagaaaacaaacagcttcccaaaatgtggctgcactacttcagagactggcttcagggacttcaggatgcatttgacagtgactgggaaaccgggaaaatcatgccaaacaattacaagaatggatcagacgatggagtccttgcctacaaactcctggtgcaaaccggcagccgcgataagcccatcgacatcagccagttgactaaacagcgtctggtggatgcagatggcatcattaatcccagcgctttctacatctacctgacggcttgggtcagcaacgaccccgtcgcgtatgctgcctcccaggccaacatccggccacaccgaccagaatgggtccacgacaaagccgactacatgcctgaaacaaggctgagaatcccggcagcagagcccatcgagtatgcccagttccctttctacctcaacggcttgcgggacacctcagactttgtggaggcaattgaaaaagtaaggaccatctgcagcaactatacgagcctggggctgtccagttaccccaacggctaccccttcctcttctgggagcagtacatcggcctccgccactggctgctgctgttcatcagcgtggtgttggcctgcacattcctcgtgtgcgctgtcttccttctgaacccctggacggccgggatcattgtgatggtcctggcgctgatgacggtcgagctgttcggcatgatgggcctcatcggaatcaagctcagtgccgtgcccgtggtcatcctgatcgcttctgttggcataggagtggagttcaccgttcacgttgctttggcctttctgacggccatcggcgacaagaaccgcagggctgtgcttgccctggagcacatgtttgcacccgtcctggatggcgccgtgtccactctgctgggagtgctgatgctggcgggatctgagttcgacttcattgtcaggtatttctttgctgtgctggcgatcctcaccatcctcggcgttctcaatgggctggttttgcttcccgtgcttttgtctttctttggaccatatcctgaggtgtctccagccaacggcttgaaccgcctgcccacaccctcccctgagccaccccccagcgtggtccgcttcgccatgccgcccggccacacgcacagcgggtctgattcctccgactcggagtatagttcccagacgacagtgtcaggcctcagcgaggagcttcggcactacgaggcccagcagggcgcgggaggccctgcccaccaagtgatcgtggaagccacagaaaaccccgtcttcgcccactccactgtggtccatcccgaatccaggcatcacccaccctcgaacccgagacagcagccccacctggactcagggtccctgcctcccggacggcaaggccagcagccccgcagggacccccccagagaaggcttgtggccacccccctacagaccgcgcagagacgcttttgaaatttctactgaagggcattctggccctagcaatagggcccgctggggccctcgcggggcccgttctcacaaccctcggaacccagcgtccactgccatgggcagctccgtgcccggctactgccagcccatcaccactgtgacggcttctgcctccgtgactgtcgccgtgcacccgccgcctgtccctgggcctgggcggaacccccgagggggactctgcccaggctaccctgagactgaccacggcctgtttgaggacccccacgtgcctttccacgtccggtgtgagaggagggattcgaaggtggaagtcattgagctgcaggacgtggaatgcgaggagaggccccggggaagcagctccaactgagggtgattaaaatctgaagcaaagaggccaaagattggaaaccccccacccccacctctttccagaactgcttgaagagaactggttggagttatggaaaagatgccctgtgccaggacagcagttcattgttactgtaaccgattgtattattttgttaaatatttctataaatatttaagagatgtacacatgtgtaatataggaaggaaggatgtaaagtggtatgatctggggcttctccactcctgccccagagtgtggaggccacagtggggcctctccgtatttgtgcattgggctccgtgccacaaccaagcttcattagtcttaaatttcagcatatgttgctgctgcttaaatattgtataatttacttgtataattctatgcaaatattgcttatgtaataggattattttgtaaaggtttctgtttaaaatattttaaatttgcatatcacaaccctgtggtagtatgaaatgttactgttaactttcaaacacgctatgcgtgataatttttttgtttaatgagcagatatgaagaaagcacgttaatcctggtggcttctctaggtgtcgttgtgtgcggtcctcttgtttggctgtgcgtgtgaacacgtgtgtgagttcaccatgtactgtactgtgattttttttttgtcttgttttgtttctctacactgtctgtaacctgtagtaggctctgacctagtcaggctggaagcgtcaggatatcttttcttcgtgctggtgagggctggccctaaacatccacctaatcctttcaaatcagcccggcaaaagctagactctcctcgtgtctacggcatctcttatgatcattggctgccatccaggaccccaatttgtgcttcagggggataatctccttctctcggatcattgtgatggatgctggaacctcagggtatggagctcacatcagttcatcatggtgggtgttagagaattcggtgacatgcctagtgctgagccttggctgggccatgagagtctgtatactctaaaaagcatgcagcatggtgcccctcttctgaccaacacacacacgacccctcccccaacacccccaaattcaagagtggatgtggccctgtcacaggtagaaaaacctatttagttaattctttcttggcccacagtctcccagaaatgatgttttgagtccctatagtttaaactccctctcttaaatggagcagctggttgaggctttctagatctgtttgcatcttctttaaaactaagtggtgagcatgcattgtggtgtagaggcaggcattatgtaggataagagctccggggggattcttcatgcaccagtgtttagggtacgtgcttcctaagtaaatccaaacattgtctccatcctccccgtcattagtgctctttcaatgtgatgtgggaaagcaggaggatggacacaccccactgaaagatgtaggcaggggcaggtctctcaaccaggcatatttttaaaagttgcttctgtactggttctcttcttttgctctgaggtgtgggctccctcatctcgtaaccagagaccagcacatgtcagggaagcacccagtgtcggctccccatccaaatccacaccagcaccttgttacagacaagaagtcagaggaaagggcggggtccctgcagggctgaagcctaagctactgtgaggcgctcacgagtggcagctcctgttactcccttttaaattacctgggaaatcttaacagaaaggtaatgggcccccagaaatacccacagcatagtgacctcagaccctgatactcaccacaaaacttttaagatgctgattgggagccgcttgtggctgctgggtgtgtgtgtgtgtgtgtgcgtgcgtgcgtgtgtgtgtgtctctgctggggaccctggccacccccctgctgctgtcttggtgcctgtcacccacatggtctgccatcctaacacccagctctgctcagaaaacgtcctgcgtggaggagggatgatgcagaattctgaagtcgacttccctctggctcctggcgtgccctcgctcccttcctgagcccagctcgtgttgcgccggaggctgcgcggcccctgatttctgcatggtgtagaactttctccaatagtcacattggcaaagggagaactggggtgggcggggggtggggctggcagggaattagaatttctctctctcttttaatagttttattttgtctgtcctgtttgttcatttggatgttttaatttttaaaaaaaaaaaaactttgctgatatttataattttgtatcataagaatgttttcctctacagtatttgtcatgccagtttataacaaaaaaaaatgcagggattttatttctattggaaacattacagctatgttttacttttggacagaatttttatttgtatagagtgcttactaatgttaaatagttcagagtatataacatttacattaaggactcatggtaggttttagggtaaggagtttaaaggaaataaatattcaaactgggtctcattgccaattttggtggaaatgagtttgtgtcatttcaattacaaagataaaagtatgccatataatttatttatatgaagatttatttttgtagtgtacatagtagtcatcaagtcttttgacagaagtatatttttaaagaatttatatgtgatgaatccataatgtctggaactttgctgagacatgagtgggcacagttttcattgtaaattacagcaaggaaagaaaatgtttaacagtgttaagagagtcagagcagagtggatattcatgcgattatgaagtgtttattagttaccattggcgacctagcatgcttctcatttcaaaccttggaaggtgaaaatgtacaaactctctaaataattaatgttcaaacactgatagaaattctaacatgaataaaaaataatataacttgttggttatatctttgtttgtagaatgctttttttctttaaaatacttgggagagacagttagtgttggagccatcagaaactgttgtttcatcttgctgaccttgtgacactcttcttttttgctctatctgatggagagagttttaggttttcctcctttttgttttgtataaatagtgggtataagcatagctctgttacatggatgtattacaaagtgggggctgagcttttagtgtgatcatcacccaaatagtgtacattgtacccattaattaatttcttatcacctgaccctatttttgttttctcataccaagaaacttcctaagttaaccatcaaaattagtccttctgtcatctctcttagcatacttatttcccttatgtgatgcctaataatgagggaacataaataaagccaaattcaaag

SEQ ID NO: 37680 - DNA, 663 bp, Artificial Sequence
  derived and/or modified sequence
atgagcagcggcaactaccagcagagcgaggccctgagcaagcccaccttcagcgaggagcaggccagcgccctggtggagagcgtgttcggcctgaaggtgagcaaggtgagacccctgcccagctacgacgaccagaacttccacgtgtacgtgagcaagaccaaggacggccccaccgagtacgtgctgaagatcagcaacaccaaggccagcaagaaccccgacctgatcgaggtgcagaaccacatcatcatgttcctgaaggccgccggcttccccaccgccagcgtgtgccacaccaagggcgacaacaccgccagcctggtgagcgtggacagcggcagcgagatcaagagctacctggtgagactgctgacctacctgcccggcagacccatcgccgagctgcccgtgagcccccagctgctgtacgagatcggcaagctggccgccaagctggacaagaccctgcagagattccaccaccccaagctgagcagcctgcacagagagaacttcatctggaacctgaagaacgtgcccctgctggagaagtacctgtacgccctgggccagaacagaaacagagagatcgtggagcacgtgatccacctgttcaaggaggaggtgatgaccaagctgagccacttcagagagtag

SEQ ID NO: 37681 - DNA, 663 bp, Artificial Sequence
  derived and/or modified sequence
atgtcaagtggaaattatcagcagtctgaagcgttaagtaagccaactttcagtgaggagcaggcttctgcactcgttgaatcagtcttcgggctcaaagtgagtaaggtgaggcccttaccctcatatgacgaccaaaatttccacgtctatgtaagtaagaccaaagacggacctacagagtatgtgttaaagatttccaacacaaaagctagcaagaaccctgatctgattgaggtgcaaaaccacattattatgttccttaaggcagccggttttcctacagcgtccgtgtgtcacactaaaggggataataccgccagtctcgtgagcgtggactccgggtccgagatcaagagctatctggtgcggctgcttacttacttgcccggcagacctatcgccgaactccctgtgagtcctcaacttctttacgagattggaaagttagcggcgaagctggataagactcttcaacggttccaccaccctaaactgagctcactgcaccgagagaattttatttggaatctgaagaatgtgcccctgctggaaaagtatctgtacgctttaggtcagaaccgtaacagagaaatcgtggaacatgtgatccatctgttcaaggaggaggtgatgacaaagctgtcccatttccgggaatag

SEQ ID NO: 37682 - DNA, 663 bp, Artificial Sequence
  derived and/or modified sequence
atgagcagcggcaactaccagcagagcgaggccctgagcaagcccaccttcagcgaggagcaggccagcgccctggtggagagcgtgtttggcctgaaggtgtccaaggtgcggcccctgcccagctatgatgaccagaacttccacgtgtatgtgtccaagaccaaggatggccccacagaatatgtgctgaagatcagcaacaccaaggccagcaagaacccagacctgattgaggtgcagaaccacatcatcatgttcctgaaggctgctggcttccccacagcctctgtgtgccacaccaagggggacaacacagccagcctggtgtctgtggacagcggcagcgagatcaagagctacctggtgcggctgctgacctacctgcccggccggcccatcgccgagctgcctgtgagcccccagctgctgtatgaaattggcaagctggccgccaagctggacaagaccctgcagcgcttccaccaccccaagctgagcagcctgcaccgggagaacttcatctggaacctgaagaatgtgcccctgctggagaagtacctgtatgccctgggccagaacagaaaccgggagatcgtggagcacgtgatccacctgttcaaggaggaggtgatgaccaagctgagccacttccgggagtag

SEQ ID NO: 37683 - DNA, 663 bp, Artificial Sequence
  derived and/or modified sequence
atgagcagcggcaactaccagcagagcgaggccctgagcaagcccactttttcagaagagcaggccagtgccttggtcgaatctgtgtttggcctgaaagtcagcaaggtccgtcctttaccatcttacgatgaccaaaacttccacgtctacgtgagtaagactaaggacggtccaacagagtacgtccttaaaattagcaacactaaagccagcaaaaatccggacctcatcgaggttcagaatcacatcataatgttcctcaaggccgctggctttccgacagcctcagtctgccacacgaagggcgataatacagcctcgcttgtgagcgtagattcaggatcagagattaaatcttatctggtgcgtctgttgacatatctgccgggacgacctatcgcagagcttcctgtgtcccctcagctcctgtacgaaattgggaaattggctgccaaactggataaaactctgcagagattccaccatcccaagttaagcagtttgcaccgcgaaaacttcatatggaatcttaagaatgtccccttgctggagaaatacctctacgctctgggacaaaatcgcaatcgcgaaattgtcgagcacgtgattcacctctttaaggaagaggtcatgaccaagctgagccactttcgggagtag

SEQ ID NO: 37684 - DNA, 847 bp, Artificial Sequence
  derived and/or modified sequence
gcgggcgctgcggcccctgctctacctcctagcgccggtgcgcggccgaggccgcactacctgtctgcgggaaagcgggatccaccccaggacgtcgggtcgctgccgacataatgtcaagtggaaactatcagcagtcagaggctcttagcaaacccactttcagtgaggaacaagcctctgcgttagtggagtcagtgtttgggttgaaagtttccaaggtccggccacttcctagctatgatgaccaaaactttcatgtctacgtttcaaaaaccaaagatggcccaactgaatatgtcctcaaaataagcaacaccaaggctagcaaaaatccagacctgattgaagtgcagaatcacatcatcatgtttctgaaagccgctggatttccaacagcctctgtgtgtcacactaaaggagacaacacagcttctctcgtgtctgtagatagtggctctgaaatcaaaagctacttggtgaggctgctgacttacctcccaggaagacccatcgctgagcttcccgtcagcccccagctattgtatgaaattggaaaactagctgccaaattggataagacactgcagagattccatcacccaaagttaagtagtcttcatcgggagaacttcatctggaatctgaaaaatgttcctcttctggagaaatacctgtatgccctgggccagaatcgaaaccgagagattgttgagcatgtcattcatctgttcaaggaggaagtaatgaccaaattaagtcattttcgagaatgacctagcaccgtgccaggcccctagaagacccagtaaagatctgttgaataaactgtaagaatgaacacacc

SEQ ID NO: 37685 - DNA, 663 bp, Artificial Sequence
  derived and/or modified sequence
atgtccagcggaaattaccagcagtccgaggccctctccaagcctactttctccgaagaacaggcaagtgcactggtggagtcggtctttggacttaaagtctctaaagtgaggccgctacccagttatgacgatcagaattttcacgtttacgtgagtaagaccaaagacgggcctactgagtacgtcttgaagattagcaacaccaaggcctctaagaatcctgatctgatcgaggtccaaaatcatattattatgtttctaaaagccgctgggtttcctacggcatcagtgtgccatactaaaggggacaacactgcctccctggtgagcgtggatagcggctccgaaataaaaagttacctcgtgcgccttctcacatatctccccggacgacctatagcagagctacccgtgagtccgcaactgctgtacgagataggaaagctggctgctaagctggataaaaccttgcagagattccatcacccaaaactgtctagtttgcacagagaaaactttatttggaatctcaaaaacgttcctctccttgaaaaatatctgtatgcattaggacaaaacaggaatcgcgagatcgtggaacacgtcattcatctctttaaagaggaagtcatgaccaagttaagccacttccgagagtag

SEQ ID NO: 37686 - protein, 240 aa, Artificial Sequence
  derived and/or modified sequence
MGNCQAGHNLHLCLAHHPPLVCATLILLLLGLSGLGLGSFLLTHRTGLRSPDIPQDWVSFLRSFGQLTLCPRNGTVTGKWRGSHVVGLLTTLNFGDGPDRNKTRTFQATVLGSQMGLKGSSAGQLVLITARVTTERTAGTCLYFSAVPGILPSSQPPISCSEEGAGNATLSPRMGEECVSVWSHEGLVLTKLLTSEELALCGSRLLVLGSFLLLFCGLLCCVTAMCFHPRRESHWSRTRL

SEQ ID NO: 37687 - DNA, 723 bp, Artificial Sequence
  derived and/or modified sequence
atgggcaactgccaggccggccacaacctgcacctgtgcctggcccaccacccccccctggtgtgcgccaccctgatcctgctgctgctgggcctgagcggcctgggcctgggcagcttcctgctgacccacagaaccggcctgagaagccccgacatcccccaggactgggtgagcttcctgagaagcttcggccagctgaccctgtgccccagaaacggcaccgtgaccggcaagtggagaggcagccacgtggtgggcctgctgaccaccctgaacttcggcgacggccccgacagaaacaagaccagaaccttccaggccaccgtgctgggcagccagatgggcctgaagggcagcagcgccggccagctggtgctgatcaccgccagagtgaccaccgagagaaccgccggcacctgcctgtacttcagcgccgtgcccggcatcctgcccagcagccagccccccatcagctgcagcgaggagggcgccggcaacgccaccctgagccccagaatgggcgaggagtgcgtgagcgtgtggagccacgagggcctggtgctgaccaagctgctgaccagcgaggagctggccctgtgcggcagcagactgctggtgctgggcagcttcctgctgctgttctgcggcctgctgtgctgcgtgaccgccatgtgcttccaccccagaagagagagccactggagcagaaccagactgtag

SEQ ID NO: 37688 - DNA, 723 bp, Artificial Sequence
  derived and/or modified sequence
atgggaaactgtcaggccggacataatctgcatctatgtctggctcaccacccaccccttgtgtgtgctactctgattctgctgctgcttggattgagcggtttggggctaggaagtttcctcctgactcaccgaacaggactccgttcccccgatatacctcaggactgggtgagcttcttgcgatcgttcggccaattgacactgtgtcctagaaacggaaccgtgactgggaagtggaggggaagtcatgtcgttgggctgctgacaactctgaacttcggcgatggccctgatcggaataaaaccagaacatttcaggccaccgtattgggaagccagatggggcttaagggaagctccgcaggtcagttggtgctgattaccgcaagagtgaccaccgagaggacagccggtacttgtttgtatttttccgcagtccctggaatcctgccatcatctcagccacctatctcgtgtagtgaggagggcgccgggaatgccactctctccccaagaatgggcgaggaatgtgtcagcgtgtggtcccacgaaggtctagtgttgaccaagctgttgaccagcgaagagctcgctctttgcggcagcaggttactggtgctcggttcttttttgctactcttctgtggacttctctgctgtgtaaccgccatgtgcttccatccacgccgggagagccactggtccagaacacgactgtag

SEQ ID NO: 37689 - DNA, 723 bp, Artificial Sequence
  derived and/or modified sequence
atgggaaactgccaagcgggccacaacttacatctttgcctagctcatcatccgccgttggtatgcgctacgcttatccttttgcttttaggcctgagtggcttgggtcttggctctttcttgcttacgcaccggaccgggctgcggtcacccgatattccacaggactgggtgagtttcctcaggtcatttggccaactcactctgtgtccacggaacggcactgtgactggcaaatggcgcggtagccatgtagtgggcttattgacgaccctaaatttcggagacggtcctgaccgaaataaaaccagaacttttcaggcaacggtgctcggatctcaaatgggtttgaaaggatcctctgcaggacagctggttctcatcaccgcccgggtaacaactgaacgcaccgctgggacttgtctatattttagtgccgtgccaggcatcctgcccagtagtcagccacctatctcttgctcagaagagggtgcaggcaatgccacattaagcccgcgcatgggagaggagtgtgtgtccgtctggagtcacgaagggttggttctcaccaagctgctcacaagcgaggagcttgcactgtgtggcagtcgcttgctcgtgctcgggtcgttcctgttactgttttgtgggctcctgtgctgcgttacagccatgtgtttccacccgagacgcgaatcccactggagcagaacaagactgtag

SEQ ID NO: 37690 - DNA, 723 bp, Artificial Sequence
  derived and/or modified sequence
atgggcaactgccaggccggccacaacctgcacctgtgcctggcccaccacccccccctggtgtgtgccaccctcatcctgctgctgctgggcctgagcggcctgggcctgggcagcttcctgctgacccacaggacaggcctgcggagcccagacatcccccaggactgggtgtccttcctgcggagctttggccagctgaccctgtgccccagaaatggaacagtgacaggcaagtggaggggcagccacgtggtgggcctgctgaccaccctgaactttggagatggccctgacaggaacaagaccaggaccttccaggccaccgtgctgggcagccagatgggcctgaagggcagcagcgctggccagctggtgctgatcacagcccgggtgaccacagagaggacagctggcacctgcctgtacttctctgctgtgcccggcatcctgcccagcagccagccccccatcagctgcagcgaggagggcgctggaaatgccaccctgagccccaggatgggagaagaatgtgtgtctgtgtggagccatgagggcctggtgctgaccaagctgctgaccagcgaggagctggccctgtgtggcagccggctgctggtgctgggcagcttcctgctgctcttctgtggcctgctgtgctgcgtgacagccatgtgcttccacccccggcgggagagccactggagcaggacccggctgtag

SEQ ID NO: 37691 - DNA, 723 bp, Artificial Sequence
  derived and/or modified sequence
atgggcaactgccaggccggccacaacctgcacctgtgcctggcccatcaccccccgttggtgtgtgccactttgatattgctgcttctaggacttagtggcctgggcctcggatcttttctgctaactcaccggaccgggctgcggtcccccgacattcctcaggattgggttagttttcttcggtcatttggccaactcaccctgtgcccccggaacggcacggtcacggggaagtggcgggggtcgcacgtggtggggctgctgaccaccctgaattttggtgatgggccagaccgcaataagacaagaacattccaggccactgtgctaggctcgcagatggggctcaagggttctagcgcggggcaacttgttctcatcaccgcccgggtcactaccgagagaacagccggaacctgcctctacttctctgccgtgcctggtatcctcccatccagccagccccccatcagttgttccgaggagggcgcgggcaatgcaacactgagccccagaatgggggaggaatgcgtgtcggtgtggagtcacgagggtctcgtgcttacaaaactgctaacttctgaggagctagcattgtgcgggagccggttgctggtcctgggaagcttcctactgctgttttgtggcctgctttgttgtgtaactgctatgtgcttccatcctcggagagagagccactggtcccgcaccaggctgtag

SEQ ID NO: 37692 - DNA, 723 bp, Artificial Sequence
  derived and/or modified sequence
atgggcaactgccaggccggccacaacctgcacctgtgcctggcccatcatccacccctcgtctgcgctacactgatcctgctcctacttggcttatccggcttagggttgggcagctttttgctcacccaccggaccgggctccgctccccagacatcccccaggactgggtttcctttttgcggtcgttcggacagctcacactgtgcccaaggaacggaaccgttactggaaagtggcgggggagccatgtggtgggccttctcaccacgctgaactttggcgatggccctgatcgcaataagacacggacatttcaggccactgttctgggctctcaaatggggctgaaaggtagttcagcaggacagctggtactcatcacagcgcgagtgacaaccgagaggacggcaggaacttgtctctacttcagcgctgttcccggtattctgccatcctctcaacctcctatatcgtgctccgaggagggcgccggcaatgctaccctgagccccaggatgggcgaggaatgtgtgtcagtgtggtcacacgagggactagttcttaccaagctgttaacttcagaggagctcgccctctgcgggagccgtctgctagtcctgggcagcttcttgttacttttctgtgggctgctatgttgtgtgaccgctatgtgcttccacccacggcgcgaatcccactggtctagaaccagactatag

SEQ ID NO: 37693 - DNA, 723 bp, Artificial Sequence
  derived and/or modified sequence
atgggcaactgtcaggctggacacaatctacacctctgccttgctcaccaccctcccctggtatgcgccacgcttattctgttgctgctgggactctctgggctcgggctcggatcattcttgttgactcacagaaccgggctacggtcacctgatattcctcaggactgggtgtcattcttaagatctttcgggcagctgactctatgccctcggaatggcaccgtgaccgggaagtggaggggctcccacgtggttggactcttaaccaccctgaactttggagacggacccgaccgcaataagacccggactttccaggccaccgtcttgggaagccagatgggcctgaagggctcttccgctggccaactcgtgcttataacggcgagggtcacaacagagcgcaccgctggtacttgtctgtactttagtgctgtacctggcatactcccgtcctctcagcctccaatctcatgctcggaagaaggggcaggtaatgcaactttgagcccgagaatgggtgaagaatgtgtttccgtgtggagccatgaggggctcgtgttgacgaaactgctgacaagcgaggaactggccttgtgtggctcccgccttttagtgctgggaagtttcttactgttgttctgtgggcttctatgctgcgtgaccgccatgtgcttccacccaagacgggaatctcactggtcccggacacggttatag

SEQ ID NO: 37694 - DNA, 723 bp, Artificial Sequence
  derived and/or modified sequence
atgggcaactgccaagctggacataacctgcatctctgtctcgctcatcaccctcccttagtttgtgcaacgctgatcctgttactgctagggctgagtggacttggattaggaagcttcttgctgacccataggactgggctcaggtcgcccgatatcccccaagattgggttagttttctgcgaagctttggccaactgacactgtgccctcggaacgggacggtgacgggcaagtggcggggatctcatgtggtggggttactaaccacactaaatttcggggatggccctgaccgaaataagacacggacattccaggccacggtattaggctctcagatgggtctcaaaggtagcagcgcgggacagctggtactaatcacggctagagtgaccaccgaacgcacagctggtacgtgcctctacttctccgccgtacccggtatcctcccctcctctcagcccccaatcagttgttctgaggagggggcaggaaacgctaccttgagtccaaggatgggcgaggagtgcgtgtcagtgtggtcacatgagggattggtgttgactaagctccttacaagcgaagaattggccctgtgtggatcccgactcctggtgctcggcagtttccttctcttgttttgcggcctgttgtgctgcgtgactgctatgtgcttccacccccgtagagagagccactggtcaaggactcgactctag

SEQ ID NO: 37695 - DNA, 999 bp, Artificial Sequence
  derived and/or modified sequence
gaggaggagggtcggggacggaagcgcagagcacggaccccgccccctcgcggccccgctcgtgacgtcgcggggggcgccggcctccgcccggccccgagggcaggctctccccggaggctcagccccctctgctccccatgggcaactgccaggcagggcacaacctgcacctgtgtctggcccaccacccacctctggtctgtgccactttgatcctgctgctccttggcctctctggcctgggccttggcagcttcctcctcacccacaggactggcctgcgcagccctgacatcccccaggactgggtctcttttttgagatcttttggccagctgaccctgtgtcccaggaatgggacagtcacagggaagtggcgagggtctcacgtcgtgggcttgctgaccaccttgaacttcggagacggtccagacaggaacaagacccggacattccaggccacagtcctgggaagtcagatgggattgaaaggatcttctgcaggacaactggtccttatcacagccagggtgaccacagaaaggactgcaggaacctgcctatattttagtgctgttccaggaatcctaccctccagccagccacccatatcctgctcagaggagggggctggaaatgccaccctgagccctagaatgggtgaggaatgtgttagtgtctggagccatgaaggccttgtgctgaccaagctgctcacctcggaggagctggctctgtgtggctccaggctgctggtcttgggctccttcctgcttctcttctgtggccttctctgctgtgtcactgctatgtgcttccacccgcgccgggagtcccactggtctagaacccggctctgagggcactggcctagttcccgacttgtttctcaggtgtgaatcaacttcttgggccttggctctgagttggaaaaggttttagaaaaagtgaagagctggaatgtgggggaaaataaaaagcttttttgcccagtgg

SEQ ID NO: 37696 - DNA, 1024 bp, Artificial Sequence
  derived and/or modified sequence
agggaacaagcttcaattgaatgaaactggcttgaccacagaggaatctgggggactttctgagcttcgcggacttgtgccgcctcctgactttaagctggctctggaggaggaggaagtggaggtatctcaggctctccccggaggctcagccccctctgctccccatgggcaactgccaggcagggcacaacctgcacctgtgtctggcccaccacccacctctggtctgtgccactttgatcctgctgctccttggcctctctggcctgggccttggcagcttcctcctcacccacaggactggcctgcgcagccctgacatcccccaggactgggtctcttttttgagatcttttggccagctgaccctgtgtcccaggaatgggacagtcacagggaagtggcgagggtctcacgtcgtgggcttgctgaccaccttgaacttcggagacggtccagacaggaacaagacccggacattccaggccacagtcctgggaagtcagatgggattgaaaggatcttctgcaggacaactggtccttatcacagccagggtgaccacagaaaggactgcaggaacctgcctatattttagtgctgttccaggaatcctaccctccagccagccacccatatcctgctcagaggagggggctggaaatgccaccctgagccctagaatgggtgaggaatgtgttagtgtctggagccatgaaggccttgtgctgaccaagctgctcacctcggaggagctggctctgtgtggctccaggctgctggtcttgggctccttcctgcttctcttctgtggccttctctgctgtgtcactgctatgtgcttccacccgcgccgggagtcccactggtctagaacccggctctgagggcactggcctagttcccgacttgtttctcaggtgtgaatcaacttcttgggccttggctctgagttggaaaaggttttagaaaaagtgaagagctggaatgtgggggaaaataaaaagcttttttgcccagt

SEQ ID NO: 37697 - protein, 523 aa, Artificial Sequence
  derived and/or modified sequence
MAALLRRLLQRERPSAASGRPVGRREANLGTDAGVAVRVRFAPSPTGFLHLGGLRTALYNYIFAKKYQGSFILRLEDTDQTRVVPGAAENIEDMLEWAGIPPDESPRRGGPAGPYQQSQRLELYAQATEALLKTGAAYPCFCSPQRLELLKKEALRNHQTPRYDNRCRNMSQEQVAQKLAKDPKPAIRFRLEQVVPAFQDLVYGWNRHEVASVEGDPVIMKSDGFPTYHLACVVDDHHMGISHVLRGSEWLVSTAKHLLLYQALGWQPPHFAHLPLLLNRDGSKLSKRQGDVFLEHFAADGFLPDSLLDIITNCGSGFAENQMGRTLPELITQFNLTQVTCHSALLDLEKLPEFNRLHLQRLVSNESQRRQLVGKLQVLVEEAFGCQLQNRDVLNPVYVERILLLRQGHICRLQDLVSPVYSYLWTRPAVGRAQLDAISEKVDVIAKRVLGLLERSSMSLTQDMLNGELKKLSEGLEGTKYSNVMKLLRMALSGQQQGPPVAEMMLALGPKEVRERIQKVVSS

SEQ ID NO: 37698 - DNA, 1572 bp, Artificial Sequence
  derived and/or modified sequence
atggccgctctgctgagacgtttgctacaaagggaacggccaagcgccgccagcggcaggcccgtaggcagacgcgaggcaaatctcggaacagatgccggcgtggcagtgcgcgtgaggttcgcaccttcgccgacaggattcctgcatctagggggactgagaaccgcgctgtataactacatattcgcaaaaaagtaccagggatcgttcattttgcgcctggaagacaccgaccaaacgagggtcgtgcctggggctgccgagaacattgaagacatgcttgagtgggcagggatacctcccgacgaatcccctcgccgtggcgggccagccggaccctaccagcagtcacagcgcttggagctttacgcccaggccacagaagcactgctgaagactggggcggcgtatccgtgcttctgttcaccccaaagactcgaattgttgaagaaggaggctctgaggaatcaccagacccctcgctacgacaaccgctgtaggaacatgtctcaggaacaagtcgcccaaaagcttgccaaggatcccaagcctgccatcagattccgcctggaacaggtggtccccgccttccaagaccttgtttatggatggaatcgccatgaagtggccagcgttgaaggagaccccgtaataatgaagtctgacgggttccccacataccatcttgcatgcgtggtggatgaccatcatatgggcatctcccatgtcctccgcggcagcgaatggctcgtttccacagctaagcacctactgctgtaccaagctctgggttggcagccccctcactttgcccacctgccccttcttctcaaccgcgacggatccaagctatccaagaggcagggtgacgtcttcctcgagcattttgcggctgacggcttccttccagactccttattggacatcatcacgaattgtgggagcgggttcgcagagaatcagatgggacgaaccctgcctgagctgatcacacagtttaatttaacacaggtaacctgccactctgctctgctggatctcgagaagctgcccgagtttaacaggttgcatctgcagcgcctcgtgtccaatgagagtcagcggcggcagctggttggaaaattacaggtcctcgtggaggaagcatttggttgtcagttacagaaccgggacgtgttgaatccagtttacgtggaacgtatccttctgttgaggcagggacacatttgccgtctgcaggacctggtgtcgcccgtatattcgtacctgtggacccggcccgccgtcggccgagcccaattggatgcaatatccgagaaggtggacgttatcgccaagcgagtgctcgggctgctggagcgttcaagcatgagtctgactcaagacatgctgaacggagagctgaagaaactaagtgaggggttggaggggacgaagtatagtaacgtaatgaaactcctccggatggctctatccgggcagcagcaaggcccacctgtcgcagaaatgatgcttgccctgggaccaaaggaagttcgggagcggattcaaaaggtcgtgtccagttag

SEQ ID NO: 37699 - DNA, 1572 bp, Artificial Sequence
  derived and/or modified sequence
atggccgcccttctcagacggctgctgcagcgagaaagaccatctgcagccagcgggagacctgtgggccgacgtgaggctaacttgggcacagatgctggcgtggccgtgagggtccgttttgcccccagtcccacaggtttcctacatctgggaggcctccgaaccgctttatataactacatcttcgccaagaagtatcaaggttccttcatccttcggctcgaggatacagatcagactcgagtggttccaggggcagctgaaaacattgaagacatgctggaatgggcaggaatcccccctgatgagagcccccggaggggcgggccagccgggccttaccaacagtctcaacggctcgagctgtacgcacaagcaacagaagccctgctgaagactggagccgcctacccctgcttctgcagcccgcagaggcttgaactcctcaaaaaagaagcgttgcgtaatcatcaaactccccggtacgataataggtgccggaacatgtcccaggaacaggtagctcagaaactggctaaagacccaaagcctgccatcagatttagactggagcaagtggtccccgctttccaggaccttgtctacggttggaatcgccacgaggttgccagcgtcgaaggggaccctgtcatcatgaagtccgacggcttccccacctatcatctggcctgtgtagttgacgaccatcacatgggtatctctcatgtgttaaggggctccgagtggctagtgtccaccgcaaagcatctccttctttaccaggccctcggctggcagccccctcattttgcacatttgcccctactattgaacagagacggtagtaaacttagcaagagacagggggatgtgttcctggagcacttcgctgcagacgggttcctccctgattcacttctggatatcatcacaaattgtggaagcggatttgcggagaaccaaatgggcagaactttgcccgagttgatcacacagttcaatctcactcaggtgacttgccactcagctctccttgatttagagaaattgcccgaattcaatcggctccatctgcagcgactcgttagcaacgagtcacaacggagacagttggtggggaaacttcaggttctagtggaggaagccttcggttgccagctccagaaccgagacgttctgaatcccgtgtatgtggaaagaattctgctcctgagacaggggcacatttgccggctacaggacctagtttcaccagtttactcttatctgtggaccaggccagccgtaggccgagcccaacttgatgcgatttctgagaaggttgatgtgatcgctaaaagggtcctgggactcctcgagaggtcatctatgtcactgacgcaggacatgcttaacggtgagcttaagaaactgtcagagggccttgagggaactaaatacagcaatgtgatgaagctcctgagaatggcactgagcgggcagcagcagggccctccagttgcagagatgatgctggctctcggaccaaaagaagtgagagaacggattcagaaggtggtgtcttcttag

SEQ ID NO: 37700 - DNA, 2769 bp, Artificial Sequence
  derived and/or modified sequence
acgtgtgctattccatcccacatggcggcgctcctgaggagactgctgcagcgcgagaggccttcggcggcctctggccgccccgtaggacggcgcgaggccaacctgggcactgatgccggggttgcggtgcgagtgcggttcgctcccagccccacaggcttcttgcacctgggtggcctccgcactgccttgtacaactacatctttgctaagaagtaccaggggagcttcatcctgaggctagaggacacagatcagactcgcgttgtgcctggggcagcggagaatattgaggacatgctggagtgggcaggcatcccgcctgatgagagcccccgccggggcggtcctgctgggccctaccagcaatctcagcggttggagctgtatgcccaggccacagaagcgctgctgaagaccggagctgcttacccctgtttctgctcaccccagcggctggagctcctgaagaaggaggccttgcggaaccaccagacgccccggtatgacaatcggtgcaggaacatgagccaggagcaggtggcccagaagctggccaaggaccccaagcctgcgatccgcttccgcctggagcaggtggtgccagccttccaggacctggtctatggctggaataggcatgaagtggccagcgtggagggagacccagtcatcatgaagagcgacggcttccccacataccacctggcctgcgtggtggacgaccaccacatgggcatcagccacgtgctgcgaggctctgagtggctcgtctccactgccaagcacctgctcctctaccaggccctgggctggcagccaccccacttcgcccacctgcccctgctcctcaacagggatggcagcaagctctccaagaggcaaggggacgttttcctggagcactttgctgctgatggcttcctgcccgattccttgttggacatcatcaccaactgtggctcaggttttgcagagaaccaaatgggcaggaccctgccggagctgatcacacagttcaacctgacacaggtcacctgtcactcagccctgctggacctggagaagctcccagaattcaacagactgcacctccagcggctggtgagcaatgagagccagaggcgccagctggtggggaagctgcaggtccttgtggaggaggcctttggttgccagctgcaaaacagggatgtcctcaacccagtctacgtggagaggatcctcctgctgagacagggtcacatttgccgcctgcaggacttggtgtccccagtatactcttacctgtggactcgccctgcagtaggtcgagcacagctggacgccatctcggagaaggtggatgtgattgccaagcgtgtgctggggcttctagaaagatctagtatgagcttaactcaggatatgctgaatggagaactgaagaagctatcagaaggtctggaaggcaccaagtacagtaatgtgatgaaactccttcggatggccctcagtggacagcagcaaggacctcctgtagctgagatgatgttggccttgggaccaaaggaagtacgggaacggatccagaaggtggtttccagctagggagaggatgtttcgggcagtggagatcgccctaagaacctgtgagcttagaaacagctttcagagaccagaaggaggcctggggcccgtcgggaagtttgctgaaggaactaagagtggaaacaatctctgactgcacacaagtgcatttgtgatccaccacaggcacgtttttgtcaattggctggggaagcccaacccatctaacctcctggactctggaaaggcattctccgggtctggtttctcacacattacacagcagaggtttggagttagttcacagaaaagttaacatcccggaacagtgcagaaggcttgggtttcagtttgctagggcccccataacaaaatgccacagaaccaggtggtttaaacaacagagatttattttctcacatttggaggctagaagttcaagatcaaggtgtcagcaggcctggtttttcctagaggcctcttttgttggcttgcagacagctgtcttctcactgtgtccttgtgcggtcttccctccatgcacacacatctctaagtttcattatgtgcccaacgttcctcttctaagaacaccagttggactggattttaactttaaccagcctcatttaagttaatcacctctttaaatgctcaatctccaagtgaaaggaggatggtggcagggtacatgaacccctaccaggcttctaggcttcccctgcatggcagccagcctctaagttggcccccaaccatccctgccttcttctattcacacccttgtgtggttccttcccacattgaataggcctgacttgtgtaaccactacactattgaagaaatgagagtttgacttctgagggtaagtcataaaatacatcgtggcttctgtcttgttttctttgatcgcttactttgggggaagccagcttccaggtcatgaaaatactcaagcagccttatggagtgctccacatgacaagggatcgaggcctcccaccaatagccatgggagtgtgcaatcttgaaagctggtccttcaattccagccaagcattcacatgaccgcaatcctagctgatctcgcttgtgacctctatgggagaccctaagccagaaccactcagagaagctgctccggaacgtcagacacacatgaactgtgagatagtaaacgtttattgtttaaagct

SEQ ID NO: 37701 - DNA, 3961 bp, Artificial Sequence
  derived and/or modified sequence
gggagaagcccacgtgtgctattccatcccacatggcggcgctcctgaggagactgctgcagcgcgagaggccttcggcggcctctggccgccccgtaggacggcgcgaggccaacctgggcactgatgccggggttgcggtgcgagtgcggttcgctcccagccccacaggcttcttgcacctgggtggcctccgcactgccttgtacaactacatctttgctaagaagtaccaggggagcttcatcctgaggctagaggacacagatcagactcgcgttgtgcctggggcagcggagaatattgaggacatgctggagtgggcaggcatcccgcctgatgagagcccccgccggggcggtcctgctgggccctaccagcaatctcagcggttggagctgtatgcccaggccacagaagcgctgctgaagaccggagctgcttacccctgtttctgctcaccccagcggctggagctcctgaagaaggaggccttgcggaaccaccagacgccccggtatgacaatcggtgcaggaacatgagccaggagcaggtggcccagaagctggccaaggaccccaagcctgcgatccgcttccgcctggagcaggtggtgccagccttccaggacctggtctatggctggaataggcatgaagtggccagcgtggagggagacccagtcatcatgaagagcgacggcttccccacataccacctggcctgcgtggtggacgaccaccacatgggcatcagccacgtgctgcgaggctctgagtggctcgtctccactgccaagcacctgctcctctaccaggccctgggctggcagccaccccacttcgcccacctgcccctgctcctcaacagggatggcagcaagctctccaagaggcaaggggacgttttcctggagcactttgctgctgatggcttcctgcccgattccttgttggacatcatcaccaactgtggctcaggttttgcagagaaccaaatgggcaggaccctgccggagctgatcacacagttcaacctgacacaggtcacctgtcactcagccctgctggacctggagaagctcccagaattcaacagactgcacctccagcggctggtgagcaatgagagccagaggcgccagctggtggggaagctgcaggtccttgtggaggaggcctttggttgccagctgcaaaacagggatgtcctcaacccagtctacgtggagaggatcctcctgctgagacagggtcacatttgccgcctgcaggacttggtgtccccagtatactcttacctgtggactcgccctgcagtaggtcgagcacagctggacgccatctcggagaaggtggatgtgattgccaagcgtgtgctggggcttctagaaagatctagtatgagcttaactcaggatatgctgaatggagaactgaagaagctatcagaaggtctggaaggcaccaagtacagtaatgtgatgaaactccttcggatggccctcagtggacagcagcaaggacctcctgtagctgagatgatgttggccttgggaccaaaggaagtacgggaacggatccagaaggtggtttccagctagggagaggatgtttcgggcagtggagatcgccctaagaacctgtgagcttagaaacagctttcagagaccagaaggaggcctggggcccgtcgggaagtttgctgaaggaactaagagtggaaacaatctctgactgcacacaagtgcatttgtgatccaccacaggcacgtttttgtcaattggctggggaagcccaacccatctaacctcctggactctggaaaggcattctccgggtctggtttctcacacattacacagcagaggtttggagttagttcacagaaaagttaacatcccggaacagtgcagaaggcttgggtttcagtttgctagggcccccataacaaaatgccacagaaccaggtggtttaaacaacagagatttattttctcacatttggaggctagaagttcaagatcaaggtgtcagcaggcctggtttttcctagaggcctcttttgttggcttgcagacagctgtcttctcactgtgtccttgtgcggtcttccctccatgcacacacatctctaagtttcattatgtgcccaacgttcctcttctaagaacaccagttggactggattttaactttaaccagcctcatttaagttaatcacctctttaaatgctcaatctccaagtacagtctcattctgaggttccaggggtttctcaacgtaagaatttagggggacagaattcagcccgtagcagctgggcagcaggactcatgggtcccagttctcaggccccaaggactcagagcagcaaaggatacgtgacacaagcagggctgaactggacaccagactttctttggggttgtaaaaggagaagtgtgactccactgccaagggtaagcactcttgtcttatgctaccctttattcttgaaccttggggcagcctgtgtctcccttccctaaacgtcatctgttccgtttttccagtcttccagacctggtccttggactggagaccttcacccttcctattttgtggctttctcttcaaatccacctcgtccttcctccatgacttataagtcatcatctctgctggtttctgaaatgagatatgcttcttggggtcttcagtgaagaggaatagcaagtgaaaggaggatggtggcagggtacatgaacccctaccaggcttctaggcttcccctgcatggcagccagcctctaagttggcccccaaccatccctgccttcttctattcacacccttgtgtggttccttcccacattgaataggcctgacttgtgtaaccactacactattgaagaaatgagagtttgacttctgagggtaagtcataaaatacatcgtggcttctgtcttgttttctttgatcgcttactttgggggaagccagcttccaggtcatgaaaatactcaagcagccttatggagtgctccacatgacaagggatcgaggcctcccaccaatagccatgggagtgtgcaatcttgaaagctggtccttcaattccagccaagcattcacatgaccgcaatcctagctgatctcgcttgtgacctctatgggagaccctaagccagaaccactcagagaagctgctccggaacgtcagacacacatgaactgtgagatagtaaacgtttattgtttaaagctacttggtttggggataatttgcgtttcagcagtagacaatatatttattttgtccaggggagtggaaaggcgattacagagtttgttgagccccatagagtcctagtctttgcttaaagaaatataccagttctttctaatacagaatccattaagttcgttggttgcaaacaatagaaaccaactctgcctcacttatgtttattggaggccataagagagccacagcatctaccaaaaagccaaaaaaaaaacaggttttggaaaagacaggaactagctacaggagctaatggccaatcttgtctgagttctttgatggcgacacatgaactacagccgttttgttgttgttaatttctccgtgttttcccctcagttttggatgactctgctcaaggttcagattctgaggagcaagtatctgttgggctatctgaggtcctgctaccattccttggccagtaataggtagtttcacagggattatatgcaatggaggaaaagttgttctcaaggaaaactagggagctttctccagaagatgatgtaatggcagaaacaacaggtggttgaccacagaaggggacaataataatacttgtaatttattgtgcgcttatatgagcctcaccctctcccaggtgtcagataatgctcgtaaatgccttagtccatcatctcagtaaattttttttataacactatg

SEQ ID NO: 37702 - DNA, 1572 bp, Artificial Sequence
  derived and/or modified sequence
atggccgccctgctgcggcggctgctgcagcgggagcggcccagcgctgccagcggccggcctgtgggccggcgggaggccaacctgggcacagatgctggggtggccgtgcgggtgcgctttgcccccagccccaccggcttcctgcacctgggcggcctgaggacagccctgtacaactacatctttgccaagaagtaccagggcagcttcatcctgcggctggaggacacagaccagaccagggtggtgcctggagctgctgaaaatattgaggacatgctggagtgggccggcatccccccagatgagagccccaggagaggaggccctgctggcccctaccagcagagccagaggctggagctgtatgcccaggccacagaggccctgctgaagacaggagctgcctacccctgcttctgcagcccccagaggctggagctgctgaagaaggaggccctgaggaaccaccagacccccaggtatgacaaccgctgcaggaacatgagccaggagcaggtggcccagaagctggccaaggaccccaagccagccatccgcttccggctggagcaggtggtgcctgccttccaggacctggtgtatggctggaacagacatgaggtggcctctgtggagggggaccctgtgatcatgaagagtgatggcttccccacctaccacctggcctgtgtggtggatgaccaccacatgggcatcagccacgtgctgcggggcagcgagtggctggtgtccacagccaagcacctgctgctgtaccaggccctgggctggcagcccccccactttgcccacctgcccctgctgctgaacagagatggcagcaagctgagcaagaggcagggagatgtgttcctggagcactttgctgctgatggcttcctgcctgacagcctgctggacatcatcaccaactgtggcagcggctttgctgagaaccagatgggccgcaccctgcctgagctgatcacccagttcaacctgacccaggtgacctgccacagcgccctgctggacctggagaagctgcctgagttcaaccggctgcacctgcagaggctggtgtccaatgaaagccagaggcggcagctggtgggcaagctgcaggtgctggtggaggaggccttcggctgccagctgcagaacagagatgtgctgaaccctgtgtatgtggagcgcatcctgctgctgcggcagggccacatctgccgcctgcaggacctggtgtcccctgtgtacagctacctgtggaccaggcctgctgtgggccgggcccagctggatgccatcagcgagaaggtggatgtgattgccaagagggtgctgggcctgctggagaggagctccatgagcctgacccaggacatgctgaatggagagctgaagaagctgtctgagggcctggagggcaccaagtacagcaatgtgatgaagctgctgaggatggccctgagcggccagcagcagggcccccctgtggccgagatgatgctggccctgggccccaaggaggtgcgggagcgcatccagaaggtggtgagcagctag

SEQ ID NO: 37703 - DNA, 1572 bp, Artificial Sequence
  derived and/or modified sequence
atggccgccctgctgcggcggctgctgcagcgggagcggcccagcgctgcctcaggccggcccgtcgggaggagagaagctaatctggggactgacgcaggcgttgccgtccgtgtgcggttcgcacctagcccaacagggttcctccacttgggcggacttaggaccgctctttacaattacatatttgcaaagaagtaccaaggctccttcatactgaggctggaagacaccgaccagacccgggttgtccctggcgccgccgagaacatcgaggacatgctcgagtgggcaggcatccctcccgatgaatctcctcgccggggaggccctgccggcccttaccaacagagccagcgtctggagttgtacgctcaggccacagaggcgctgctgaaaacaggagccgcttacccatgtttttgttccccccagcggctcgagctgctgaaaaaagaggccctgaggaaccatcaaacgcctcggtatgacaaccgctgtcgaaatatgagtcaggaacaggtggcacagaaactagccaaggatcccaaacctgcgatcagatttcgactggagcaagttgtacctgccttccaggacctggtctacgggtggaatcgccacgaggttgcttccgtcgagggggatcctgttataatgaaaagcgatggtttccctacataccatcttgcgtgcgttgttgacgatcatcacatgggcatcagccatgtgctgcgcggctccgaatggctggtgtccaccgcaaagcacctccttctgtatcaggcgctcggttggcagcccccgcactttgcccacctgcccttgctactgaatcgggacggcagcaaactgtccaaacggcaaggagatgtgttcctcgaacattttgctgccgacggattcctgccagattccttattggatatcattaccaattgtggatcaggatttgccgagaaccagatggggcgtaccctcccagagcttatcacacagtttaacctcacccaagtgacctgtcattctgccttgctggatctggaaaagctgccagaatttaatcgcctccatcttcaacgtctcgtctccaacgagagccagaggaggcagttagttggtaagcttcaggttctggtcgaggaagccttcggatgccaactgcaaaatcgggatgtcctcaaccctgtgtatgtggagaggatactgctgctccgccaaggtcacatctgccgcctgcaggatctagtctcaccggtgtatagttatctgtggacacggcccgcagttggcagagcccagctggatgccatcagtgagaaagtggatgtgatcgccaagcgcgttttgggcctgcttgagcgctcctccatgtcactcactcaagatatgctgaatggtgagctcaagaagctatccgaaggcctcgagggtacaaaatatagcaatgtgatgaaacttctccggatggctctatcgggtcagcagcagggtcctccagtcgccgaaatgatgctggctttaggcccaaaagaggtgagggaaaggatccagaaggtagtgagcagctag

SEQ ID NO: 37704 - DNA, 1572 bp, Artificial Sequence
  derived and/or modified sequence
atggccgccctgctgcggcggctgctgcagcgggagcggcccagcgccgcaagtggccgtccagtgggaaggagagaggcaaatctggggaccgacgctggggttgccgtgagggtacgcttcgcaccctcccccaccggattcctgcacctaggtggcctgagaacagccctttataactatatattcgccaagaagtaccagggaagtttcattctcagactggaggatactgatcagacccgcgtagttcccggagcagccgaaaacatcgaggacatgttagagtgggcgggcattcctccagacgaatctcccaggcgcgggggccccgcggggccctatcagcagagtcagcggttggaattgtacgctcaagctacggaggccctgctgaagaccggtgccgcctacccctgcttttgctctcctcaacgcctggagctgcttaagaaagaagccctgcgcaaccaccagactccccgatacgacaaccgctgtaggaatatgtcccaggaacaggtggctcagaagctggccaaggatcctaagccagccatccgtttccgcctggaacaggtggtgcccgcctttcaggacttggtttacggctggaatcggcatgaagttgcttcagtggagggggatcccgtcatcatgaaaagcgacggttttcccacctatcacctggcttgtgtggtcgacgaccaccatatgggcataagtcacgtgctccggggaagtgaatggctggtgtcaacagccaaacacctgctgctctatcaggcactcgggtggcaacctcctcacttcgcccatcttcccttactcttaaaccgagacggaagcaagttgagtaagcgacagggcgatgttttcttggaacattttgcagcagacggtttcctccctgactctctgcttgatatcattactaactgcggcagcggatttgcagagaaccagatgggcaggactctgccggagttaatcacccagttcaacctgacccaggtaacgtgccacagtgctctcctggacctggaaaagctaccagagttcaacagacttcatttgcagagattagtgtctaatgaatcacaaagaaggcaactagtgggcaaactgcaagtgctggtggaggaggctttcggttgccaactacaaaatcgtgatgtcctgaaccccgtctatgtcgaacggattctccttctccgccagggacacatctgtcgtcttcaagatttagtgagcccagtgtactcctacttatggacccgccctgccgtgggaagagctcagctggacgctatctctgagaaggtggatgtgattgccaaacgagttctcggactactggaacgcagttctatgtccctgacccaggatatgctgaacggggaactgaagaaattgagcgaagggctagaaggtaccaaatactccaatgtgatgaaactgctacggatggctctctccggacagcagcaggggcccccggttgctgagatgatgctggcactgggcccaaaggaagtcagagagcgaattcagaaagtggtttccagttag

SEQ ID NO: 37705 - DNA, 1572 bp, Artificial Sequence
  derived and/or modified sequence
atggccgctctcctgaggcgcttactccagagggagaggccgagcgcagctagcggcagaccagtcggaagacgcgaggctaacctcggaaccgatgcaggtgtggccgtccgagtccgtttcgctccttctcctacagggtttcttcacttaggcggactgcgcactgctctgtataactacatctttgcgaagaagtaccagggctcctttattctgcggctagaggatactgaccaaaccagggtggtccctggtgccgctgagaatattgaagatatgctagaatgggccggaatcccgccagatgagtcaccccgacgtggagggccagcaggaccatatcaacagtcccagagactggagctgtacgcgcaggccaccgaggccctgctgaaaaccggagctgcttacccatgcttctgcagtccacagaggcttgaactgctaaagaaggaagctctgcgcaaccaccagacaccaaggtatgataaccgctgccgcaacatgtctcaggaacaggtggcccagaagctggctaaggatcctaaacccgcaataagatttcgcctggaacaggtggtcccagcgtttcaggacttagtttacggctggaataggcacgaggttgcatccgtggagggcgatcccgtaatcatgaaatcggacggtttcccaacgtaccatctggcctgtgtagtcgacgaccatcatatggggataagtcacgtgttgagaggctctgagtggctggtgtccacagccaaacatcttcttttgtatcaagccctggggtggcagcccccacattttgcccatctccctctgttactgaacagggacggcagtaagctcagcaaacggcagggagacgtcttcctggaacatttcgcagcggatgggtttctgcccgactcactacttgacataattacaaattgcggatcgggctttgcagagaatcaaatgggccgtacacttccagagctgattacacagttcaacctaacgcaggtgacctgccacagcgctctgctcgatctggaaaagctgccagagttcaatcggctgcacctgcagcggctggtttccaacgaatcccaaaggcgtcagctggtagggaagctccaagtgctggtggaggaagcctttgggtgccaactgcaaaatcgggatgtgctgaatccagtctacgtcgagcggattctgctgctccgacaggggcatatctgccgactccaggatttggtgtcccccgtctactcttacctgtggacccgccctgctgttggtcgtgcgcaactggatgctatcagtgagaaggttgatgtcatcgccaaacgtgtgctggggctgctggagcgttcctctatgtcgctcactcaggatatgctgaacggtgagctgaaaaagttgtccgaaggtctggagggcaccaaatattctaatgttatgaagttgctccggatggccctatcaggacagcagcagggtcccccagtcgcagagatgatgctggccttagggcctaaggaagtgcgcgaacgtattcagaaggtcgtgtcttcttag

SEQ ID NO: 37706 - DNA, 1572 bp, Artificial Sequence
  derived and/or modified sequence
atggccgcactgcttagacgacttttgcaacgtgaaagaccaagtgccgctagcggcagacccgtcggacgccgtgaggctaacctgggaactgacgccggtgtggccgtgagggttaggtttgcaccgtcgcctactggattcctgcacttgggaggtttgcggaccgcactgtacaactacatttttgccaagaagtatcaggggagttttatcttgcggctggaggataccgatcagaccagagtggtccccggtgctgccgagaacatagaagacatgcttgagtgggctggaatcccacctgatgaatctccacgacgcggaggacctgcagggccataccaacaaagtcaacgactggagctttatgcgcaggccaccgaggccctgctgaaaacaggagccgcttacccttgcttttgcagtcctcagcggctcgaactcctgaagaaggaggcccttaggaatcaccagacaccgagatatgacaaccgttgccgcaacatgtctcaggaacaggtggcacagaaactcgcaaaagatcctaagcccgctattcggtttagactcgaacaggttgtgcccgctttccaggacctggtgtatgggtggaaccgccacgaggtggcttctgtggagggagaccctgtgattatgaaatcagacggcttcccgacatatcatctggcctgtgttgttgatgatcatcacatgggaattagccacgtacttcggggaagcgaatggttagtctctactgctaagcacctgctactttaccaagcattgggttggcagccgccacactttgcccatctgcctctgctgcttaaccgggatggtagcaaattatcaaagcgacagggagacgtttttcttgaacattttgccgcagacggttttctcccagacagcttgcttgatattattacaaactgcggctctgggttcgcagagaatcaaatggggcgtacacttccagagctgattactcagttcaatttaacccaggtgacatgtcattcagccctgctggacctagagaaactgcctgagttcaatcggctacacttacaacgcttggtatctaatgaaagccagcgaaggcagctcgtaggaaaacttcaggtcctcgtggaagaggctttcggctgccagttacagaacagagacgtgttaaaccccgtgtatgtggagagaatcctcctgctcagacagggccatatatgtaggttgcaagatctggtttcaccagtgtacagttatctgtggactagacccgctgtggggagggcccagctcgatgctatctctgagaaagtcgatgtaattgcaaagcgggtactcgggctattagagaggagcagtatgagcctcacgcaggacatgctgaacggggagcttaagaagttgtcagaaggccttgaaggcacaaagtactctaacgtaatgaaactcctgagaatggcgctgtccggccagcagcagggccctccagtcgctgagatgatgctcgcgctggggcctaaagaggtgagggagaggattcaaaaggtggtgagctcctag

SEQ ID NO: 37707 - DNA, 1572 bp, Artificial Sequence
  derived and/or modified sequence
atggccgccctgctgagaagactgctgcagagagagagacccagcgccgccagcggcagacccgtgggcagaagagaggccaacctgggcaccgacgccggcgtggccgtgagagtgagattcgcccccagccccaccggcttcctgcacctgggcggcctgagaaccgccctgtacaactacatcttcgccaagaagtaccagggcagcttcatcctgagactggaggacaccgaccagaccagagtggtgcccggcgccgccgagaacatcgaggacatgctggagtgggccggcatcccccccgacgagagccccagaagaggcggccccgccggcccctaccagcagagccagagactggagctgtacgcccaggccaccgaggccctgctgaagaccggcgccgcctacccctgcttctgcagcccccagagactggagctgctgaagaaggaggccctgagaaaccaccagacccccagatacgacaacagatgcagaaacatgagccaggagcaggtggcccagaagctggccaaggaccccaagcccgccatcagattcagactggagcaggtggtgcccgccttccaggacctggtgtacggctggaacagacacgaggtggccagcgtggagggcgaccccgtgatcatgaagagcgacggcttccccacctaccacctggcctgcgtggtggacgaccaccacatgggcatcagccacgtgctgagaggcagcgagtggctggtgagcaccgccaagcacctgctgctgtaccaggccctgggctggcagcccccccacttcgcccacctgcccctgctgctgaacagagacggcagcaagctgagcaagagacagggcgacgtgttcctggagcacttcgccgccgacggcttcctgcccgacagcctgctggacatcatcaccaactgcggcagcggcttcgccgagaaccagatgggcagaaccctgcccgagctgatcacccagttcaacctgacccaggtgacctgccacagcgccctgctggacctggagaagctgcccgagttcaacagactgcacctgcagagactggtgagcaacgagagccagagaagacagctggtgggcaagctgcaggtgctggtggaggaggccttcggctgccagctgcagaacagagacgtgctgaaccccgtgtacgtggagagaatcctgctgctgagacagggccacatctgcagactgcaggacctggtgagccccgtgtacagctacctgtggaccagacccgccgtgggcagagcccagctggacgccatcagcgagaaggtggacgtgatcgccaagagagtgctgggcctgctggagagaagcagcatgagcctgacccaggacatgctgaacggcgagctgaagaagctgagcgagggcctggagggcaccaagtacagcaacgtgatgaagctgctgagaatggccctgagcggccagcagcagggcccccccgtggccgagatgatgctggccctgggccccaaggaggtgagagagagaatccagaaggtggtgagcagctag

SEQ ID NO: 37708 - protein, 1314 aa, Artificial Sequence
  derived and/or modified sequence
MKHLYGLFHYNPMMLGLESLPDPTDTWEIIETIGKGTYGKVYKVTNKRDGSLAAVKILDPVSDMDEEIEAEYNILQFLPNHPNVVKFYGMFYKADHCVGGQLWLVLELCNGGSVTELVKGLLRCGQRLDEAMISYILYGALLGLQHLHNNRIIHRDVKGNNILLTTEGGVKLVDFGVSAQLTSTRLRRNTSVGTPFWMAPEVIACEQQYDSSYDARCDVWSLGITAIELGDGDPPLFDMHPVKTLFKIPRNPPPTLLHPEKWCEEFNHFISQCLIKDFERRPSVTHLLDHPFIKGVHGKVLFLQKQLAKVLQDQKHQNPVAKTRHERMHTRRPYHVEDAEKYCLEDDLVNLEVLDEDTIIHQLQKRYADLLIYTYVGDILIALNPFQNLSIYSPQFSRLYHGVKRASNPPHIFASADAAYQCMVTLSKDQCIVISGESGSGKTESAHLIVQHLTFLGKANNQTLREKILQVNSLVEAFGNSCTAINDNSSRFGKYLEMMFTPTGVVMGARISEYLLEKSRVIKQAAREKNFHIFYYIYAGLHHQKKLSDFRLPEEKPPRYIADETGRVMHDITSKESYRRQFEAIQHCFRIIGFTDKEVHSVYRILAGILNIGNIEFAAISSQHQTDKSEVPNAEALQNAASVLCISPEELQEALTSHCVVTRGETIIRANTVDRAADVRDAMSKALYGRLFSWIVNRINTLLQPDENICSAGGGMNVGILDIFGFENFQRNSFEQLCINIANEQIQYYFNQHVFALEQMEYQNEGIDAVPVEYEDNRPLLDMFLQKPLGLLALLDEESRFPQATDQTLVDKFEDNLRCKYFWRPKGVELCFGIQHYAGKVLYDASGVLEKNRDTLPADVVVVLRTSENKLLQQLFSIPLTKTGNLAQTRARITVASSSLPPHFSAGKAKVDTLEVIRHPEETTNMKRQTVASYFRYSLMDLLSKMVVGQPHFVRCIKPNDDREALQFSRERVLAQLRSTGILETVSIRRQGYSHRILFEEFVKRYYYLAFTAHQTPLASKESCVAILEKSRLDHWVLGKTKVFLKYYHVEQLNLLLREVIGRVVVLQAYTKGWLGARRYKRVREKREKGAIAIQSGDTSNQSSGPHSPVAAGTRGSAEVQDCSEPGDHKVLRGSVHRRSHSQAESNNGRTQTSSNSPAVTEKNGHSQAQSSPKGCDIFAGHANKHSVSGTDLLSSRICHPAPDQQGLSLWGAPQKPGSENGLAQKHRTPRRRCQQPKMLSSPEDTMYYNQLNGTLEYQGSKRKPRKLGQIKVLDGEDEYYKSLSPVDCIPEENNSAHPSFFSSSSKGDSFAQH

SEQ ID NO: 37709 - DNA, 3945 bp, Artificial Sequence
  derived and/or modified sequence
atgaagcatctctacggtctatttcattacaatccgatgatgctggggcttgagtccttgcccgatcccaccgacacttgggagattatcgaaactatcgggaaagggacttatggcaaggtctataaggtgaccaacaagagggacgggagcctcgctgccgtgaaaatcctggaccctgtctctgatatggatgaggaaattgaggctgaatacaatatcttacaatttctgccaaaccaccctaacgtagtcaaattctatggaatgttttacaaagcagatcactgcgtcgggggacagttatggctggtactggagctgtgtaacggtggttctgtgacagagctcgtgaaaggcctgctccgctgcgggcagcgcctggacgaggccatgatcagctatattttgtacggcgctcttctcggattacagcatttgcacaacaacagaattatccaccgggacgtcaagggaaacaacattctgctgacaacagagggaggagtcaagctggtggatttcggagtgtctgcacagttgacatcaacacggctgaggcgaaatacatcagtgggtaccccattctggatggccccggaggtgattgcatgtgaacagcagtacgacagttcatacgatgcccggtgcgatgtatggagtctgggaattactgccattgagctcggagacggcgacccacccttattcgacatgcatccagtgaagactttgttcaagattccccggaaccctcctcctacactcctgcaccctgaaaaatggtgcgaggaatttaaccattttattagtcagtgtttgatcaaggattttgaacgacgaccatccgtcacccacctccttgaccatccttttatcaaaggcgtacatggtaaggtactgttcctgcaaaagcagcttgcgaaggtgcttcaagaccagaagcatcagaacccggtggcaaagaccaggcatgaacggatgcacaccagaaggccataccacgtggaagatgccgaaaagtactgcttagaggacgatctggtaaatttggaggtgttagatgaggacaccatcatacatcagttacagaagcgttacgcagacctgctaatttacacctacgtgggagacatcctgatagccctgaaccccttccagaacctctcaatctattcccctcaattcagcaggctgtaccatggggtgaagagggcctccaatcccccacacatattcgcgagtgcagatgccgcctaccagtgcatggttacgctctctaaggaccagtgtatcgttatctccggcgagtcaggttcagggaagaccgaatctgcgcatctaatcgttcagcacctcacctttctcggcaaagctaataaccagactctacgagagaagattctccaggttaactcgctcgtggaggccttcggcaactcctgtacagcaattaacgataactcttcccggtttggcaagtacctggaaatgatgttcactccaaccggcgtcgtcatgggagcacgaatcagcgaataccttctggagaagtccagggttataaagcaagctgcccgggaaaagaacttccacatcttctactacatttatgcaggcttgcatcaccagaagaaattgagcgactttcgtctgccggaggaaaagccgccacgttacattgccgacgaaaccggcagggtaatgcacgacatcacatccaaagaatcctatcggcgtcagttcgaggcaattcaacactgctttagaattatcggatttaccgacaaggaggtgcactcggtttatcgaatcctcgctggaatattaaacatagggaacattgaatttgccgccatctcaagccagcaccagacggacaagtccgaggtcccaaacgccgaggcccttcaaaacgctgcctcagtgctgtgtatctcgccggaggaactgcaggaggccctgactagtcattgtgtagtgactcggggggaaacaattattagagccaacacggtcgatagggctgcagacgtacgcgacgctatgagcaaagccctgtatgggcggctgttctcctggatcgtcaatcgtatcaataccctgttgcaaccagatgagaatatctgcagtgccggtggtggcatgaatgtgggcatcctcgacatctttgggttcgaaaactttcagaggaacagctttgagcagctgtgtatcaacatagcaaatgagcagatccagtattattttaatcagcacgtttttgcactggaacagatggagtatcagaacgaaggaattgacgcagtgcctgtcgaatatgaggacaaccgacctttgttggacatgttcttgcagaaaccacttggactgctggcattactagacgaggagagtcgcttcccacaggccaccgaccaaaccctggtggataaatttgaggataacttaagatgtaagtatttttggcgccccaaaggcgtggaactgtgcttcggaatccagcattatgcagggaaggttctgtacgatgccagcggcgttctcgagaaaaatcgggatacactgcccgcagacgtggtggtggtcttgagaacctccgagaataaactgctccagcagctgttctcaatccctcttaccaagacaggaaacctggcccagacccgtgcacgcatcacagttgcttcaagcagcctccccccccacttcagcgcagggaaagccaaggtggataccctcgaggtgattagacatccagaggaaacaaccaatatgaagagacaaacagtagctagttacttcaggtactctctcatggacctgctctcaaagatggtggttggacaacctcactttgtccgatgcatcaagcctaatgacgatcgggaggcgcttcaattttcaagagaacgggtgctggcacaattacgcagtacaggaatcttagagacagtgagtatccgacggcagggttactcccaccggatcctgtttgaagaattcgtcaaaagatactattatctggcgtttacagctcatcaaactccactcgccagcaaggagtcctgcgtggccattctagagaagtcaaggttggaccactgggtcctcggcaagacaaaggtgtttctgaaatattatcatgtggagcagctcaatctgctgttgcgtgaagtcataggccgggttgttgtgctgcaggcctacaccaaaggctggcttggagcacggcgctacaaacgggttcgcgagaaaagagagaagggtgccattgctatccagtctggcgataccagcaaccagtcaagcggacctcattcgcctgtggctgctggcacaagagggagcgctgaagtgcaggattgctccgagcctggagatcacaaagtgcttcggggatctgtgcaccggcggtcccacagccaggcggaaagcaataacggaagaacccagacctccagcaattcgccagccgtgactgagaaaaacgggcactcacaggcgcagagctctcccaaggggtgcgacattttcgccggacatgcaaataagcatagtgtatctggcaccgatctgctgtcctcgcggatttgccacccagcacctgatcagcagggtctaagtctgtggggggctccccaaaagcccggctccgagaatgggctggcccagaaacaccggacccccaggaggaggtgtcagcagcctaagatgctgagctcacccgaggatacgatgtactacaatcaacttaacggcaccctggagtatcagggtagtaagagaaaaccgagaaaactgggacagataaaagtattagacggtgaggatgaatactataagtccctgagccccgtggactgcataccggaggagaacaactcagcgcatccttccttcttctcatccagttccaagggcgatagctttgcacagcactag

SEQ ID NO: 37710 - DNA, 3945 bp, Artificial Sequence
  derived and/or modified sequence
atgaagcacctgtatggcctcttccactacaaccccatgatgctgggcctggagagcctgcctgaccccacagacacctgggagatcatcgagaccatcggcaagggcacctacggcaaggtgtacaaggtgaccaacaagagagatggcagcctggccgctgtgaagatcctggaccctgtgtctgacatggatgaggagattgaggccgagtacaacatcctgcagttcctgcccaaccaccccaacgtggtgaagttctacggcatgttctacaaggctgaccactgtgtgggcggccagctgtggctggtgctggagctgtgcaatggaggctctgtgacagagctggtgaagggcctgctgcgctgtggccagaggctggatgaggccatgatctcctacatcctgtatggagccctgctgggcctgcagcacctgcacaacaaccgcatcatccacagagatgtgaagggcaacaacatcctgctgaccacagagggcggcgtgaagctggtggactttggagtgtctgcccagctgaccagcacccggctgcggaggaacacctctgtgggcacccccttctggatggcccctgaggtgattgcctgtgagcagcagtatgacagcagctatgatgcccgctgtgatgtgtggagcctgggcatcacagccatcgagctgggagatggagacccccccctgtttgacatgcaccctgtgaagaccctcttcaagatccccaggaaccccccacccaccctgctgcaccctgagaagtggtgtgaggagttcaaccacttcatcagccagtgcctgatcaaggactttgagcggcggcccagcgtgacccacctgctggaccaccccttcatcaagggcgtgcacggcaaggtgctcttcctgcagaagcagctggccaaggtgctgcaggaccagaagcaccagaaccctgtggccaagaccaggcatgagaggatgcacacccggcggccctaccacgtggaggatgctgagaagtactgcctggaggatgacctggtgaacctggaggtgctggatgaggacaccatcatccaccagctgcagaagagatatgctgacctgctgatctacacctacgtgggggacatcctgattgccctgaaccccttccagaacctgagcatctacagcccccagttcagccggctgtaccatggagtgaagagggccagcaaccccccccacatctttgccagcgcagatgctgcctaccagtgcatggtgaccctgagcaaggaccagtgcatcgtcatctctggagagagcggcagcggcaagacagaaagtgcccacctgattgtgcagcacctgaccttcctgggcaaggccaacaaccagaccctgcgggagaagatcctgcaggtgaacagcctggtggaggccttcggcaacagctgcacagccatcaatgacaacagcagcagatttgggaagtacctggagatgatgttcacccccactggagtggtgatgggcgcccgcatcagcgagtacctgctggagaagagcagggtcatcaagcaggccgcccgggagaagaacttccacatcttctactacatctatgccggcctgcaccaccagaagaagctgagtgacttccggctgcctgaggagaagcccccacgctacatcgcagatgaaacaggccgggtgatgcatgacatcaccagcaaggagagctaccgccggcagtttgaggccatccagcactgcttccgcatcatcggcttcacagacaaggaggtgcacagcgtgtaccgcatcctggccggcatcctgaacatcggcaacattgaatttgctgccatcagcagccagcaccagacagacaagtctgaggtgcccaatgctgaggccctgcagaatgctgcctctgtgctgtgcatcagccctgaggagctgcaggaggccctgaccagccactgtgtggtgaccagaggagagaccatcatccgggccaacacagtggacagagctgctgatgtgagagatgccatgagcaaggccctgtatggccgcctcttctcctggatcgtgaaccgcatcaacaccctgctgcagccagatgagaacatctgcagcgctgggggcggcatgaatgtgggcatcctggacatcttcggctttgagaacttccagagaaattcctttgagcagctgtgcatcaacatcgccaatgagcagatccagtactacttcaaccagcacgtgtttgccctggagcagatggagtaccagaatgaaggaattgatgctgtgcctgtggagtatgaggacaaccggcccctgctggacatgttcctgcagaagcccctgggcctgctggccctgctggatgaggagagccgcttcccccaggccacagaccagaccctggtggacaagtttgaggacaacctgcgctgcaagtacttctggaggcccaagggcgtggagctgtgcttcggcatccagcactacgccggcaaggtgctgtatgatgccagcggcgtgctggagaagaacagagacaccctgcctgcagatgtggtggtggtgctgcggaccagcgagaacaagctgctgcagcagctgttcagcatccccctgaccaagacaggcaacctggcccagacccgggcccgcatcaccgtggccagcagcagcctgcccccccacttctctgctgggaaggccaaggtggacaccctggaggtgatccgccaccctgaggagaccaccaacatgaagaggcagacagtggccagctacttccgctacagcctgatggacctgctgagcaagatggtggtgggccagccccactttgtgcgctgcatcaagcccaatgatgaccgggaggccctgcagttcagccgggagcgggtgctggcccagctgcggagcacaggcatcctggagaccgtgtccatccggcggcagggctacagccaccgcatcctgtttgaggagtttgtgaagcgctactactacctggccttcaccgcccaccagacccccctggccagcaaggagagctgtgtggccatcctggagaagagccggctggaccactgggtgctgggcaagaccaaggtgttcctgaagtactaccacgtggagcagctgaacctgctgctgcgggaggtgattggccgggtggtggtgctgcaggcctacaccaagggctggctgggcgcccggcgctacaagagggtgcgggagaagcgggagaagggggccatcgccatccagagcggggacaccagcaaccagagcagcggcccccacagccctgtggccgccggcacccggggcagcgctgaggtgcaggactgcagcgagcccggggaccacaaggtgctgcggggctctgtgcaccggcgcagccacagccaggccgagagcaacaacggccgcacccagaccagcagcaacagccctgctgtgacagagaagaatggccacagccaggcccagagcagccccaagggctgtgacatctttgctggccacgccaacaagcacagcgtgtctggaacagacctgctgagcagccgcatctgccacccagccccagaccagcagggcctgagcctgtggggcgccccccagaagccaggctctgaaaatggcctggcccagaagcacaggaccccaagaagacgctgccagcagcccaagatgctgagcagccctgaggacaccatgtactacaaccagctgaatggcaccctggagtaccagggcagcaagaggaagcccaggaagctgggccagatcaaggtgctggatggagaagatgagtactacaagagcctgagccctgtggactgcatccctgaggagaacaacagcgcccaccccagcttcttcagcagcagcagcaaaggagacagctttgcccagcactag

SEQ ID NO: 37711 - DNA, 5448 bp, Artificial Sequence
  derived and/or modified sequence
ctagatcgaaagtcctttggtaatgatgtgtcatacattctagtcatcaaagacaccattttctgggcctgaagtgttctgctggtttttggaggaatgagaatccaatctctcataagccggattcagaaaataggtcatcgatgaaacatctgtatggattatttcactataatcctatgatgcttggacttgaatcacttccagatcccacagacacctgggaaattatagagaccattggtaaaggcacctatggcaaagtctacaaggtaactaacaagagagatgggagcctggctgcagtgaaaattctggatccagtcagtgatatggatgaagaaattgaggcagaatacaacattttgcagttccttcctaatcatcccaatgttgtaaagttttatgggatgttttacaaagcggatcactgtgtagggggacagctgtggctggtcctggagctgtgtaatgggggctcagtcactgagcttgtcaaaggtctactcagatgtggccagcggttggatgaagcaatgatctcatacatcttgtacggggccctcttgggccttcagcatttgcacaacaaccgaatcatccaccgtgatgtgaaggggaataacattcttctgacaacagaaggaggagttaagctcgttgactttggtgtttcagctcaactcaccagtacacgtctgcggagaaacacatctgttggcaccccgttctggatggcccctgaggtcattgcctgtgagcagcagtatgactcttcctatgacgctcgctgtgacgtctggtccttggggatcacagctattgaactgggggatggagaccctcccctctttgacatgcatcctgtgaaaacactctttaagattccaagaaatcctccacctactttacttcatccagaaaaatggtgtgaagaattcaaccactttatttcacagtgtcttattaaggattttgaaaggcgaccttccgtcacacatctccttgaccacccatttattaaaggagtacatggaaaagttctgtttctgcaaaaacagctggccaaggttctccaagaccagaagcatcaaaatcctgttgctaaaaccaggcatgagaggatgcataccagaagaccttatcatgtggaagatgctgaaaaatactgccttgaggatgatttggtcaacctagaggttctggatgaggatacaattatccatcagttgcagaaacgttatgcagacttgctaatttacacatatgttggagacatcttaattgccttaaaccccttccagaatctaagcatatactctccacagttttccagactttatcatggggtgaaacgcgcctccaatcccccccacatatttgcatcagcagatgctgcttaccagtgcatggttactctcagcaaagaccagtgcattgtcatcagcggagagagtggctctgggaagacagaaagcgcccacctgattgttcagcatttgactttcttgggaaaggccaataatcagaccttgagagagaaaattctacaagtcaactccctggtggaagcctttgggaactcatgcactgccatcaatgacaactcgagccgttttggaaaatatctggaaatgatgtttacaccaactggagttgtgatgggggcaagaatctctgaatatctcctggaaaaatccagagttataaaacaggcagcgagagagaaaaattttcatatattttactatatttatgctggtcttcatcaccaaaagaagctttctgatttcagacttcctgaggaaaaacctcctaggtacatagctgatgaaactggaagggtgatgcacgacataacttccaaggagtcttacagaagacaattcgaagcaattcagcattgcttcaggattatagggttcacggacaaagaggtgcactcagtgtacagaattttggctgggattttgaatattgggaacattgagttcgcagctatttcctctcaacatcagactgataaaagtgaggtgcccaatgctgaagctttgcaaaatgctgcctctgttctgtgcattagccctgaagagctccaggaggccctcacctcccactgtgtggtcacccggggcgagaccatcatccgtgccaacactgtagacagggctgcggacgttcgagacgccatgtccaaagccctgtatgggaggctcttcagctggattgtgaatcgcattaatacactcctgcagccagacgaaaacatatgtagtgcaggaggtggaatgaatgtggggatcttggatatctttggattcgagaattttcagagaaattcatttgagcagctctgcataaacatcgccaatgagcaaatccagtactatttcaatcagcatgtttttgctcttgagcagatggaatatcagaatgaaggcattgatgctgtacccgtggaatatgaggacaaccgcccgctcttggacatgttcctccagaaacccctgggactgcttgcacttttggatgaggaaagtcggtttccccaagcaactgaccagaccctggttgataaatttgaagataatctacgatgcaaatacttctggaggcccaaaggagtggaactgtgctttggcattcagcattatgctggaaaggtattatatgatgcttctggggttcttgagaaaaatagagacactctccctgccgatgtggttgtggtcctgagaacgtcagaaaacaagcttcttcagcagctcttctcaatccctctgaccaaaacaggtaatttggcccagacaagagctaggataacagtggcctcaagttctttgcctccacatttcagtgctgggaaagccaaggtggacactctggaggtgatacggcatccggaagaaaccaccaacatgaagaggcaaactgtggcttcttacttccggtattctctgatggacctgctctccaaaatggtggttggacagccccactttgtgcgctgcattaaacccaatgatgaccgagaggccctgcagttctctcgagagagggtgctggcccagctccgctccacagggattctggagacagtcagcatccgccgccagggctattcccaccgcatcctttttgaagaatttgtgaaaaggtattattacttggcattcacagcacatcaaacacctcttgctagcaaagagagctgtgtggctatcttggaaaagtccagattagatcactgggtactgggaaaaacaaaggtttttctcaaatattaccatgttgagcaattaaatttgctgcttcgagaagtcataggcagagtggttgtgctgcaggcatataccaaggggtggcttggagccaggagatacaaaagggtcagagagaagagagagaagggagccattgccatccagtcaggggacacttcaaaccaaagcagtgggccacattcccccgtcgcagcaggtacgaggggaagtgccgaggttcaagactgcagcgagcctggtgaccataaagttctcaggggctctgtacatcgtaggagccattcacaagcagaatccaacaatggccgtacacagacttcaagcaactctcctgctgtcacagagaaaaatgggcattcacaagcccagagttctccaaaagggtgcgatatcttcgcaggacatgcaaacaagcactcggtttctgggactgatttgctgtcttctcggatatgccatcctgctccagatcagcaaggattgagtctctggggagcccctcaaaagcctggttcagaaaatggtcttgcacagaagcatcgaacacctcgccgacgatgtcagcagcccaaaatgctgagtagccctgaggacaccatgtactataaccagttaaatggaactctagaatatcaagggagcaagaggaagccaagaaaacttggccaaatcaaagtacttgatggggaagatgaatattacaaatctctgtcaccagtggactgtatccctgaggagaacaactcagcccacccttcctttttttcttcatcctcaaaaggagactcttttgctcaacattaaattgtgcttcctaaccctaaatctgtccagagtaggaacattcatggtaatcgactgtctgtcattgcgtaagaaagcactgatatggggtcagcttctttggacatatggtccatgcctgaaccttactgaaccacttgcagattccaaaacatcttatcctatcctctaccactctcccacatgtgttgtgcagcctgagctgggcgctgccttcctttctcatcccatggggccctgtgggacactgagaacacctttacaatagtttaaacagtcattcatgcccccagtgtctaggaagataacagccagtctcaccccagtctaatcatggaccctgataatattgcttgatttttcctatcaagttacttttcaatccattcagaatctgccccagtggagacccaggagttcctttcctgcactcttctccatcctcccacctttgctgggcttttctatcactcccacctcccccagagtcagggctccattgctgagtgccccatcctggaggattggccccaagatctcctagaacaggataattgcctgtgtttaggcagataggcctaaatctttcagattctttctacaaggcaaataacccctctcttgttaattatgatgctgagaaagcctctgtctctttatttcaccttgccaagacacccacactactttggtgatgaaaagaaaggaatgagagggaaagtttggacctgtcactttggtgacagggaaagtccaggtcactttattctgtaactctccattcactggtcaaataactccatgaggctatcagtggctacagtggaaggacctgatcttgtccatctttgtgtgcacagagcctagcacagggcttggtagagggtatatctagtgaatggagaatacatggagaaacttaactaagttacacaagcatatctgacaggaatgttaccttcaattgtatgttacatatgattagtcacttttcatacactataacctctgatttttcactcaagtttgggctgattatattgtaatgatgttagataatactcaacatgattcagtatgacaaacttttttgagcacctactttatataaaacatgacaaattgcagtgtgatgtaatcaaaaacaaagaagccctataagaccatttctctagaacagatgttcttaatatttttcttactctaaaatatgtggtagatagtatgcaagaaaagccgggtgcggtggctcaggcctgtaatcccagcactttgggaggccaagatgggcggatcatgaagtcaggagttcgagaccagcctgaccaacatggtgaaaccccgtctctactaaaaaaaa

SEQ ID NO: 37712 - DNA, 3945 bp, Artificial Sequence
  derived and/or modified sequence
atgaagcacctgtacggcctgttccactacaaccccatgatgctgggcctggagtccctgcctgacccaactgatacttgggagatcatcgagacaataggtaaaggtacatatgggaaagtttacaaagtcacaaataaacgggacggtagcctggcagccgtcaagatcctggatccagtgtcagacatggatgaagagatcgaggcagagtacaatattcttcagttcctgcctaatcacccgaatgtggttaagttttacggtatgttttacaaagccgaccattgcgtcggaggccaactttggcttgtgttggagttgtgtaatggcggatcagtcaccgagctcgtcaagggactgctcaggtgcggccagaggctggacgaagcgatgatttcttatatcctgtacggagcacttctgggactgcaacacctccataacaatcgtataattcatagagacgtgaaggggaacaacatcctgctgactactgagggtggagtgaaactagtggacttcggggtttccgcgcagcttacatcaacacgcctgcggcgaaatacctcggttggcacacctttctggatggcccctgaagtgatcgcctgcgaacaacagtacgattcttcctacgatgcacgatgtgatgtttggtcattaggaattacggccattgagctaggggacggtgatccccctctgttcgatatgcatcccgtaaagacgttgtttaaaatcccccgtaacccaccccccactcttctgcatcccgagaagtggtgcgaggaattcaatcacttcatttcccagtgcctaatcaaggatttcgaaagacggccgtccgttacacacctccttgatcacccatttataaaaggtgtgcatggtaaagtattattcctgcagaagcaacttgccaaggtgttacaggaccaaaaacaccagaatcctgttgccaaaacaagacacgagaggatgcacacaagaaggccctaccacgtcgaagacgccgagaagtattgtctggaggatgatttagtgaatctcgaagttctagacgaagataccataattcaccaattgcaaaaaagatatgcagacttgctgatctatacttacgtcggtgatatcctcatcgcgttaaatccgttccaaaacctctctatttactcccctcaattttcacgcctgtatcatggcgtgaagcgcgctagcaaccccccacacatcttcgcctcagccgacgctgcataccagtgtatggtcacgctctcgaaggaccagtgcattgttattagcggggaaagtgggtccgggaagacggagagtgcccaccttatcgtgcagcacctgaccttcctgggtaaagcaaataatcagaccctgcgagaaaagattctccaggtaaactctctggttgaagccttcggaaatagctgcactgcaattaatgataacagtagcagattcggcaagtacctggagatgatgttcactccgacgggcgtggttatgggggccaggatctctgaatatctgctcgaaaaatctcgagtgatcaagcaagctgcaagagagaagaactttcatattttttattatatctacgcgggcctgcaccatcaaaagaaactgtctgactttcgtctacctgaggaaaagcccccaaggtacatcgcagacgagacgggcagggtgatgcacgatattacttccaaggagtcataccgacggcagtttgaagcaatccagcattgtttcaggattattggatttacagacaaagaggtacactctgtgtaccgtatcctggcagggattcttaatataggtaacattgaatttgcagcgatcagttctcaacaccaaacggataagtctgaggtacctaacgctgaagcactacagaacgccgccagcgtcctctgtattagccctgaagaactgcaagaggctctgacttcccactgtgtggtcacgcgcggagagaccattatccgcgccaacaccgtggaccgagcagctgatgtaagagacgccatgtcaaaggcactgtatggaaggctgttctcatggatcgtaaatagaattaacactttgctgcaaccagatgaaaatatttgttcagccggaggcgggatgaacgtcgggatcctcgacatctttgggttcgaaaatttccagagaaacagttttgagcaattatgcattaatatcgccaatgaacagattcaatattattttaatcagcacgttttcgctttggagcaaatggagtatcagaatgaggggatcgacgccgtgccagtggagtatgaggataatcggccgctactggacatgtttcttcagaaaccattaggcctcctggccctgcttgacgaagagagccggtttccgcaggccaccgaccaaacactggttgacaaatttgaggacaacctgagatgtaaatatttttggaggcccaaaggggtagaattatgctttggtatccagcactacgccggcaaggtgttatatgacgcaagcggtgtgttagagaagaatcgagacactttacccgctgacgtagtagtcgtcttgcgtaccagcgaaaacaagttactccagcaacttttcagtatacctcttacaaagactgggaatctggcccagaccagggccaggatcacagtcgctagctcttccctgcctccacatttcagcgcaggaaaggctaaggttgatacattggaggtcatacgccaccccgaagaaaccacaaacatgaagcggcagacagtggcgagctatttcaggtacagtctcatggatcttctgagcaaaatggtggtcgggcagccgcactttgtccgctgtattaaaccaaatgatgatagggaggcgctgcagttcagtcgggagcgcgtattggcccagttgcggagtaccgggattctcgaaaccgtctctattcgaaggcagggctatagccacaggatcttattcgaggaattcgtgaaaagatattattatctggcatttacggcccaccagactcccctcgccagtaaggagtcttgtgtggccatccttgagaagtcccgattggaccattgggtgctggggaagaccaaagtctttcttaaatattaccacgtcgagcaactgaatctcctgttgagggaagttatagggagggtggtggtgctgcaggcttacacaaaagggtggctaggggcaaggcgatataagcgggtgagggaaaagcgagagaaaggggcaattgcaattcaaagtggcgacacatcaaaccagagctctggtccacattcccctgtggcagctggcactaggggctccgcagaggtccaggactgcagtgagccaggtgaccacaaggtgctcagggggtctgttcacagaagatcccactcacaggctgaaagcaataatggaaggacccagaccagctctaactctcctgccgtgactgaaaagaacgggcacagccaagctcagtctagccccaagggatgcgacattttcgccgggcacgccaataagcacagcgtatccggtacagatctgctgagctctcgaatctgccatccggccccagaccagcaaggtctgagcttatggggcgcccctcaaaagcccggctccgagaacggcctcgcacaaaaacaccggacacctagaaggcgctgtcagcagcccaagatgcttagtagcccagaggatactatgtattacaatcagttgaacggcaccctagagtaccagggaagcaagcgcaaaccaagaaagctcggccagattaaggttctggatggcgaggacgagtactataagagcctcagcccagtggactgtattcctgaggaaaataatagcgctcacccctcctttttctccagttcatctaagggggacagcttcgcccagcattag

SEQ ID NO: 37713 - DNA, 3945 bp, Artificial Sequence
  derived and/or modified sequence
atgaagcacctgtacggtttgttccactacaacccaatgatgttaggactcgagtccctgccagacccaaccgacacctgggaaattatagagaccatagggaaggggacctacgggaaggtttacaaggtgactaataagagggacggctccctggcagccgtgaaaattctggatcccgtctccgacatggacgaggagatcgaggctgagtacaatatcctccagttcttgcccaatcaccccaacgtggtgaaattctacggaatgttctacaaagcagatcactgtgtcggcggacagctttggctagttctggaactgtgtaatggcggatcagtgactgaactggtgaagggcctgctgcggtgcgggcagcggttagacgaagcgatgatcagctacatcctgtatggggcactgctggggctccaacacctccacaataaccgtataatacacagggacgtaaagggaaataacattttgcttaccactgaaggaggcgttaagctggttgacttcggtgtctctgcccaactcacatccactcgacttaggagaaatacaagcgtgggaacacccttttggatggcccctgaggtaattgcctgcgaacagcagtatgactcctcgtacgatgctaggtgtgatgtttggtccttggggataacagcaatagaactgggcgacggagacccgcctctgttcgacatgcacccggtcaagaccctgttcaaaatcccaagaaaccctccgcctacacttttgcacccagagaaatggtgtgaagaattcaaccatttcattagccagtgcctgataaaagattttgagagacgcccttctgtaacgcacctgctggaccatccgtttataaaaggggtccacggcaaagttctctttcttcaaaaacaactggctaaggtgctgcaggaccagaaacatcaaaacccagtggcaaaaacccgccacgagaggatgcataccagacgcccttaccatgtagaggacgccgagaagtattgcttggaggacgacctagtgaacttagaggttctcgacgaagataccatcattcatcagctccagaaacgctatgccgacctcctgatctacacgtatgtgggcgacatccttattgcactcaatccattccagaatctgtccatctactctccgcagttcagccgcttataccatggggtaaagagggcatccaacccaccccacatcttcgcatccgctgatgctgcataccaatgcatggtcacgctctctaaagaccagtgtatcgtgatcagcggcgagtccggatccggaaaaactgagagcgcacatttaattgtccagcatcttactttccttgggaaagctaacaatcagacattgcgggaaaaaatcttgcaggtcaacagccttgtcgaagctttcggcaattcttgcacagctatcaatgacaacagttcacggttcggaaagtacttggagatgatgttcacacctaccggagtggtgatgggcgctcgcattagcgagtatttactggagaagtcccgcgttattaagcaggcagcgagagagaagaattttcacatattctactacatctatgccggacttcaccatcaaaaaaagctgtcggatttccggcttccagaggagaaaccccctcggtatatcgccgacgagaccggtagggttatgcatgacattaccagcaaagaaagttaccgacggcagttcgaagccatccagcattgctttcgtattatcggattcactgacaaggaagtacactccgtttaccggatcttagcaggaattctcaatataggtaacatcgagtttgccgctatcagcagccagcaccagactgacaaatctgaagtgccaaatgctgaggcactgcagaatgcagcctccgtactctgtatctctccagaggagctgcaggaagccctgacttctcactgcgtggtgacaagaggagaaacaatcatccgggcaaataccgtggacagagctgctgacgtaagggacgccatgagtaaggcgctgtatggaagactcttctcctggatcgtaaatcgaataaacaccctgctccagcctgacgaaaatatttgctccgcaggaggcggaatgaatgtgggcattctcgatattttcgggtttgagaatttccaaagaaattcatttgaacagttgtgcatcaatatcgccaacgagcaaatccagtattattttaaccagcatgtttttgccttggagcagatggagtaccagaatgaggggattgacgctgttccagtggagtacgaggacaacagacctctgttagacatgtttcttcagaagccactgggtttattagcgctgctcgacgaggagtcacggttcccgcaagccaccgatcagacgctggtcgacaaatttgaagacaacctgcggtgcaaatatttttggagaccaaagggggtggaactatgtttcggcattcagcattacgccggaaaggtcctctacgacgccagcggtgttctggagaagaatcgtgacacgctgcctgccgatgtcgtcgtggttctacgcactagcgaaaataagctgctccagcagctgttttcaataccactgactaagactggcaacttagcccagacacgagcacgaatcaccgtcgccagcagtagcttacctccacatttcagcgcaggaaaagccaaagtcgacaccttggaggtgattcggcaccctgaggagactaccaatatgaagcggcagacagttgcatcctacttccgatattctttaatggacctcctttcaaagatggttgttggccagcctcattttgtccgttgtattaagccaaatgacgatcgagaggccctgcaatttagtagggagcgcgttttagctcagctgcggagcactgggatcctggagaccgtgagcattaggcgccaggggtactcacaccgtattctattcgaggagtttgtaaagcggtactattacttggcctttaccgcgcaccagaccccgcttgcgtccaaagagtcttgcgtggctatcctagagaagtccaggctcgatcattgggttctaggcaagaccaaggtattcctgaaatactaccatgtcgaacagcttaacctgttgctgcgtgaggttattggacgggtagtggttctccaggcctacaccaagggctggttgggcgctcggagatataaaagagttcgggagaagagggagaagggggctatcgccatccaatcaggggacactagcaaccagtccagcggacctcatagtccggtcgctgctggaacccgcggaagcgctgaagttcaggactgttcagagcccggagatcacaaagttttgagagggagtgtgcatcgaagaagtcactcccaggccgagtcgaacaacggacgcacccagacatcttctaattctccagccgtcaccgagaaaaatggccatagccaggctcagtcaagccccaagggttgtgatatcttcgcaggccacgctaacaaacactcagtgtctggcacggatttgctgagttcaagaatctgtcaccctgccccagaccagcagggcttgagcctttggggtgctcctcagaagccgggaagtgagaacgggctggcacagaaacatcggacccctcgccgacgctgccagcagcctaagatgcttagttcccctgaagataccatgtattataaccagctgaacggtaccctggaatatcaaggttctaagagaaaacccagaaaactgggccagataaaagtcctggatggcgaagatgaatattataagtcgttatcccccgtagactgcattcctgaggagaataattcggcccaccctagcttcttctcaagttcatctaagggagattcattcgctcagcactag

SEQ ID NO: 37714 - DNA, 3945 bp, Artificial Sequence
  derived and/or modified sequence
atgaagcacctgtacggcctgttccactacaaccccatgatgctgggcctggagagcctgcccgaccccaccgacacctgggagatcatcgagaccatcggcaagggcacctacggcaaggtgtacaaggtgaccaacaagagagacggcagcctggccgccgtgaagatcctggaccccgtgagcgacatggacgaggagatcgaggccgagtacaacatcctgcagttcctgcccaaccaccccaacgtggtgaagttctacggcatgttctacaaggccgaccactgcgtgggcggccagctgtggctggtgctggagctgtgcaacggcggcagcgtgaccgagctggtgaagggcctgctgagatgcggccagagactggacgaggccatgatcagctacatcctgtacggcgccctgctgggcctgcagcacctgcacaacaacagaatcatccacagagacgtgaagggcaacaacatcctgctgaccaccgagggcggcgtgaagctggtggacttcggcgtgagcgcccagctgaccagcaccagactgagaagaaacaccagcgtgggcacccccttctggatggcccccgaggtgatcgcctgcgagcagcagtacgacagcagctacgacgccagatgcgacgtgtggagcctgggcatcaccgccatcgagctgggcgacggcgacccccccctgttcgacatgcaccccgtgaagaccctgttcaagatccccagaaaccccccccccaccctgctgcaccccgagaagtggtgcgaggagttcaaccacttcatcagccagtgcctgatcaaggacttcgagagaagacccagcgtgacccacctgctggaccaccccttcatcaagggcgtgcacggcaaggtgctgttcctgcagaagcagctggccaaggtgctgcaggaccagaagcaccagaaccccgtggccaagaccagacacgagagaatgcacaccagaagaccctaccacgtggaggacgccgagaagtactgcctggaggacgacctggtgaacctggaggtgctggacgaggacaccatcatccaccagctgcagaagagatacgccgacctgctgatctacacctacgtgggcgacatcctgatcgccctgaaccccttccagaacctgagcatctacagcccccagttcagcagactgtaccacggcgtgaagagagccagcaaccccccccacatcttcgccagcgccgacgccgcctaccagtgcatggtgaccctgagcaaggaccagtgcatcgtgatcagcggcgagagcggcagcggcaagaccgagagcgcccacctgatcgtgcagcacctgaccttcctgggcaaggccaacaaccagaccctgagagagaagatcctgcaggtgaacagcctggtggaggccttcggcaacagctgcaccgccatcaacgacaacagcagcagattcggcaagtacctggagatgatgttcacccccaccggcgtggtgatgggcgccagaatcagcgagtacctgctggagaagagcagagtgatcaagcaggccgccagagagaagaacttccacatcttctactacatctacgccggcctgcaccaccagaagaagctgagcgacttcagactgcccgaggagaagccccccagatacatcgccgacgagaccggcagagtgatgcacgacatcaccagcaaggagagctacagaagacagttcgaggccatccagcactgcttcagaatcatcggcttcaccgacaaggaggtgcacagcgtgtacagaatcctggccggcatcctgaacatcggcaacatcgagttcgccgccatcagcagccagcaccagaccgacaagagcgaggtgcccaacgccgaggccctgcagaacgccgccagcgtgctgtgcatcagccccgaggagctgcaggaggccctgaccagccactgcgtggtgaccagaggcgagaccatcatcagagccaacaccgtggacagagccgccgacgtgagagacgccatgagcaaggccctgtacggcagactgttcagctggatcgtgaacagaatcaacaccctgctgcagcccgacgagaacatctgcagcgccggcggcggcatgaacgtgggcatcctggacatcttcggcttcgagaacttccagagaaacagcttcgagcagctgtgcatcaacatcgccaacgagcagatccagtactacttcaaccagcacgtgttcgccctggagcagatggagtaccagaacgagggcatcgacgccgtgcccgtggagtacgaggacaacagacccctgctggacatgttcctgcagaagcccctgggcctgctggccctgctggacgaggagagcagattcccccaggccaccgaccagaccctggtggacaagttcgaggacaacctgagatgcaagtacttctggagacccaagggcgtggagctgtgcttcggcatccagcactacgccggcaaggtgctgtacgacgccagcggcgtgctggagaagaacagagacaccctgcccgccgacgtggtggtggtgctgagaaccagcgagaacaagctgctgcagcagctgttcagcatccccctgaccaagaccggcaacctggcccagaccagagccagaatcaccgtggccagcagcagcctgcccccccacttcagcgccggcaaggccaaggtggacaccctggaggtgatcagacaccccgaggagaccaccaacatgaagagacagaccgtggccagctacttcagatacagcctgatggacctgctgagcaagatggtggtgggccagccccacttcgtgagatgcatcaagcccaacgacgacagagaggccctgcagttcagcagagagagagtgctggcccagctgagaagcaccggcatcctggagaccgtgagcatcagaagacagggctacagccacagaatcctgttcgaggagttcgtgaagagatactactacctggccttcaccgcccaccagacccccctggccagcaaggagagctgcgtggccatcctggagaagagcagactggaccactgggtgctgggcaagaccaaggtgttcctgaagtactaccacgtggagcagctgaacctgctgctgagagaggtgatcggcagagtggtggtgctgcaggcctacaccaagggctggctgggcgccagaagatacaagagagtgagagagaagagagagaagggcgccatcgccatccagagcggcgacaccagcaaccagagcagcggcccccacagccccgtggccgccggcaccagaggcagcgccgaggtgcaggactgcagcgagcccggcgaccacaaggtgctgagaggcagcgtgcacagaagaagccacagccaggccgagagcaacaacggcagaacccagaccagcagcaacagccccgccgtgaccgagaagaacggccacagccaggcccagagcagccccaagggctgcgacatcttcgccggccacgccaacaagcacagcgtgagcggcaccgacctgctgagcagcagaatctgccaccccgcccccgaccagcagggcctgagcctgtggggcgccccccagaagcccggcagcgagaacggcctggcccagaagcacagaacccccagaagaagatgccagcagcccaagatgctgagcagccccgaggacaccatgtactacaaccagctgaacggcaccctggagtaccagggcagcaagagaaagcccagaaagctgggccagatcaaggtgctggacggcgaggacgagtactacaagagcctgagccccgtggactgcatccccgaggagaacaacagcgcccaccccagcttcttcagcagcagcagcaagggcgacagcttcgcccagcactag

SEQ ID NO: 37715 - protein, 1591 aa, Artificial Sequence
  derived and/or modified sequence
MKLYVFLVNTGTTLTFDTELTVQTVADLKHAIQSKYKIAIQHQVLVVNGGECMAADRRVCTYSAGTDTNPIFLFNKEMILCDRPPAIPKTTFSTENDMEIKVEESLMMPAVFHTVASRTQLALEMYEVAKKLCSFCEGLVHDEHLQHQGWAAIMANLEDCSNSYQKLLFKFESIYSNYLQSIEDIKLKLTHLGTAVSVMAKIPLLECLTRHSYRECLGRLDSLPEHEDSEKAEMKRSTELVLSPDMPRTTNESLLTSFPKSVEHVSPDTADAESGKEIRESCQSTVHQQDETTIDTKDGDLPFFNVSLLDWINVQDRPNDVESLVRKCFDSMSRLDPRIIRPFIAECRQTIAKLDNQNMKAIKGLEDRLYALDQMIASCGRLVNEQKELAQGFLANQKRAENLKDASVLPDLCLSHANQLMIMLQNHRKLLDIKQKCTTAKQELANNLHVRLKWCCFVMLHADQDGEKLQALLRLVIELLERVKIVEALSTVPQMYCLAVVEVVRRKMFIKHYREWAGALVKDGKRLYEAEKSKRESFGKLFRKSFLRNRLFRGLDSWPPSFCTQKPRKFDCELPDISLKDLQFLQSFCPSEVQPFLRVPLLCDFEPLHQHVLALHNLVKAAQSLDEMSQTITDLLSEQKASVSQTSPQSASSPRMESTAGITTTTSPRTPPPLTVQDPLCPAVCPLEELSPDSIDAHTFDFETIPHPNIEQTIHQVSLDLDSLAESPESDFMSAVNEFVIEENLSSPNPISDPQSPEMMVESLYSSVINAIDSRRMQDTNVCGKEDFGDHTSLNVQLERCRVVAQDSHFSIQTIKEDLCHFRTFVQKEQCDFSNSLKCTAVEIRNIIEKVKCSLEITLKEKHQKELLSLKNEYEGKLDGLIKETEENENKIKKLKGELVCLEEVLQNKDNEFALVKHEKEAVICLQNEKDQKLLEMENIMHSQNCEIKELKQSREIVLEDLKKLHVENDEKLQLLRAELQSLEQSHLKELEDTLQVRHIQEFEKVMTDHRVSLEELKKENQQIINQIQESHAEIIQEKEKQLQELKLKVSDLSDTRCKLEVELALKEAETDEIKILLEESRAQQKETLKSLLEQETENLRTEISKLNQKIQDNNENYQVGLAELRTLMTIEKDQCISELISRHEEESNILKAELNKVTSLHNQAFEIEKNLKEQIIELQSKLDSELSALERQKDEKITQQEEKYEAIIQNLEKDRQKLVSSQEQDREQLIQKLNCEKDEAIQTALKEFKLEREVVEKELLEKVKHLENQIAKSPAIDSTRGDSSSLVAELQEKLQEEKAKFLEQLEEQEKRKNEEMQNVRTSLIAEQQTNFNTVLTREKMRKENIINDLSDKLKSTMQQQERDKDLIESLSEDRARLLEEKKKLEEEVSKLRSSSFVPSPYVATAPELYGACAPELPGESDRSAVETADEGRVDSAMETSMMSVQENIHMLSEEKQRIMLLERTLQLKEEENKRLNQRLMSQSMSSVSSRHSEKIAIRDFQVGDLVLIILDERHDNYVLFTVSPTLYFLHSESLPALDLKPASGASRRPWVLGKVMEKEYCQAKKAQNRFKVPLGTKFYRVKAVSWNKKV

SEQ ID NO: 37716 - DNA, 4776 bp, Artificial Sequence
  derived and/or modified sequence
atgaagctgtacgtgttcctggtgaacaccggcaccaccctgaccttcgacaccgagctgaccgtgcagaccgtggccgacctgaagcacgccatccagagcaagtacaagatcgccatccagcaccaggtgctggtggtgaacggcggcgagtgcatggccgccgacagaagagtgtgcacctacagcgccggcaccgacaccaaccccatcttcctgttcaacaaggagatgatcctgtgcgacagaccccccgccatccccaagaccaccttcagcaccgagaacgacatggagatcaaggtggaggagagcctgatgatgcccgccgtgttccacaccgtggccagcagaacccagctggccctggagatgtacgaggtggccaagaagctgtgcagcttctgcgagggcctggtgcacgacgagcacctgcagcaccagggctgggccgccatcatggccaacctggaggactgcagcaacagctaccagaagctgctgttcaagttcgagagcatctacagcaactacctgcagagcatcgaggacatcaagctgaagctgacccacctgggcaccgccgtgagcgtgatggccaagatccccctgctggagtgcctgaccagacacagctacagagagtgcctgggcagactggacagcctgcccgagcacgaggacagcgagaaggccgagatgaagagaagcaccgagctggtgctgagccccgacatgcccagaaccaccaacgagagcctgctgaccagcttccccaagagcgtggagcacgtgagccccgacaccgccgacgccgagagcggcaaggagatcagagagagctgccagagcaccgtgcaccagcaggacgagaccaccatcgacaccaaggacggcgacctgcccttcttcaacgtgagcctgctggactggatcaacgtgcaggacagacccaacgacgtggagagcctggtgagaaagtgcttcgacagcatgagcagactggaccccagaatcatcagacccttcatcgccgagtgcagacagaccatcgccaagctggacaaccagaacatgaaggccatcaagggcctggaggacagactgtacgccctggaccagatgatcgccagctgcggcagactggtgaacgagcagaaggagctggcccagggcttcctggccaaccagaagagagccgagaacctgaaggacgccagcgtgctgcccgacctgtgcctgagccacgccaaccagctgatgatcatgctgcagaaccacagaaagctgctggacatcaagcagaagtgcaccaccgccaagcaggagctggccaacaacctgcacgtgagactgaagtggtgctgcttcgtgatgctgcacgccgaccaggacggcgagaagctgcaggccctgctgagactggtgatcgagctgctggagagagtgaagatcgtggaggccctgagcaccgtgccccagatgtactgcctggccgtggtggaggtggtgagaagaaagatgttcatcaagcactacagagagtgggccggcgccctggtgaaggacggcaagagactgtacgaggccgagaagagcaagagagagagcttcggcaagctgttcagaaagagcttcctgagaaacagactgttcagaggcctggacagctggccccccagcttctgcacccagaagcccagaaagttcgactgcgagctgcccgacatcagcctgaaggacctgcagttcctgcagagcttctgccccagcgaggtgcagcccttcctgagagtgcccctgctgtgcgacttcgagcccctgcaccagcacgtgctggccctgcacaacctggtgaaggccgcccagagcctggacgagatgagccagaccatcaccgacctgctgagcgagcagaaggccagcgtgagccagaccagcccccagagcgccagcagccccagaatggagagcaccgccggcatcaccaccaccaccagccccagaacccccccccccctgaccgtgcaggaccccctgtgccccgccgtgtgccccctggaggagctgagccccgacagcatcgacgcccacaccttcgacttcgagaccatcccccaccccaacatcgagcagaccatccaccaggtgagcctggacctggacagcctggccgagagccccgagagcgacttcatgagcgccgtgaacgagttcgtgatcgaggagaacctgagcagccccaaccccatcagcgacccccagagccccgagatgatggtggagagcctgtacagcagcgtgatcaacgccatcgacagcagaagaatgcaggacaccaacgtgtgcggcaaggaggacttcggcgaccacaccagcctgaacgtgcagctggagagatgcagagtggtggcccaggacagccacttcagcatccagaccatcaaggaggacctgtgccacttcagaaccttcgtgcagaaggagcagtgcgacttcagcaacagcctgaagtgcaccgccgtggagatcagaaacatcatcgagaaggtgaagtgcagcctggagatcaccctgaaggagaagcaccagaaggagctgctgagcctgaagaacgagtacgagggcaagctggacggcctgatcaaggagaccgaggagaacgagaacaagatcaagaagctgaagggcgagctggtgtgcctggaggaggtgctgcagaacaaggacaacgagttcgccctggtgaagcacgagaaggaggccgtgatctgcctgcagaacgagaaggaccagaagctgctggagatggagaacatcatgcacagccagaactgcgagatcaaggagctgaagcagagcagagagatcgtgctggaggacctgaagaagctgcacgtggagaacgacgagaagctgcagctgctgagagccgagctgcagagcctggagcagagccacctgaaggagctggaggacaccctgcaggtgagacacatccaggagttcgagaaggtgatgaccgaccacagagtgagcctggaggagctgaagaaggagaaccagcagatcatcaaccagatccaggagagccacgccgagatcatccaggagaaggagaagcagctgcaggagctgaagctgaaggtgagcgacctgagcgacaccagatgcaagctggaggtggagctggccctgaaggaggccgagaccgacgagatcaagatcctgctggaggagagcagagcccagcagaaggagaccctgaagagcctgctggagcaggagaccgagaacctgagaaccgagatcagcaagctgaaccagaagatccaggacaacaacgagaactaccaggtgggcctggccgagctgagaaccctgatgaccatcgagaaggaccagtgcatcagcgagctgatcagcagacacgaggaggagagcaacatcctgaaggccgagctgaacaaggtgaccagcctgcacaaccaggccttcgagatcgagaagaacctgaaggagcagatcatcgagctgcagagcaagctggacagcgagctgagcgccctggagagacagaaggacgagaagatcacccagcaggaggagaagtacgaggccatcatccagaacctggagaaggacagacagaagctggtgagcagccaggagcaggacagagagcagctgatccagaagctgaactgcgagaaggacgaggccatccagaccgccctgaaggagttcaagctggagagagaggtggtggagaaggagctgctggagaaggtgaagcacctggagaaccagatcgccaagagccccgccatcgacagcaccagaggcgacagcagcagcctggtggccgagctgcaggagaagctgcaggaggagaaggccaagttcctggagcagctggaggagcaggagaagagaaagaacgaggagatgcagaacgtgagaaccagcctgatcgccgagcagcagaccaacttcaacaccgtgctgaccagagagaagatgagaaaggagaacatcatcaacgacctgagcgacaagctgaagagcaccatgcagcagcaggagagagacaaggacctgatcgagagcctgagcgaggacagagccagactgctggaggagaagaagaagctggaggaggaggtgagcaagctgagaagcagcagcttcgtgcccagcccctacgtggccaccgcccccgagctgtacggcgcctgcgcccccgagctgcccggcgagagcgacagaagcgccgtggagaccgccgacgagggcagagtggacagcgccatggagaccagcatgatgagcgtgcaggagaacatccacatgctgagcgaggagaagcagagaatcatgctgctggagagaaccctgcagctgaaggaggaggagaacaagagactgaaccagagactgatgagccagagcatgagcagcgtgagcagcagacacagcgagaagatcgccatcagagacttccaggtgggcgacctggtgctgatcatcctggacgagagacacgacaactacgtgctgttcaccgtgagccccaccctgtacttcctgcacagcgagagcctgcccgccctggacctgaagcccgccagcggcgccagcagaagaccctgggtgctgggcaaggtgatggagaaggagtactgccaggccaagaaggcccagaacagattcaaggtgcccctgggcaccaagttctacagagtgaaggccgtgagctggaacaagaaggtgtag

SEQ ID NO: 37717 - DNA, 4776 bp, Artificial Sequence
  derived and/or modified sequence
atgaagctctacgtctttctggtaaacactggcacaacgctgacttttgacaccgaactgaccgtccagaccgtggctgacctgaagcacgctatccagtctaagtataaaattgctatccagcatcaggtattggtagttaatggcggagagtgcatggccgccgatcgtcgtgtgtgcacctattccgccggcaccgatactaatcccatttttctgttcaataaggagatgatactatgtgaccggccccccgctattccaaagactacatttagcacggagaacgatatggagattaaggtagaggaatccttaatgatgccagctgtcttccacaccgtagcaagcaggacccagttagctctggaaatgtatgaggtcgccaaaaagttatgctcgttttgcgagggactggttcatgacgagcatctgcagcaccagggatgggcagctatcatggctaatttggaggattgttcgaactcttatcaaaagctgttgttcaagttcgagtccatttacagcaattatctgcagagcattgaagatatcaagttaaaactgacccacctgggcaccgctgtgagtgtcatggctaaaatccccctgcttgagtgtttgacaagacactcatatcgtgagtgtttggggaggctggattctctccctgaacacgaggactcagagaaagccgagatgaagcggtcaacagagctagtcctgtcccccgatatgccgagaaccacaaacgagtcactgctgacctctttccctaagtccgttgaacacgttagtcccgacaccgcagacgcagagtcgggcaaggaaatccgggagagttgtcaatctaccgtacatcagcaggacgagaccactatagataccaaagatggggacctccccttctttaacgtttccctccttgattggatcaatgttcaggataggccgaatgacgtcgagtctctggtccgcaaatgtttcgatagcatgtcacggttggaccctcggatcattcggccattcattgcggagtgcaggcaaacaattgcaaaactggacaatcaaaacatgaaagccattaaaggattggaagacaggctctatgccctggatcaaatgatcgcttcttgcgggagactggtgaatgaacagaaagaattagcgcaagggttcctggcaaatcaaaagagggctgagaatcttaaggacgcctcggtgctgcccgacttgtgcttgtctcacgctaaccagcttatgattatgttacagaatcatcgaaagctcctggacatcaaacagaagtgcacaaccgccaagcaagagctggctaataacctgcacgtacgcctaaagtggtgctgttttgttatgctccacgcagatcaggacggggagaaactccaagctctcttgagactggtcatcgagcttttagagagggttaagatagttgaagctctcagcaccgtgccacagatgtattgcttagctgtcgtggaagttgtgaggagaaaaatgttcattaagcactaccgcgagtgggccggtgcccttgtcaaagacggaaagcgcttgtatgaggctgaaaagagtaagcgcgagtctttcggtaaactattccgcaaatcattcttaagaaaccgtctcttccggggacttgacagctggccgcctagcttttgcactcaaaaaccacggaagttcgactgtgagctgccagacatctctctaaaggatctccagttcctgcagtcattttgtccgagcgaggtgcaaccattcctccgtgtgccccttctgtgcgattttgagcctttgcaccagcacgtgctggcactgcacaatctcgtgaaggccgctcagagcctggatgagatgtctcagacaattaccgatctgctctctgaacagaaggccagcgtttctcagacatccccacagtctgctagctcacccagaatggaatcaaccgcggggatcactaccacgactagtccaagaacaccgccgcccttgaccgtgcaggatcctctttgccctgccgtgtgtcccttggaagagctcagcccagacagtattgacgcccatacctttgattttgaaactatccctcaccctaatatcgagcagactattcaccaagtctctctcgaccttgatagtctggccgagtcgcccgaaagcgattttatgagtgccgttaatgagtttgtgattgaagagaatctttcaagtcctaaccccattagtgacccacaatcccccgagatgatggtggagtccctgtatagctctgtcattaacgccatagattccaggaggatgcaagatacaaacgtttgtggaaaggaggatttcggcgaccacacatcactgaacgtgcagctcgagcgatgcagggtggtcgcgcaggactcgcacttctcgattcaaactataaaggaagacctctgtcactttcgtacatttgtccaaaaagagcagtgcgacttcagtaactcacttaagtgcacagctgtggaaatccgaaacatcatagagaaagtgaagtgttctctcgagatcactttgaaggaaaaacaccagaaagaattgttgagcttgaaaaacgagtacgagggcaaactggacgggcttattaaagagacagaggagaacgaaaataagatcaaaaagctgaagggggaactcgtgtgcctggaggaagtgctgcagaacaaagacaacgagttcgccctggttaaacatgagaaggaggccgtgatttgtctgcagaacgaaaaagaccaaaagttattggaaatggagaacattatgcatagtcaaaattgtgaaatcaaggaactcaagcaaagccgggaaattgtgttagaagacttaaaaaaactccatgtggagaacgacgaaaaactgcaactgttgcgcgcagagctccagtctctcgagcagagtcatcttaaagaacttgaggatacgctccaagtccgacatatacaggagtttgaaaaggtgatgacagaccatcgtgtctcactggaggaattaaagaaagagaaccagcagattattaatcagatccaggaaagccatgcggaaatcatccaagaaaaagagaaacaattgcaggagctaaaactgaaagtgagcgacttgtcggacacccgttgcaaacttgaggtggagctggcattaaaggaggccgaaacagatgagatcaagatactgttggaggaaagccgggcccaacaaaaagaaaccctaaaatctttattggaacaggagacagagaatctgagaaccgagataagcaaactaaatcaaaagatccaggacaacaatgagaactaccaggtcgggctcgctgagttgaggacattaatgaccattgagaaagaccagtgtatctcagaattaatttcaaggcacgaggaggagtctaatatacttaaggctgagctcaataaggtgacaagtctacataaccaggcattcgagattgagaaaaacctcaaagagcagattatagagttgcaaagcaaattagattcggagctgtcagcgcttgaacgtcagaaagatgaaaaaattacccagcaggaagagaagtacgaggctattatccaaaacctcgagaaggacaggcaaaagctcgtgagttcccaggagcaagacagggagcagctcatccagaagctgaactgcgagaaagatgaggccattcaaacagccttaaaggagttcaagttggaacgggaagtggtcgagaaggaactgcttgagaaagtaaagcacctggaaaatcagatcgcaaagtcccccgctatcgatagcacaaggggcgacagctcgagcttagtcgctgaactacaagagaagctccaggaggagaaggcaaaattcctagaacagctggaggagcaagagaagaggaaaaacgaggaaatgcagaatgtgcgtacttcactgatcgctgagcagcaaaccaatttcaacaccgtgctcacgcgtgagaaaatgcgtaaggaaaacataataaacgacctatccgacaagttgaagtccaccatgcagcagcaagaaagggacaaagatttgattgagtcattatcagaggacagagctagactacttgaggagaagaagaaactagaggaggaggttagcaaactgcgaagcagcagcttcgtgccatctccatacgtcgctacggcccccgaactgtatggagcgtgtgcacccgaactacctggcgagtccgatcgatctgcagtagagactgcggacgaaggcagggtggacagtgccatggagacatcgatgatgtctgtccaggaaaatatccacatgctgtctgaggagaaacagcggatcatgctcctagagaggacgctgcagctgaaagaggaggagaacaaaagactgaaccagcggttgatgagtcagagcatgtcttcagtgagctcgagacacagcgagaagattgccatcagagactttcaggttggtgacctggtcctgatcatcctcgatgaacgacatgacaactacgttctattcacagtctcacctactttgtacttcctccactccgagagcctcccggccctcgacctgaaacccgcatcaggagcgtctagacgaccctgggtgctcggcaaagtgatggaaaaggaatattgccaagccaagaaggcacagaacaggttcaaggtaccattgggcaccaagttttaccgggtgaaggccgtctcctggaataagaaggtatag

SEQ ID NO: 37718 - DNA, 4776 bp, Artificial Sequence
  derived and/or modified sequence
atgaagctgtatgtcttccttgtcaataccggcactacactgacctttgatactgagctgacagtgcaaaccgtggccgatctgaaacacgcgatccagagtaaatataaaatcgcaattcagcaccaggtgctggtggttaatggcggggagtgtatggcagctgaccgccgggtttgtacgtattctgccgggaccgatacaaatcccatttttctcttcaacaaggagatgattctatgtgacagaccccccgccattcctaaaaccacgttctctacagaaaatgatatggaaattaaggtggaagaatcacttatgatgcccgccgtgttccatactgtggctagtcgaactcaattagcgctggagatgtacgaggtcgctaaaaaactctgtagcttctgcgagggattagtacacgacgagcatctccaacatcagggctgggcagccattatggcaaacctggaagattgtagtaacagttatcagaagttactgtttaaatttgagtctatctatagcaattacctgcaatccatcgaagatatcaaactgaaactcacacacttgggaacagccgtatccgtcatggcgaaaattccactattggaatgtctgacccgccacagctatagagagtgcctgggacgtctggacagcttgccagaacacgaggactcagagaaggcggaaatgaagcggagcaccgaactggtcctaagtcccgatatgcccagaaccactaatgagagcctactcacgagcttccccaaatcagtagaacacgtttcccccgacaccgccgacgcagaatctgggaaggaaatcagagagagttgccagagtacagtccaccagcaggatgagaccactatagataccaaagacggagacctccctttttttaatgtatctttgctggattggatcaacgtgcaggataggccgaatgacgttgagtcactcgtgcgaaagtgtttcgactccatgagccggctggatccgaggatcatccgaccctttatcgccgaatgccgccagacaattgccaagcttgacaatcaaaatatgaaggctattaaaggactcgaggatcgactgtacgctctcgatcagatgatagcatcctgtgggaggctggttaacgaacagaaggagctggcacaggggttccttgctaatcagaaacgagctgagaatctgaaagacgcatccgtcctccctgatctctgtctttcccatgcaaaccagctcatgatcatgttacagaatcatcggaaattgttggacataaaacagaagtgtaccacggcaaaacaagagcttgctaacaacctgcacgtgaggctcaagtggtgttgcttcgtgatgcttcatgctgatcaggacggagaaaagttgcaggctcttttgcggctggtcattgaactgcttgagcgggttaaaattgtagaggccttgtccactgttcctcagatgtactgtcttgccgtagtggaagtggtgagaaggaagatgttcatcaagcactatcgcgaatgggccggagccctggtgaaagatggtaagaggctgtatgaagctgagaaatcaaaacgcgaaagtttcggaaagctattccggaagtcatttctgaggaaccgtctattccggggacttgactcttggcctccgagcttttgtacacagaagccgcgcaaatttgactgcgaacttccagacataagtctgaaggatctgcagtttctccagtcattttgtcctagtgaagtgcagccctttctaagagttccccttctttgtgactttgaaccgttgcaccagcacgtcctcgcgctgcacaatctcgtgaaggccgcgcagtccctggatgagatgagtcaaacgatcacagatttgctttctgagcagaaagcctccgtgtcccaaacttctccgcagtccgcctccagcccccgaatggagagcacggccggcatcactacaactacgtcccctaggaccccgccccctctgaccgtgcaggatcccttatgcccagcagtctgcccacttgaggagctttcaccggacagcatcgatgcacacacattcgacttcgaaactatccctcaccccaacatagagcagaccatccaccaagtctcgctggatctagattctctggcagaatctcccgagtccgacttcatgagtgctgttaacgaatttgtaattgaagagaacttaagtagcccaaatcctatctctgacccacaatcccccgaaatgatggtcgaatctctgtactcctcagtcatcaatgccatcgatagccgcagaatgcaggacacaaatgtgtgtggcaaagaggactttggcgatcatacgagtctaaacgtccagctcgaacggtgccgggtggtggctcaggatagccactttagcatccagacaatcaaagaggacctgtgccacttccgtacttttgtacagaaggagcaatgtgatttcagcaacagcctgaagtgtacagcggtggagataagaaacattatcgaaaaggtaaaatgcagcttggagataacactgaaggagaaacatcagaaggagctgctctccttgaaaaacgagtatgagggcaaattagacggtctgatcaaggagaccgaagagaatgaaaataagattaaaaagctgaagggcgaacttgtgtgtctcgaggaagtgctgcagaacaaagataatgagttcgctctcgtgaagcatgagaaggaggccgttatctgcctgcagaacgaaaaagaccagaaactactggagatggaaaacatcatgcattcgcagaactgtgaaataaaagagttgaaacagtcgagggagattgtgctcgaggaccttaaaaagctccatgtggaaaacgacgagaaactgcagcttcttagagctgagcttcagtcacttgaacagtcgcaccttaaggaactggaggataccttacaagtccggcatatacaggagttcgagaaggtgatgaccgaccaccgggttagtctggaagaactgaaaaaagaaaaccaacagatcattaaccaaatccaggagtcccacgctgagataattcaggaaaaagagaaacagctgcaagagctaaagttaaaagtcagtgacctgagtgacacacgatgcaaactcgaggttgagctagctttgaaagaggctgagaccgatgagattaaaatattgttagaagagagccgggctcagcagaaagaaacattgaagtccctcctcgaacaggaaactgagaacctaagaacagagatcagcaagcttaatcagaaaatccaggataacaacgaaaactatcaggtgggcctggctgaactgagaactctgatgaccatcgagaaagaccagtgcatttcagaactcatcagcaggcacgaggaggagtctaatatcctaaaggctgagctcaacaaggtgaccagtctgcacaatcaggcctttgaaatcgagaagaatttgaaagagcagattatcgagctacagagcaagttagatagtgagctttcagcacttgagcgccagaaggatgagaaaattactcagcaggaagagaagtacgaagcaattatccagaacctggaaaaggaccgccagaaactggtatcaagccaggagcaggatcgcgagcagctgattcagaaacttaattgcgagaaggacgaggccatacagacagcgctgaaagagttcaaactagagagggaggtggtggaaaaggagttactcgaaaaagttaaacatttagaaaaccagattgccaagagccctgctattgactcaactaggggagacagttccagcctggtcgccgagctgcaagagaagctccaggaagagaaagcaaagtttctcgagcagctggaagagcaggagaagcgtaaaaatgaagagatgcaaaacgtccggacctccctgattgctgagcagcaaaccaactttaataccgtgctgaccagggaaaaaatgagaaaggaaaatatcataaatgaccttagtgacaaactcaagtcaactatgcagcagcaagaaagggataaggatttgatagagagtctaagtgaggatcgggccaggctgttagaggagaaaaagaaactcgaagaggaggtctccaaactccgtagcagctccttcgtgcctagtccctatgtggccactgctcctgagctctacggagcttgtgcccccgaacttcccggagagtccgacagaagcgccgtggaaacagctgatgagggtagagtggacagcgccatggagactagtatgatgagtgttcaggaaaatatccatatgctgagtgaggaaaagcagcggatcatgttactcgaaaggacactccagctgaaagaggaggaaaataagcgactcaatcagcgactcatgtcacagtccatgtctagcgttagttctcggcactccgagaagatagctatccgcgactttcaagtaggtgatctcgttctcattatactggacgaacgacacgacaactatgtcctcttcactgtgagtcctaccttatattttttgcactccgagagcctcccagctctagacttaaaacctgcctccggcgccagccggcgcccatgggttttgggtaaggttatggagaaagaatattgccaggcaaagaaagctcagaatagatttaaggtacctctgggaacaaaattctatagagttaaagccgtgtcatggaacaagaaggtatag

SEQ ID NO: 37719 - DNA, 4776 bp, Artificial Sequence
  derived and/or modified sequence
atgaagctgtatgtgttcctggtgaacacaggcaccaccctgacctttgacacagagctgactgtgcagacagtggccgacctgaagcacgccatccagagcaagtacaagatcgccatccagcaccaggtgctggtggtgaatggaggagagtgcatggctgctgacagaagagtgtgcacctacagcgctggaacagacaccaaccccatcttcctgttcaacaaggagatgatcctgtgtgaccggcccccagccatccccaagaccaccttcagcacagaaaatgacatggagatcaaggtggaggagagcctgatgatgcctgctgtgttccacacagtggccagcaggacccagctggccctggagatgtatgaggtggccaagaagctgtgcagcttctgtgagggcctggtgcatgatgagcacctgcagcaccagggctgggccgccatcatggccaacctggaggactgcagcaacagctaccagaagctgctcttcaagtttgagagcatctacagcaactacctgcagagcattgaggacatcaagctgaagctgacccacctgggcacagctgtgtctgtgatggccaagatccccctgctggagtgcctgaccaggcacagctacagagaatgtctgggccgcctggacagcctgcctgagcatgaagattctgagaaggccgagatgaagaggagcacagagctggtgctgagcccagacatgcccaggaccaccaatgaaagcctgctgaccagcttccccaagtctgtggagcacgtgtccccagacacagcagatgctgagagcggcaaggagatccgggagagctgccagagcacagtgcaccagcaggatgagaccaccatcgacaccaaggatggagacctgcccttcttcaacgtgtccctgctggactggatcaacgtgcaggaccggcccaatgatgtggagagcctggtgaggaaatgttttgacagcatgagccggctggacccccgcatcatccggcccttcatcgccgagtgccggcagaccatcgccaagctggacaaccagaacatgaaggccatcaagggcctggaggaccggctgtatgccctggaccagatgattgccagctgtggccgcctggtgaatgagcagaaggagctggcccagggcttcctggccaaccagaagagagctgagaacctgaaggatgcctctgtgctgcctgacctgtgcctgagccacgccaaccagctgatgatcatgctgcagaaccacaggaagctgctggacatcaagcagaagtgcaccacagccaagcaggagctggccaacaacctgcacgtgcggctgaagtggtgctgctttgtgatgctgcacgccgaccaggatggagagaagctgcaggccctgctgcggctggtgattgagctgctggagcgggtgaagatcgtggaggccctgagcacagtgccccagatgtactgcctggccgtggtggaggtggtgcggaggaagatgttcatcaagcactaccgggagtgggccggggccctggtgaaggatggcaagaggctgtatgaggccgagaagagcaagcgggagagctttgggaagctgttcaggaagagcttcctgaggaacagactcttccggggcctggacagctggcccccatccttctgcacccagaagcccaggaagtttgactgtgagctgcctgacatcagcctgaaggacctgcagttcctgcagagcttctgccccagcgaggtgcagcccttcctgcgggtgcccctgctgtgtgactttgagcccctgcaccagcacgtgctggccctgcacaacctggtgaaggccgcccagagcctggatgagatgagccagaccatcacagacctgctgtctgagcagaaggcctctgtgtcccagaccagcccccagagcgccagcagccccaggatggagagcacagctggcatcaccaccaccaccagccccaggaccccaccacccctgactgtgcaggaccccctgtgcccagctgtgtgccccctggaggagctgagcccagacagcattgatgcccacacctttgattttgagaccatcccccaccccaacatcgagcagaccatccaccaggtgtccctggacctggacagcctggccgagagccctgagagtgacttcatgtctgctgtgaatgaatttgtgattgaggagaacctgagcagccccaaccccatcagtgacccccagagccctgagatgatggtggagagcctgtacagcagcgtcatcaatgccatcgacagcaggaggatgcaggacaccaacgtgtgtgggaaggaggactttggagaccacaccagcctgaatgtgcagctggagcgctgccgggtggtggcccaggacagccacttcagcatccagaccatcaaggaggacctgtgccacttccgcacctttgtgcagaaggagcagtgtgacttcagcaacagcctgaagtgcacagctgtggagatccggaacatcatcgagaaggtgaagtgcagcctggagatcaccctgaaggagaagcaccagaaggagctgctgagcctgaagaatgaatatgagggcaagctggatggcctcatcaaggagacagaagaaaatgaaaacaagatcaagaagctgaagggggagctggtgtgcctggaggaggtgctgcagaacaaggacaatgaatttgccctggtgaagcatgagaaggaggccgtcatctgcctgcagaatgagaaggaccagaagctgctggagatggagaacatcatgcacagccagaactgtgagatcaaggagctgaagcagagccgggagatcgtgctggaggacctgaagaagctgcacgtggagaatgatgagaagctgcagctgctgcgggcagagctgcagagcctggagcagagccacctgaaggagctggaggacaccctgcaggtgcgccacatccaggagtttgagaaggtgatgacagaccaccgggtgtccctggaggagctgaagaaggagaaccagcagatcatcaaccagatccaggagagccatgctgagatcatccaggagaaggagaagcagctgcaggagctgaagctgaaggtgtctgacctgagtgacacccgctgcaagctggaggtggagctggccctgaaggaggccgagacagatgagatcaagatcctgctggaggagagccgggcccagcagaaggagaccctgaagagcctgctggagcaggagacagagaacctgaggacagagatcagcaagctgaaccagaagatccaggacaacaatgaaaactaccaggtgggcctggccgagctgcggaccctgatgaccatcgagaaggaccagtgcatcagcgagctgatcagcagacatgaggaggagagcaacatcctgaaggccgagctgaacaaggtgaccagcctgcacaaccaggcctttgaaattgagaagaacctgaaggagcagatcatcgagctgcagagcaagctggacagcgagctgagcgccctggagcggcagaaggatgagaagatcacccagcaggaggagaagtatgaggccatcatccagaacctggagaaggaccggcagaagctggtgagcagccaggagcaggaccgggagcagctgatccagaagctgaactgtgagaaggatgaggccatccagacagccctgaaggagttcaagctggagcgggaggtggtggagaaggagctgctggagaaggtgaagcacctggagaaccagatcgccaagagccctgccatcgacagcaccaggggggacagcagcagcctggtggccgagctgcaggagaagctgcaggaggagaaggccaagttcctggagcagctggaggagcaggagaagaggaagaatgaggagatgcagaatgtgaggaccagcctgattgctgagcagcagaccaacttcaacacagtgctgacccgggagaagatgaggaaggagaacatcatcaatgacctgagtgacaagctgaagagcaccatgcagcagcaggagcgggacaaggacctgattgagagcctgtctgaagatcgggcccggctgctggaggagaagaagaagctggaggaggaggtgtccaagctgcggagcagcagctttgtgcccagcccctacgtggccacagcccctgagctgtatggagcctgtgcccctgagctgcccggggagagtgacagatctgctgtggagacagcagatgagggccgggtggacagcgccatggagacctccatgatgtctgtgcaggagaacatccacatgctgtctgaggagaagcagaggatcatgctgctggagaggaccctgcagctgaaggaggaggagaacaagaggctgaaccagaggctgatgagccagagcatgagctctgtgagcagccgccacagcgagaagatcgccatccgggacttccaggtgggggacctggtgctgatcatcctggatgaaagacatgacaactacgtgctcttcaccgtgagccccaccctgtacttcctgcacagcgagagcctgcctgccctggacctgaagccagccagcggggccagccggcggccctgggtgctgggcaaggtgatggagaaggagtactgccaggccaagaaggcccagaaccgcttcaaggtgcccctgggcaccaagttctacagagtgaaggctgtgtcctggaacaagaaggtgtag

SEQ ID NO: 37720 - DNA, 4776 bp, Artificial Sequence
  derived and/or modified sequence
atgaagctgtacgtgttcctggtgaacaccggcaccaccctgaccttcgataccgagctgaccgtacaaacagtggcagacctgaaacatgctattcagtccaaatataaaatagctatccaacaccaagtactcgtcgttaacgggggtgagtgcatggctgcggatcgccgagtctgtacatatagtgcagggacagatactaatcctatcttcctgtttaacaaagagatgatcctctgtgaccgcccccctgcaatcccgaagaccaccttcagcacagaaaacgatatggaaatcaaggttgaagaatcacttatgatgcccgccgtatttcacacggtggcctcccgaactcagttggcactggagatgtatgaagtcgcaaagaagctgtgctctttttgcgaaggccttgttcatgacgagcacctccagcaccaggggtgggctgctatcatggctaacttggaggattgtagcaattcctaccaaaaacttctgttcaagtttgaaagtatctattcaaattatctgcagagtatcgaggacattaagctgaagttgacccatctgggtaccgccgtgagcgtaatggcgaagatcccgctcctggagtgcttgacccgccattcttacagagagtgtttgggccggttagacagtctccctgagcacgaggacagcgaaaaggcagagatgaagcgctcaactgagctcgtactatcccctgacatgccccggactacaaacgaaagtttgttgacttcgttccccaaaagcgtggagcatgtttccccagacacagctgacgccgagagtggaaaagagatccgggagtcctgccagagcaccgttcaccagcaagatgagaccacaatcgatacaaaagatggagacctgccttttttcaatgtgagccttctggactggatcaatgtgcaggaccggccgaatgacgtcgagtctctggtaaggaaatgttttgattccatgagtcgacttgacccccgaatcattcggccttttatagcagagtgccgccagacaatcgccaagctcgataatcagaatatgaaagcgatcaagggactcgaggaccgactgtacgctctggatcaaatgatcgccagttgcgggagattagtgaacgagcagaaagagctagctcaaggtttcctcgctaatcagaaaagggcagagaaccttaaagatgccagcgtcctgccggatctatgcctatcccatgctaatcagctgatgatcatgctgcagaaccacaggaagctgctggatattaaacagaagtgtaccacagcaaagcaggagctcgcgaataacttacacgttcggctcaaatggtgttgcttcgtaatgttacacgctgatcaggacggcgagaagttgcaggcactgctgcgcctagtgatcgagttgctcgagcgggtgaagattgttgaggcgttaagcaccgttccacagatgtactgcctcgctgtggtggaggtggtgcgacgcaaaatgttcattaaacactacagggaatgggcgggtgccctcgtcaaggacggcaagcggctttacgaggctgagaaatccaagagggaatcattcggcaagttgttcagaaagagttttctgcgtaatcgactctttcgcgggctggattcatggcccccaagtttttgcactcagaagccgcgcaagttcgattgtgagctgcccgatatttctctgaaggacctgcagttcttgcagtcattttgtccatccgaggtccaaccttttctacgcgttcccttgctttgtgactttgagcctctgcatcagcacgtgctggccctgcacaacttggtgaaagccgcacagagtctcgatgagatgtctcagaccattaccgatctgctgagcgaacagaaggccagcgtaagccagacttcaccacagtccgcatccagtccaaggatggagtcaactgctggaatcaccacaaccacctccccgcggactcccccgcccctgaccgtacaggaccccttatgccccgccgtgtgccctctggaagaactatcacccgactctattgatgcacacacatttgattttgaaaccattccccaccccaatattgagcagaccattcaccaggtctccttggatttggacagtctggcggagtcgcccgagtccgatttcatgtccgctgtgaatgaatttgtcattgaggaaaatctctcctcccctaaccccattagtgacccacagagcccagagatgatggtggaaagcttgtacagcagcgtcatcaacgccatcgacagcagacgcatgcaggacactaatgtgtgtgggaaggaggatttcggggatcacacaagcctcaatgttcaactggagagatgcagagtggtggcccaagactcacatttctctatacagacgataaaggaggacctctgtcatttccggactttcgtgcagaaggagcagtgcgatttcagtaacagtctgaagtgcaccgctgtagagatacgtaatattattgagaaggtcaaatgttctctggaaataacactgaaagagaagcatcagaaggaacttttatccctgaagaacgaatacgaaggtaagttggatggactgatcaaggagaccgaagaaaatgaaaataagatcaagaaactgaagggcgaacttgtatgcctggaagaagtgctacaaaataaagacaacgaattcgccctcgtgaagcatgaaaaagaggccgtaatctgtcttcagaacgaaaaggaccagaaactcttagagatggaaaacataatgcactcacagaactgcgagatcaaagagcttaaacagagccgcgagatcgtgctcgaggatctgaaaaagcttcacgttgaaaacgacgaaaagcttcagctactcagagctgaactacagagtctggaacagtcccatcttaaagaactcgaagatacacttcaggtgcggcacatccaagaattcgaaaaggtgatgactgatcatagggtttcactcgaggagttaaaaaaggagaatcagcagatcataaaccaaattcaagagagtcacgccgagatcatccaagagaaggagaagcaactccaggaacttaagctcaaggtttccgacctgagcgatacgaggtgcaaattggaagtggagctggccttgaaggaggcagagacagatgagattaaaatcctgttagaggagtctagagctcagcagaaggagacactgaagagcctcctggagcaggagaccgaaaatctgcgcaccgagatctctaaattgaaccagaaaatccaggataataacgaaaactatcaggtggggttagccgagcttcgtaccctgatgacaatagaaaaggatcaatgtatttccgaactcatatcaagacacgaagaagaaagcaacatactgaaagccgagctcaataaagtgacatctctgcataaccaggcttttgagatcgagaaaaacctaaaggagcagataattgagctgcagtccaagctcgatagcgagttgtcagcacttgaaaggcagaaagatgaaaagatcactcaacaggaagagaaatacgaggctataattcaaaatctcgaaaaggacaggcaaaagctggttagctctcaagagcaagaccgcgaacagttgatccagaaactgaattgcgagaaagatgaggctatccagactgcactcaaggagttcaagcttgaacgagaagtagtcgagaaggagcttctggagaaagtaaagcacctggagaaccagattgctaagtccccagccatcgatagcacaaggggggacagtagcagcctggtggccgagcttcaagagaagctgcaggaggagaaagcaaaatttcttgaacagctggaagaacaggagaagaggaagaacgaagaaatgcagaacgtccgaacttccctcattgccgagcaacagaccaattttaataccgtgctgacaagggagaagatgcgcaaggaaaatatcatcaacgatctctctgataagcttaaatctaccatgcaacagcaagagcgggacaaagacctgattgagagcctgtccgaggacagagcaagattactggaggaaaagaaaaaactcgaggaagaggtcagcaagctgcggtcgtcatcttttgtgccctcaccatatgtcgcgaccgcccccgagctctacggagcttgcgcccccgaactgcctggcgagagcgatagaagtgccgtagagacggccgacgaggggcgtgtggatagtgctatggagacctccatgatgtccgtccaagaaaacattcacatgctgagtgaggaaaagcaacgaattatgcttctggagaggaccttgcagcttaaggaggaggagaataaaagactgaaccagcgtctaatgtcccagtccatgtcaagcgtgtccagccgacacagtgaaaagatagctatcagggattttcaggtcggcgatctagtccttattatactggacgagaggcacgacaattacgtcctttttactgtgtctccaaccctctacttcctgcactccgaatccctgcctgcactcgacctgaagcctgcatccggggcatctcgccgcccctgggtgcttgggaaggtaatggagaaagaatactgtcaagctaaaaaggctcaaaacaggtttaaggtgcccctgggaacaaagttctaccgggtaaaggcagtgtcctggaacaaaaaggtttag

SEQ ID NO: 37721 - DNA, 4776 bp, Artificial Sequence
  derived and/or modified sequence
atgaagctgtacgtgttcctggtgaacaccggcaccaccctgaccttcgatacagagctgacagtccagactgtcgcagatctgaaacacgccatccagtcaaagtacaaaatagctatccagcatcaggtactcgtggtaaatggcggcgagtgtatggcggcagatcgccgagtctgtacttactctgcgggcacggatactaatcccatcttcctttttaacaaggagatgatcctgtgtgacaggccgcctgcgattccaaagaccactttctccacagaaaatgacatggaaatcaaggtcgaggaaagtctgatgatgcccgccgtgtttcatacagtcgcgtcaaggacccaactcgccttggaaatgtatgaggtggcaaaaaaactttgttccttctgtgagggtctcgtccacgacgaacacctgcagcatcaggggtgggctgccatcatggcaaacctggaagattgctccaattcataccagaagctcttgttcaagtttgagtccatatactccaactacttacagtcgatagaggacattaaactgaagctgacccatcttggaaccgcagtttctgtcatggccaagatccctttgctggagtgtttaaccaggcactcatatcgggaatgcctcggacggttagattctctgcccgaacatgaagactcagagaaggctgagatgaaacgctccaccgagctggtgttatcccctgatatgcctaggaccactaacgagtctctgctcacttcctttcccaagagtgttgaacatgtgagcccagataccgcagacgccgagtcggggaaggaaatccgcgaaagctgccagtcaactgtgcatcagcaagatgaaactaccatcgacactaaagatggggatttgccttttttcaatgtcagcttgcttgattggataaatgtgcaggatcgtccgaacgacgtggagtctctggtgcggaaatgttttgacagcatgagtcgccttgatccgaggattatcaggccctttatcgcggagtgtcggcagacaatcgctaaactcgacaaccagaacatgaaggccataaaaggcctggaagatcgtttatatgccttggaccaaatgattgccagttgcggacgcttggttaacgagcagaaagaattagcccaaggatttctggcaaatcagaaaagggcagagaatctcaaggacgctagtgttttacccgacctttgcctgtctcatgctaatcagttgatgattatgctgcagaaccatagaaagctgttggacatcaaacagaagtgcacgacggccaaacaggagcttgccaataacttacatgttaggctgaagtggtgctgctttgtgatgttgcacgccgatcaggatggcgaaaagcttcaagctctgcttagattagtaattgaactgcttgagagggtgaagatagtagaggccctctctacagtgcctcagatgtactgcttagccgttgtggaagtcgtgagaagaaagatgttcatcaaacactacagagaatgggccggcgcactcgtcaaagacggcaaacgactgtacgaagctgaaaaaagcaaacgtgagtcttttggcaaactgtttcgaaaaagtttcctccgaaataggctctttaggggcctggacagttggccaccttccttctgtacacagaagcccagaaaatttgactgcgagttgccagacatctccctcaaggatctccagtttttacaatccttctgtccctctgaagtccagccgtttcttcgcgtccctttgttatgcgactttgagcccctgcaccagcatgttctggccttacataacctggtgaaggccgcgcagtcactggacgaaatgtcacaaaccattacagatcttctgtcggagcagaaggcgtctgtcagtcagacatcgcctcaatcagcgtcaagtcccagaatggagtccacagccgggatcacaacgacaacatctccaagaacccctccccccctcactgttcaggacccactgtgtccagctgtctgccctttagaggaacttagccccgatagcattgacgcccacacgttcgacttcgaaaccattcctcatcctaatatcgagcagactatacaccaagtcagtctcgacttggatagtctcgcggagtcccctgagagcgattttatgtcagccgtgaatgagtttgttatcgaagagaatctctcttctcccaacccaatatcagacccccaaagcccagagatgatggtggaatcactgtattcatccgtcatcaacgccatcgattctaggaggatgcaagacactaacgtgtgcggtaaagaggatttcggtgaccacacctctctcaacgtacagttggagcggtgcagagttgtcgcccaggactcacacttttctatccaaacaatcaaagaggatctctgtcattttcgtacctttgtgcaaaaagaacagtgtgactttagcaacagcctgaaatgtacagcagtcgagatacgcaatataatcgaaaaggtgaagtgctcgctagagataactctgaaggagaaacatcaaaaggagctcctctcgctgaaaaatgagtacgaaggtaaattggatgggctgattaaggagaccgaggaaaatgagaataagatcaaaaaattaaaaggtgagctggtgtgcttggaagaggtgctgcagaacaaggataacgaattcgcccttgtcaagcacgagaaggaggcagtgatctgtttgcagaatgaaaaggaccagaagctgctggaaatggaaaacattatgcactcacagaactgcgagatcaaagagctgaagcagtcgagggaaatagtgctggaggatctgaaaaagctccacgtagaaaacgatgagaagttgcagctgttgagggctgaactgcaatctctagagcaatcccacttgaaggagctggaggacactctccaagtaaggcacattcaggagttcgaaaaagtaatgaccgaccacagagtttccttagaagagctgaagaaggagaaccagcagatcattaatcagatccaggaatctcatgcagaaattatccaggagaaagaaaaacagttgcaggagctgaagctgaaagtgagcgatctgtctgatactcgatgcaagttagaagttgaattagcactcaaagaggcggagaccgatgagataaagattctgttagaggaaagccgggctcagcagaaagagacactcaaatcgctgctggagcaggaaacagagaacctgcgcacagagatcagtaagctcaatcagaagattcaagacaacaacgagaactaccaggtgggattggcagagctcaggacgttgatgaccattgagaaggatcagtgtatttcagagctgatctcgaggcacgaggaagagtctaacatcctgaaagctgagctcaacaaagttacaagtcttcacaaccaggctttcgagatcgaaaaaaatttaaaggagcagatcatcgagcttcagagcaaattggattctgaactgtccgcactcgagagacagaaggacgaaaagatcacgcagcaagaggagaagtatgaagccatcattcagaacttggagaaggataggcagaagctcgtgtcaagccaggagcaggatcgcgagcagctgatccagaagcttaattgtgaaaaggacgaggccatccagaccgccctgaaagagttcaagctggagagggaggtggtcgagaaggagttattggagaaagtcaagcacttggaaaaccagatcgcgaagtctccggctatagattctacccgaggtgactcttcgtctctggtcgcagagctacaggagaagctccaagaggaaaaagccaaattccttgaacagctggaggagcaggagaaaaggaagaacgaggaaatgcagaatgtaagaacaagcttaattgcagaacagcaaactaacttcaacactgtgctcactagggaaaagatgaggaaggaaaacattatcaatgacctgtccgacaagttgaagtctacaatgcagcagcaggaacgggacaaagatctaatcgagtccttatccgaagacagagcaaggttgctcgaagagaaaaaaaaactagaggaggaagtcagcaaattgcggagctcatcctttgtgccatctccttatgtagctacagccccggagctttatggagcatgtgcaccagagctccccggtgaatccgataggtctgccgtagaaactgccgatgaaggaagggtggactccgcgatggaaacctcaatgatgtcagtgcaggagaatattcacatgctcagcgaagagaaacaacggattatgctgcttgagcgtacactccaactgaaggaggaagaaaacaagagattaaaccagcggttgatgtcgcagtccatgtcaagtgtgagctctagacatagtgagaagatcgccatacgtgactttcaggtaggcgacctcgtgctgatcatactcgacgagcggcacgacaattacgtcctttttaccgtatcccccacgctctacttcctacacagcgaaagtctgcccgctctggacctgaaacccgccagtggagcctctcggcgaccttgggtgttgggcaaggtgatggagaaggagtactgtcaggccaaaaaggcccagaaccgcttcaaggtgcccctggggactaaattttaccgcgtaaaggccgtgagctggaataagaaggtctag

SEQ ID NO: 37722 - DNA, 4776 bp, Artificial Sequence
  derived and/or modified sequence
atgaaactgtatgtttttctcgtcaatacaggaacgacattgacattcgacaccgaactgacagttcagaccgtggcagacctgaaacacgcgattcagtctaagtataagatcgccatccagcaccaagtcttggtcgtcaacggcggtgagtgcatggctgccgatagaagagtgtgtacatactctgccggaaccgacactaatcccatctttctcttcaataaagaaatgatcctatgtgatcggccacccgcaattcctaagactacattctcaacggagaacgacatggaaattaaggtagaagagagcttgatgatgcccgctgtctttcatacggtagcatcccggacccagctggcgcttgaaatgtatgaagtggccaagaagttatgttctttctgtgagggactggttcacgatgaacacctccaacaccagggatgggctgccatcatggcgaatctcgaagactgttcaaattcctaccagaaactcctgttcaagtttgaatccatctactctaactacctgcagagtatcgaggatattaagttaaagctgacacacctgggtacagcagtctccgtgatggctaagattcctctcctggaatgtctgacacgacactcttatagagagtgcctgggacgcctggattcacttcccgaacacgaggatagcgagaaagcagagatgaagaggagcaccgaactggtcctgtcgccagacatgcccagaacaactaatgagagtctgctgacatccttccccaaaagcgtcgaacatgtatcgcccgatactgccgacgccgaatccggcaaagagattcgggaatcatgtcaatctaccgtacaccagcaggatgagaccacgattgatactaaggacggcgaccttcctttttttaatgtctccctgcttgactggattaatgtgcaggaccgccctaatgatgtggagtccttggtccgtaaatgttttgattccatgtctcgattggacccacgtattatcagaccatttatcgccgagtgcaggcaaacgattgccaaacttgataaccagaatatgaaggccatcaaaggacttgaggacaggttgtatgcattggatcagatgatagccagctgcggcaggctggtcaatgagcagaaagagctggcgcaaggctttctggcgaaccagaagagagcagagaacttgaaagacgcatccgtgttgccggatctgtgtctctcacacgccaaccaactaatgatcatgctccagaaccaccgtaagctgctcgatataaagcagaagtgcacaaccgctaagcaagagctagccaataatctgcatgtgaggttgaagtggtgctgtttcgtcatgcttcacgccgatcaggatggagaaaaactccaggcactgcttcgtctcgtcatcgaattactggagcgagtgaagatcgtggaggccctaagtactgtgccccagatgtactgtctggctgttgtagaggtcgtgcggcgtaagatgttcatcaaacattaccgggaatgggccggagcgctcgtgaaggacggtaagagactgtatgaagcggagaaatccaaaagggagtcattcgggaagttatttcgtaaatccttcctgcgcaacagattatttagggggttagacagctggcccccttccttctgcacacagaaaccacgtaagttcgactgcgagctgcccgacattagtctgaaagaccttcagttcctccagagcttctgcccatctgaggtgcagccattcttgcgggtgcccctactctgcgattttgagccgctccaccagcatgttctggccctgcacaacctggtgaaagccgctcagtccctggatgagatgtcccagacgattactgaccttctttctgagcagaaggcatccgtaagtcagacaagcccccaaagtgcctcaagcccgaggatggaaagtacggcgggaatcaccactacaacatctcccaggacaccccctccgctgaccgtccaggatccgctgtgccccgcagtgtgtcccctggaagaactgtccccagactctatcgacgcgcatacctttgattttgagacaatccctcacccaaatattgaacaaactatccaccaagtcagccttgatctggacagtttagccgagtccccggaaagtgatttcatgagcgcagtcaacgagttcgtaattgaagagaacctgtcatcgcctaatcccatttccgacccccagtcgccagagatgatggtcgagagcctttattccagcgtcatcaacgcgattgactcacggaggatgcaggacactaatgtctgcggaaaggaggactttggggatcacaccagcttgaacgtgcagcttgaacgctgtcgggtggtggctcaggacagccacttcagtattcagactattaaggaggatctgtgccatttcaggacattcgtacagaaggagcagtgcgacttcagcaattctctgaagtgtacagccgttgagatccgaaacattatagaaaaggttaagtgtagtctcgagattacactgaaagagaagcaccagaaagagctattatccctcaaaaacgaatacgagggcaaactcgatggcctgatcaaggagacagaggaaaatgagaataaaatcaaaaagcttaaaggagaactagtctgtctggaagaggtgttacagaacaaagacaacgagtttgctctcgtgaaacacgagaaggaagctgtgatctgtcttcagaacgagaaggaccagaagctgctggaaatggaaaatataatgcactcacaaaactgtgagatcaaggagttgaaacaatctagagagattgtactggaagatctgaagaagctgcatgtcgaaaacgatgagaagcttcagcttctgcgcgctgagctacagtcgttagagcagtctcacctaaaggagttggaggacacgctgcaagtgcgacacattcaggagttcgagaaggttatgactgatcaccgagtgagcctggaggagctcaagaaagagaaccagcagatcataaatcagatccaggaatcccatgccgaaattattcaggagaaggagaaacaactacaagaactgaaactcaaggtgagcgacctctccgacacccgatgtaagctggaggtcgagctggccctcaaggaggccgaaactgatgagatcaagattctgcttgaggagtctagggcacagcagaaggaaactttgaagtctttgttggaacaggagactgagaatcttcgtacggagattagcaagctgaatcagaagatccaagataataatgagaactatcaggtgggactggcggaactgaggaccctgatgactattgagaaggatcagtgcatcagcgagctgatttctagacacgaggaggaatccaacatccttaaagctgagctaaataaggtgaccagcctccacaatcaggcgttcgaaatcgaaaagaatttgaaggaacagataatcgagctgcaatctaagttagattcggaactgtccgctctggagagacagaaagatgagaaaatcacacagcaggaggaaaagtatgaggctatcattcagaatctggagaaggacaggcagaaattggttagcagtcaggagcaagatagggaacagctgatacagaaactgaactgcgaaaaagatgaagccatccagaccgcgcttaaagagttcaaactggagagggaggttgtggagaaggaactgctggagaaggttaaacacttggagaatcagatcgcaaaatctccagcgatcgactcgacccggggagacagtagtagcctggtcgccgagctacaggagaaactgcaggaggaaaaggccaaatttctggaacaactagaagagcaagaaaaaaggaagaacgaggaaatgcaaaacgtccgtacaagtttaatcgcggagcaacaaacaaatttcaatactgtgcttactcgcgagaaaatgcgcaaagaaaacattattaacgatctgtcagataaacttaaaagtacaatgcagcaacaggaaagagacaaagacctgatcgaaagcttgtctgaagatagggccagactccttgaagagaagaagaagcttgaggaagaagtgtccaaactgaggtcatcctccttcgtgccatcaccttatgtggccaccgcacctgagctgtatggtgcttgtgctccagagttgcccggagaaagcgatcgatccgcagtggagacagccgatgaaggacgtgtggattccgcaatggaaacctctatgatgagtgttcaggagaacatacacatgctttctgaggagaagcaacgaatcatgttgctggagagaacgctgcagctgaaagaagaggagaacaagcggctcaaccaacgtctaatgagtcagagcatgtcttccgtcagcagcagacacagtgaaaaaatagccatcagagatttccaggtgggcgacctggtgcttattatattggacgaaaggcatgacaattacgtgctgtttaccgtttctcccactttgtacttcttgcattcagaaagcctgccggctcttgacctcaagcctgcgagtggcgcttctagacggccatgggtcctcgggaaagtaatggagaaggaatattgccaggcgaaaaaagcgcagaatcgattcaaagtccctctaggaaccaagttttaccgcgtgaaagccgtgagttggaacaaaaaagtgtag

SEQ ID NO: 37723 - DNA, 4776 bp, Artificial Sequence
  derived and/or modified sequence
atgaagctatatgttttcttggtcaacacggggactactctcaccttcgacaccgaactgacagtgcagactgttgccgatttgaagcatgcgattcagagtaaatacaaaatcgctattcaacatcaagtcctggtcgtcaatggcggagaatgcatggccgctgacaggagagtctgtacctactccgctggaactgataccaatcccatatttctttttaataaagagatgatcctatgtgaccggcctcctgctattcccaagacaacctttagcacagagaacgacatggaaatcaaggtcgaagaatctctgatgatgcccgctgtgtttcataccgtggcctcccgcacacagcttgctttggagatgtacgaggtcgccaagaagctgtgcagcttctgcgaaggcctggtacacgatgagcacttgcagcatcaaggctgggcggcaattatggctaacctcgaagattgctccaacagctaccagaagcttttgttcaaattcgagagcatatatagcaactacctccagagcattgaggacatcaaactaaagctaacccacttaggcaccgccgtgtccgtgatggctaagatccctctgctggagtgcctaacaagacattcttacagagaatgcttggggaggctggatagccttcctgagcacgaggattctgagaaagccgagatgaagaggagtacagaactcgtcctgtcgccggatatgccgaggactaccaacgaatctctcctgacttcatttcctaagtcagtggagcacgttagtcccgataccgctgatgccgagtctgggaaggagatcagggaaagttgccaatctaccgtccatcagcaggacgaaacaactatcgatacgaaggacggtgacttaccattttttaatgtctcattgctcgactggatcaacgtgcaggataggccaaatgacgtcgaatctctggtgcgtaaatgctttgattcaatgagcaggctggatccacgcatcatccggcctttcatcgctgagtgtaggcagaccattgccaaactggataaccagaatatgaaggctatcaaaggattggaggaccggctctacgccctggatcagatgattgcaagctgtggcagactagtcaacgagcagaaagaacttgcccagggcttcctagcaaaccaaaagagggccgaaaatcttaaagacgcctcggtcctccctgatctgtgcctgtctcacgccaatcagctgatgattatgctgcagaaccacaggaaactccttgatataaagcaaaagtgcactacggccaagcaggagctggcgaacaatctgcatgtcaggctaaagtggtgttgctttgtaatgctgcatgccgatcaggatggtgagaagctccaggcattacttaggctggttattgagctgctcgaacgggttaagatcgtggaggccctgtccactgtgccgcagatgtactgcttggccgtggtggaagtggtcagaaggaaaatgttcattaagcattacagggaatgggctggggctttggtgaaagacgggaagagattgtacgaagccgaaaagagcaaaagggaaagttttggaaaactgttccgcaagtccttcctgcgcaacagactgtttcggggtctggattcgtggcctccctccttctgtacacaaaaaccaagaaagttcgattgcgaactgcctgatatatcccttaaagacctgcagtttctgcaatcattttgcccatcagaggttcagccattcctgagagtgcctctgctgtgtgatttcgaaccacttcatcagcatgtacttgcactgcacaatcttgtgaaggctgcgcagagtctagacgaaatgagccaaacaataacagacctgttaagtgagcagaaagcatccgtaagccagacgagtccacaatctgcttcgagtcccagaatggaatccactgccggtattaccacgacgacgagtccacggacgccgccacccctgaccgttcaggatcctttgtgccctgcagtgtgccctctggaggagctgtcgcctgactccatcgacgcacacactttcgactttgaaacaatccctcaccctaacattgaacaaaccatacaccaggtatctctcgatctggattctctcgccgaaagccccgaaagcgacttcatgtctgccgtgaatgaattcgtcatagaggagaatttgtcctctcccaaccctatatctgatccacagtctcctgaaatgatggttgagtcgctgtatagctcagtgattaatgctatcgattcaaggaggatgcaggataccaacgtatgcggtaaagaggattttggagaccacacctctttaaacgtgcagctagagcgatgccgtgtggtggctcaagactcacacttcagtatccaaacaatcaaagaggacctttgtcattttcgaacatttgtacagaaggagcagtgtgacttttcaaattctttgaagtgtacagctgttgagatcagaaatattattgaaaaggtcaaatgctctctagagataaccctcaaggagaagcaccagaaagaattactcagcttgaaaaatgaatacgaggggaagttggacggcctaattaaagagacagaggaaaatgagaataagatcaaaaagctgaaaggagaacttgtgtgtctcgaagaagtgctgcagaacaaggacaacgaatttgctcttgtgaaacatgagaaggaggcggtgatttgcttacagaatgagaaagatcagaaactgttggagatggagaatattatgcactcgcagaattgtgaaataaaggaattgaagcagagtagagaaatcgttctggaggatttaaaaaagttacacgtggaaaacgacgaaaaactgcaactgttgagagctgagctccaatcccttgagcagagtcacctgaaggagctggaggacactttgcaagtaagacatatccaagagttcgagaaggtcatgaccgaccacagggtttctctggaagaactgaaaaaagaaaatcagcagattataaaccagatccaggagagtcatgcggagattatacaggagaaggaaaaacagcttcaagaattaaagctgaaagtgagcgatctttcagacactagatgtaagctggaggtcgaactcgcactgaaagaggcagaaacagacgagattaagatcttgcttgaggagagccgcgctcagcagaaggagacgctaaaatcactcttagaacaagaaactgagaatttaagaactgagatatcgaagcttaaccaaaaaatccaagataataatgagaactaccaggttgggttagctgagcttcgcaccctcatgaccatcgagaaagaccagtgcatatctgagctgatcagtcggcatgaagaggagagcaacattctgaaagcagaactcaataaggttacttctctccacaaccaggcatttgaaatcgagaaaaatttgaaagagcagatcattgagctgcagtccaagcttgacagcgaattgagcgccctcgaaagacagaaagatgaaaaaatcacccagcaggaagaaaaatatgaagctatcatacagaacctggaaaaagatcggcagaagctcgttagtagccaggagcaggaccgagaacagttaatccagaagctgaactgcgagaaagacgaggcaatccagacagctctgaaagaattcaaactcgagcgggaggtggtagagaaagagctcctagaaaaggtgaagcacttggagaaccaaatcgccaagtcaccagccattgactcaactcgcggtgatagttcctctctggtggccgaactgcaggaaaaactgcaggaggaaaaggccaagtttcttgagcaattagaggagcaggagaagagaaaaaatgaagagatgcaaaatgtgcgcacatctttgattgccgagcaacaaactaattttaacactgtgctgactcgggagaagatgagaaaggaaaacatcattaacgacctgtccgataaactgaagtcaactatgcaacaacaggaacgtgataaagatttaatcgagtctcttagtgaagacagagctcgattactcgaagaaaagaaaaagcttgaagaagaggtctcgaaactgagaagttcaagttttgtgccttctccttatgttgctactgctccagagctctatggggcatgtgcccctgaactgccgggagaatccgaccgatctgccgtcgagacagcagacgaaggcagagtcgactccgctatggagacctccatgatgtctgtgcaggagaacattcatatgttgtccgaggaaaagcagcgtatcatgttgctggagaggacccttcagctgaaggaagaagagaacaagagactaaaccagcgtcttatgtcccagagtatgtccagtgtctcctcgcgacactcagagaaaatcgcaataagagatttccaggtgggagacctcgtacttattatcctggatgagaggcacgacaattacgttcttttcactgtctctccaacactgtattttctgcatagcgaaagcctaccggctctggacctgaaacctgcgagcggagcatcacgcagaccctgggtgctggggaaggtaatggaaaaggagtactgccaggcaaaaaaggcgcagaaccgatttaaagtacccctgggcactaagttttacagagtgaaggcagtgagctggaataagaaggtatag

SEQ ID NO: 37724 - DNA, 6614 bp, Artificial Sequence
  derived and/or modified sequence
aacaaaccaagccgcggcggtgtccgcggccctgccgagccctcggcgttgcctcagaatcccccagtcgcctgggcccctcggctctgacaggccgcggccttctgtcccccggccccagacccagagccgaggggcctgctcgcgtccttgtccgcccggacccctccctgcctcctagagttcggggccgcggcgggcgggcgcccgggacgccggcggttgtgtcggcttagcggtgccgaatgggcggttggtaaccgctgccgaggactaggcggcggcggaagatggtgccgggggtcgctggctctgctgctgccgccggcgaaggaggaggcgttgccggttttctgagtttaaccagtaatgccattcagttgccaatctcaagcaaagcaaacataagccagttttaatctactttttaagaaaagtggtagtccttttcacagtgcctgacgtaactgtatcagagggtgaggtataagctcacagaattcagataaatcatcatgaagttatatgtatttctggttaacactggaactactctaacatttgacactgaacttacagtgcaaactgtggcagaccttaagcatgccattcaaagcaaatacaagattgctattcaacaccaggtgctggtggtcaatggaggagaatgcatggctgcagatcgaagagtgtgtacctacagtgctgggacggatacaaatccaatttttctttttaacaaagaaatgatcttatgtgatcgtccacctgctattcctaaaactaccttttcgacagaaaatgacatggaaataaaagttgaagaatctcttatgatgcctgcagtttttcatactgttgcttcaaggacacagcttgcattggaaatgtatgaagttgccaagaaactttgttctttttgtgaaggtcttgtacatgatgaacatcttcaacaccaaggctgggctgcaatcatggccaacctggaggactgttcaaattcataccaaaagctacttttcaagtttgaaagtatttattcaaattatctgcagtccatagaagacatcaagttaaaacttactcatttaggaactgcagtttcagtaatggccaagattccactgttggagtgcctaaccagacatagttacagagaatgtttgggaagactggattctttacctgaacatgaagactcagaaaaagctgagatgaaaagatccactgaactggtgctctctcctgatatgcctagaacaactaacgaatctttgttaacctcatttcccaagtcagtggaacatgtgtccccagataccgcagatgctgaaagtggcaaagaaattagggaatcttgtcaaagtactgttcatcagcaagatgaaactacgattgacactaaagatggtgatctgcccttttttaatgtctctttgttagactggataaatgttcaagatagacctaatgatgtggaatctttggtcaggaagtgctttgattctatgagcaggcttgatccaaggattattcgaccatttatagcagaatgccgtcaaactattgccaaacttgataatcagaatatgaaagccattaaaggacttgaagatcggctctacgccctggaccagatgattgctagctgtggccgactggtgaatgaacagaaagagcttgctcagggatttttagctaatcagaagagagctgaaaacttaaaggatgcatctgtattacctgatttatgcctgagtcacgcaaatcagttgatgattatgttgcaaaatcatagaaaactgttagatattaagcagaagtgtaccactgccaaacaagaactagcaaataacctacatgtcagactgaagtggtgttgctttgtaatgcttcatgctgatcaagatggagagaagttacaagctttgctccgcctcgtaatagagctgttagaaagagtcaaaattgttgaagctcttagtacagttcctcagatgtactgcttagctgttgttgaggttgtaagaagaaaaatgttcataaaacactacagggagtgggctggtgctttagtcaaagatggaaagagattatatgaagcagaaaaatcaaaaagggaatcctttgggaaattatttaggaagtcttttttaagaaatcgtctgtttaggggactggactcctggcccccttccttttgtactcaaaagcctcgaaagtttgactgtgaacttccagatatttcattaaaagatttacagtttctgcaatcattttgtccttcggaagttcagccattcctcagggttcccttactttgtgactttgaacctctacaccagcatgtacttgctctacataatttggtaaaagcagcacaaagtttggatgaaatgtcacagaccattacagatctactgagtgaacaaaaggcatctgtgagtcagacatccccacagtctgcttcttcaccaaggatggaaagtacagcaggaattacaactactacctcaccgagaactcctccaccactgactgttcaggatcccttatgtcctgcagtttgtcccttagaagaattatctccagatagtattgatgcacatacgtttgattttgaaactattccccatccaaacatagaacagactattcaccaagtttctttagacttggattcattagcagaaagtcctgaatcagattttatgtctgctgtgaatgagtttgtaatagaagaaaatttgtcgtctcctaatcctataagtgatccacaaagcccagaaatgatggtggaatcactttattcatcagttatcaatgcgatagacagtagacgaatgcaggatacaaatgtatgtggtaaggaggattttggagatcatacttctctgaatgtccagttggaaagatgtagagttgttgcccaagactctcacttcagtatacaaaccattaaggaagacctttgccactttagaacatttgtacaaaaagaacagtgtgacttctcaaattcattaaaatgtacagcagtagaaataagaaacattattgaaaaagtaaaatgttctctggaaataacactaaaagaaaaacatcaaaaagaactactgtctttaaaaaatgaatatgaaggtaaacttgacggactaataaaggaaactgaagagaatgaaaacaaaattaaaaaattgaagggagagttagtatgccttgaggaggttttacaaaataaagataatgaatttgctttggttaaacatgaaaaagaagctgtaatctgcctgcagaatgaaaaggatcagaagttgttagagatggaaaatataatgcactctcaaaattgtgaaattaaagaactgaagcagtcacgagaaatagtgttagaagacttaaaaaagctccatgttgaaaatgatgagaagttacagttattgagggcagaacttcagtccttggagcaaagtcatctaaaggaattagaggacacacttcaggttaggcacatacaagagtttgagaaggttatgacagaccacagagtttctttggaggaattaaaaaaggaaaaccaacaaataattaatcaaatacaagaatctcatgctgaaattatccaggaaaaagaaaaacagttacaggaattaaaactcaaggtttctgatttgtcagacacgagatgcaagttagaggttgaacttgcgttgaaggaagcagaaactgatgaaataaaaattttgctggaagaaagcagagcccagcagaaggagaccttgaaatctcttcttgaacaagagacagaaaatttgagaacagaaattagtaaactcaaccaaaagattcaggataataatgaaaattatcaggtgggcttagcagagctaagaactttaatgacaattgaaaaagatcagtgtatttccgagttaattagtagacatgaagaagaatctaatatacttaaagctgaattaaacaaagtaacatctttgcataaccaagcatttgaaatagaaaaaaacctaaaagaacaaataattgaactgcagagtaaattggattcagaattgagtgctcttgaaagacaaaaagatgaaaaaattacccaacaagaagagaaatacgaagctattatccagaaccttgagaaagacagacaaaaattggtcagcagccaggagcaagacagagaacagttaattcagaagcttaattgtgaaaaagatgaagctattcagactgccctaaaagaatttaaattggagagagaagttgttgagaaagagttattagaaaaagttaaacatcttgagaatcaaatagcaaaaagtcctgccattgactctaccagaggagattcttcaagcttagttgctgaacttcaagaaaagcttcaggaagaaaaagctaagtttctagaacaacttgaagagcaagaaaaaagaaagaatgaagaaatgcaaaatgttcgaacatctttgattgcggaacaacagaccaattttaacactgttttaacaagagagaaaatgagaaaagaaaacataataaatgatcttagtgataagttgaaaagtacaatgcagcaacaagaacgggataaagatttgatagagtcactttctgaagatcgagctcgtttgcttgaggaaaagaaaaagcttgaagaagaagtcagtaagttgcgtagtagcagttttgttccttcaccatatgtagctacagccccagaactttatggagcttgtgcacctgaactcccaggtgaatcagatagatccgctgtggaaacagcagatgaaggaagagtggattcagcaatggagacaagcatgatgtctgtacaagaaaatattcatatgttgtctgaagaaaaacagcggataatgctgttagaacgaacattgcaattgaaagaagaagaaaataaacggttaaatcaaagactgatgtctcagagcatgtcttcagtatcttcaaggcattctgaaaagatagctattagagattttcaggtgggagatttggtactcatcatcctagacgaacgccatgacaattatgtgttatttactgttagtcctactttatattttctacattcagagtctctacctgccctggatctcaaaccagcttcaggtgcatctagaagaccctgggtacttggaaaagtaatggaaaaagaatactgtcaagccaaaaaggcacaaaacagatttaaagttcctttggggacaaagttttacagagtgaaagccgtatcatggaataagaaagtataacttatggacaaaattaatacattctatgacatttttttctgatttgtcctgcagtgctcattcatcactccaaaaacagcaggccatctttttatgcaaaagtcagcgtgacaatatacttcactggtgtacatcgtttactttttaactggcttcattttaggaataataaattcatcagaatccttggctgaattaaaatggtttttgttttttggtttttttttttacccagacaactctagaaatgcggaccaaactacttcattttctcaaagggcataccttgtgcattgtggcttatgatgagccatattaattgcctgttaaatatacactagcttgaacttagatgttaaatgttattattaccagcatttgtccttttgtgaaatcagtatcagaatacttgcactctttaacacattctttataaaatgtataaattattcagaactatttaaaataaagaggagtgttattgcatgctgataatcattttgagtttgcctcagtagatactaaagcaaattgtttcagtttttttaaatgccctttgatgtttcaaaaaaaaaaaggaactgtaatttgattgactgattttaagatcagccataagtaatcagcaatcttcaaaagcactttcagtggattggtcatctgggttctaaagggaagagtctgtgctactaaccatttcaaatgcagactcaaaccttcccaacatctttatgactctagaataatcatattgatgaaatcgtaattcatggttgagtttcagaacaaaagatattcattgcacattaaccatttagaggtcatttaaataacaaaatattgtattgtaaaagaactgtacaattttaaaacaataaagatttgaacctgtaaatgtgtgtgccttttaaagaaggatacatttttaatatatttgagtgattgctgggaagtgtgaaaatattgttatgtatcatatcaaagagaaacatgtttattacaaaaatgttctttaactatatactatgtaacagggtaaacagtgttatgtagaatagaattgtgtaaactagatctttagagaagttgccattgagcaaagttatttaaatgagttagttgagttggatgagaattgtttgaggtttgttgctagagaacaataataaaataattctttttcagaaaatatttaatttcttcataaaaataagttaaatatttttttaaatatgtatatctaatagtacaaaatggaataaacatcatagtgtatagaaaactgaatttgacaagttaatgaataaatgaacaaatgatttc

SEQ ID NO: 37725 - DNA, 4776 bp, Artificial Sequence
  derived and/or modified sequence
atgaagttatatgtatttctggttaacactggaactactctaacatttgacactgaacttacagtgcaaactgtggcagaccttaagcatgccattcaaagcaaatacaagattgctattcaacaccaggtgctggtggtcaatggaggagaatgcatggctgcagatcgaagagtgtgtacctacagtgctgggacggatacaaatccaatttttctttttaacaaagaaatgatcttatgtgatcgtccacctgctattcctaaaactaccttttcgacagaaaatgacatggaaataaaagttgaagaatctcttatgatgcctgcagtttttcatactgttgcttcaaggacacagcttgcattggaaatgtatgaagttgccaagaaactttgttctttttgtgaaggtcttgtacatgatgaacatcttcaacaccaaggctgggctgcaatcatggccaacctggaggactgttcaaattcataccaaaagctacttttcaagtttgaaagtatttattcaaattatctgcagtccatagaagacatcaagttaaaacttactcatttaggaactgcagtttcagtaatggccaagattccactgttggagtgcctaaccagacatagttacagagaatgtttgggaagactggattctttacctgaacatgaagactcagaaaaagctgagatgaaaagatccactgaactggtgctctctcctgatatgcctagaacaactaacgaatctttgttaacctcatttcccaagtcagtggaacatgtgtccccagataccgcagatgctgaaagtggcaaagaaattagggaatcttgtcaaagtactgttcatcagcaagatgaaactacgattgacactaaagatggtgatctgcccttttttaatgtctctttgttagactggataaatgttcaagatagacctaatgatgtggaatctttggtcaggaagtgctttgattctatgagcaggcttgatccaaggattattcgaccatttatagcagaatgccgtcaaactattgccaaacttgataatcagaatatgaaagccattaaaggacttgaagatcggctctacgccctggaccagatgattgctagctgtggccgactggtgaatgaacagaaagagcttgctcagggatttttagctaatcagaagagagctgaaaacttaaaggatgcatctgtattacctgatttatgcctgagtcacgcaaatcagttgatgattatgttgcaaaatcatagaaaactgttagatattaagcagaagtgtaccactgccaaacaagaactagcaaataacctacatgtcagactgaagtggtgttgctttgtaatgcttcatgctgatcaagatggagagaagttacaagctttgctccgcctcgtaatagagctgttagaaagagtcaaaattgttgaagctcttagtacagttcctcagatgtactgcttagctgttgttgaggttgtaagaagaaaaatgttcataaaacactacagggagtgggctggtgctttagtcaaagatggaaagagattatatgaagcagaaaaatcaaaaagggaatcctttgggaaattatttaggaagtcttttttaagaaatcgtctgtttaggggactggactcctggcccccttccttttgtactcaaaagcctcgaaagtttgactgtgaacttccagatatttcattaaaagatttacagtttctgcaatcattttgtccttcggaagttcagccattcctcagggttcccttactttgtgactttgaacctctacaccagcatgtacttgctctacataatttggtaaaagcagcacaaagtttggatgaaatgtcacagaccattacagatctactgagtgaacaaaaggcatctgtgagtcagacatccccacagtctgcttcttcaccaaggatggaaagtacagcaggaattacaactactacctcaccgagaactcctccaccactgactgttcaggatcccttatgtcctgcagtttgtcccttagaagaattatctccagatagtattgatgcacatacgtttgattttgaaactattccccatccaaacatagaacagactattcaccaagtttctttagacttggattcattagcagaaagtcctgaatcagattttatgtctgctgtgaatgagtttgtaatagaagaaaatttgtcgtctcctaatcctataagtgatccacaaagcccagaaatgatggtggaatcactttattcatcagttatcaatgcgatagacagtagacgaatgcaggatacaaatgtatgtggtaaggaggattttggagatcatacttctctgaatgtccagttggaaagatgtagagttgttgcccaagactctcacttcagtatacaaaccattaaggaagacctttgccactttagaacatttgtacaaaaagaacagtgtgacttctcaaattcattaaaatgtacagcagtagaaataagaaacattattgaaaaagtaaaatgttctctggaaataacactaaaagaaaaacatcaaaaagaactactgtctttaaaaaatgaatatgaaggtaaacttgacggactaataaaggaaactgaagagaatgaaaacaaaattaaaaaattgaagggagagttagtatgccttgaggaggttttacaaaataaagataatgaatttgctttggttaaacatgaaaaagaagctgtaatctgcctgcagaatgaaaaggatcagaagttgttagagatggaaaatataatgcactctcaaaattgtgaaattaaagaactgaagcagtcacgagaaatagtgttagaagacttaaaaaagctccatgttgaaaatgatgagaagttacagttattgagggcagaacttcagtccttggagcaaagtcatctaaaggaattagaggacacacttcaggttaggcacatacaagagtttgagaaggttatgacagaccacagagtttctttggaggaattaaaaaaggaaaaccaacaaataattaatcaaatacaagaatctcatgctgaaattatccaggaaaaagaaaaacagttacaggaattaaaactcaaggtttctgatttgtcagacacgagatgcaagttagaggttgaacttgcgttgaaggaagcagaaactgatgaaataaaaattttgctggaagaaagcagagcccagcagaaggagaccttgaaatctcttcttgaacaagagacagaaaatttgagaacagaaattagtaaactcaaccaaaagattcaggataataatgaaaattatcaggtgggcttagcagagctaagaactttaatgacaattgaaaaagatcagtgtatttccgagttaattagtagacatgaagaagaatctaatatacttaaagctgaattaaacaaagtaacatctttgcataaccaagcatttgaaatagaaaaaaacctaaaagaacaaataattgaactgcagagtaaattggattcagaattgagtgctcttgaaagacaaaaagatgaaaaaattacccaacaagaagagaaatacgaagctattatccagaaccttgagaaagacagacaaaaattggtcagcagccaggagcaagacagagaacagttaattcagaagcttaattgtgaaaaagatgaagctattcagactgccctaaaagaatttaaattggagagagaagttgttgagaaagagttattagaaaaagttaaacatcttgagaatcaaatagcaaaaagtcctgccattgactctaccagaggagattcttcaagcttagttgctgaacttcaagaaaagcttcaggaagaaaaagctaagtttctagaacaacttgaagagcaagaaaaaagaaagaatgaagaaatgcaaaatgttcgaacatctttgattgcggaacaacagaccaattttaacactgttttaacaagagagaaaatgagaaaagaaaacataataaatgatcttagtgataagttgaaaagtacaatgcagcaacaagaacgggataaagatttgatagagtcactttctgaagatcgagctcgtttgcttgaggaaaagaaaaagcttgaagaagaagtcagtaagttgcgtagtagcagttttgttccttcaccatatgtagctacagccccagaactttatggagcttgtgcacctgaactcccaggtgaatcagatagatccgctgtggaaacagcagatgaaggaagagtggattcagcaatggagacaagcatgatgtctgtacaagaaaatattcatatgttgtctgaagaaaaacagcggataatgctgttagaacgaacattgcaattgaaagaagaagaaaataaacggttaaatcaaagactgatgtctcagagcatgtcttcagtatcttcaaggcattctgaaaagatagctattagagattttcaggtgggagatttggtactcatcatcctagacgaacgccatgacaattatgtgttatttactgttagtcctactttatattttctacattcagagtctctacctgccctggatctcaaaccagcttcaggtgcatctagaagaccctgggtacttggaaaagtaatggaaaaagaatactgtcaagccaaaaaggcacaaaacagatttaaagttcctttggggacaaagttttacagagtgaaagccgtatcatggaataagaaagtataa

SEQ ID NO: 37726 - protein, 883 aa, Artificial Sequence
  derived and/or modified sequence
MQKIMHISVLLSPVLWGLIFGVSSNSIQIGGLFPRGADQEYSAFRVGMVQFSTSEFRLTPHIDNLEVANSFAVTNAFCSQFSRGVYAIFGFYDKKSVNTITSFCGTLHVSFITPSFPTDGTHPFVIQMRPDLKGALLSLIEYYQWDKFAYLYDSDRGLSTLQAVLDSAAEKKWQVTAINVGNINNDKKDEMYRSLFQDLELKKERRVILDCERDKVNDIVDQVITIGKHVKGYHYIIANLGFTDGDLLKIQFGGANVSGFQIVDYDDSLVSKFIERWSTLEEKEYPGAHTTTIKYTSALTYDAVQVMTEAFRNLRKQRIEISRRGNAGDCLANPAVPWGQGVEIERALKQVQVEGLSGNIKFDQNGKRINYTINIMELKTNGPRKIGYWSEVDKMVVTLTELPSGNDTSGLENKTVVVTTILESPYVMMKKNHEMLEGNERYEGYCVDLAAEIAKHCGFKYKLTIVGDGKYGARDADTKIWNGMVGELVYGKADIAIAPLTITLVREEVIDFSKPFMSLGISIMIKKPQKSKPGVFSFLDPLAYEIWMCIVFAYIGVSVVLFLVSRFSPYEWHTEEFEDGRETQSSESTNEFGIFNSLWFSLGAFMQQGCDISPRSLSGRIVGGVWWFFTLIIISSYTANLAAFLTVERMVSPIESAEDLSKQTEIAYGTLDSGSTKEFFRRSKIAVFDKMWTYMRSAEPSVFVRTTAEGVARVRKSKGKYAYLLESTMNEYIEQRKPCDTMKVGGNLDSKGYGIATPKGSSLRNAVNLAVLKLNEQGLLDKLKNKWWYDKGECGSGGGDSKEKTSALSLSNVAGVFYILVGGLGLAMLVALIEFCYKSRAEAKRMKVAKNAQNINPSSSQNSQNFATYKEGYNVYGIESVKI

SEQ ID NO: 37727 - protein, 730 aa, Artificial Sequence
  derived and/or modified sequence
MVQFSTSEFRLTPHIDNLEVANSFAVTNAFCSQFSRGVYAIFGFYDKKSVNTITSFCGTLHVSFITPSFPTDGTHPFVIQMRPDLKGALLSLIEYYQWDKFAYLYDSDRGLSTLQAVLDSAAEKKWQVTAINVGNINNDKKDEMYRSLFQDLELKKERRVILDCERDKVNDIVDQVITIGKHVKGYHYIIANLGFTDGDLLKIQFGGANVSGFQIVDYDDSLVSKFIERWSTLEEKEYPGAHTTTIKYTSALTYDAVQVMTEAFRNLRKQRIEISRRGNAGDCLANPAVPWGQGVEIERALKQVQVEGLSGNIKFDQNGKRINYTINIMELKTNGPRKIGYWSEVDKMVVTLTELPSGNDTSGLENKTVVVTTILESPYVMMKKNHEMLEGNERYEGYCVDLAAEIAKHCGFKYKLTIVGDGKYGARDADTKIWNGMVGELVYGKADIAIAPLTITLVREEVIDFSKPFMSLGISIMIKKPQKSKPGVFSFLDPLAYEIWMCIVFAYIGVSVVLFLVSRFSPYEWHTEEFEDGRETQSSESTNEFGIFNSLWFSLGAFMQQGCDISPRSLSGRIVGGVWWFFTLIIISSYTANLAAFLTVERMVSPIESAEDLSKQTEIAYGTLDSGSTKEFFRRSKIAVFDKMWTYMRSAEPSVFVRTTAEGVARVRKSKGKYAYLLESTMNEYIEQRKPCDTMKVGGNLDSKGYGIATPKGSSLSGVTFKTLLFVCCG

SEQ ID NO: 37728 - protein, 145 aa, Artificial Sequence
  derived and/or modified sequence
MVQFSTSEFRLTPHIDNLEVANSFAVTNAFCSQFSRGVYAIFGFYDKKSVNTITSFCGTLHVSFITPSFPTDGTHPFVIQMRPDLKGALLSLIEYYQWDKFAYLYDSDRGLSTLQAVLDSAAEKKWQVTAINVGNINNDKKDEMY

SEQ ID NO: 37729 - protein, 125 aa, Artificial Sequence
  derived and/or modified sequence
MQKIMHISVLLSPVLWGLIFGVSSNSIQIGGLFPRGADQEYSAFRVGMVQFSTSEFRLTPHIDNLEVANSFAVTNAFCSQFSRGVYAIFGFYDKKSVNTITSFCGTLHVSFITPSFPTDGTHPFV

SEQ ID NO: 37730 - DNA, 2652 bp, Artificial Sequence
  derived and/or modified sequence
atgcagaaaatcatgcacataagcgtccttttgagtccagtgttgtggggattgatcttcggcgtatcttccaactctatccagattggcggactgtttccgagaggtgccgaccaggagtactccgccttccgcgtaggcatggttcaattttccacttcagaattccgcctaactcctcacatagacaatttagaagtggccaacagctttgccgtgacaaacgcattctgctcccagttcagcagaggagtttacgccatttttggcttctacgataagaaaagcgtgaacaccattacttctttctgtgggaccctgcacgtttccttcattaccccctcctttcctacagatggtacgcatccctttgtgattcagatgcggcccgaccttaaaggcgccctgctgagtctgattgaatattatcagtgggataaattcgcttacctttatgattccgacagagggctgagcactcttcaggcggtgctggattccgccgccgagaagaagtggcaggtgactgccatcaacgtgggcaacataaataatgacaagaaagacgagatgtatcgatccctgttccaggacctcgaactgaagaaagagaggagggtgatcctggattgtgaacgcgataaggtaaacgacatagtcgaccaggtgattacgattggcaagcacgtgaaaggataccactacataatcgcgaatcttggattcactgacggagatctgctgaagattcagtttggcggggccaatgtgtcaggctttcagatcgtcgactacgatgacagcctggtatctaaatttatcgagaggtggagcacactggaagaaaaagagtaccctggcgcacacaccactactatcaagtatacatccgcactgacctatgacgccgtgcaggtgatgaccgaggctttcagaaatctgcgcaagcagcgcattgagattagccgaagaggcaatgctggggactgtttggctaaccctgccgttccctggggccaaggcgtagaaatcgaacgggccctgaaacaggtgcaggtagaaggcctttccgggaatattaagtttgatcaaaacggcaaaaggattaattataccatcaacattatggagctgaagacaaatgggccccggaagattggctactggagcgaggtcgacaagatggtggtgaccctcacggagctgccctctggtaatgatacgagcggcctcgagaacaaaacagtggtagtgacgaccattttggagtctccctatgtgatgatgaagaaaaaccacgaaatgctggaaggtaacgaacggtatgaaggatattgtgtcgacctggccgccgaaatcgcaaagcactgtggatttaaatataagctgactattgtcggcgatggcaagtacggcgccagggatgccgatacaaagatttggaacgggatggttggcgagctggtgtatgggaaggccgatattgctatcgctccgttgactattaccttggtgcgggaagaggttattgacttcagcaagccatttatgtctctaggaattagcattatgatcaaaaagcctcagaagtctaagccaggggtgttcagcttcctggaccccctagcttatgaaatatggatgtgtatcgtatttgcctatattggagttagcgtggttttatttttagtgtccagattcagcccctatgagtggcacactgaggagtttgaggacgggcgagagacccagtcttcagagagcacaaacgagttcgggatattcaatagcctctggttttctttgggggctttcatgcaacaggggtgcgacatctctccccggagcctgtcagggaggatagtcgggggggtctggtggttcttcacattgatcatcatttcatcatacaccgcaaacctcgccgctttcttgaccgtggagaggatggtgtctcctatcgagagcgctgaggatctctcgaagcaaacggagattgcctatggtacccttgattccggctcgacaaaggaattttttagaagatccaaaatcgctgtctttgataagatgtggacgtatatgagatcggcagagccttcagtgttcgttcggaccacagccgagggagtggcaagagtgaggaagagcaaaggcaaatacgcatatctactcgaaagtaccatgaatgaatacattgagcagaggaaaccctgcgacacaatgaaggtcgggggcaacctggatagcaaaggttatggcatagccacccctaaaggttctagcctacgtaatgctgttaacctggccgtgctcaagctcaatgagcagggtttgctggacaaattaaagaacaaatggtggtatgacaaaggggaatgtggcagcggaggaggcgacagcaaggagaagacctccgcgctgagtctatcaaacgtggccggggtcttttatatactcgtaggtggattaggtctcgccatgctcgtagctcttatagaattctgctacaagtcccgggctgaggctaagcggatgaaagtggccaaaaatgcccagaacataaatcctagtagctctcagaattcccagaacttcgccacgtataaggaaggatacaacgtgtacggcattgagtcagtcaaaatatag

SEQ ID NO: 37731 - DNA, 147 bp, Artificial Sequence
  derived and/or modified sequence
atgcagaagataatgcatataagcgtgctactcagtccagtgctgtgggggctcatttttggagtgtcaagcaattctatacaaataggaggcctgttccctagaggcgctgaccaggaatactcagccttccgcgttggtatgtag

SEQ ID NO: 37732 - DNA, 3445 bp, Artificial Sequence
  derived and/or modified sequence
ccgagacactgggaccacagcggcagctccgctgaaaactgcattcagccagtcctccggacttctggagcggggacagggcgcagggcatcagcagccaccagcaggacctgggaaatagggattcttctgcctccacttcaggttttagcagcttggtgctaaattgctgtctcaaaatgcagaggatctaatttgcagaggaaaacagccaaagaaggaagaggaggaaaaggaaaaaaaaaggggtatattgtggatgctctacttttcttggaaatgcaaaagattatgcatatttctgtcctcctttctcctgttttatggggactgatttttggtgtctcttctaacagcatacagataggggggctatttcctaggggcgccgatcaagaatacagtgcatttcgagtagggatggttcagttttccacttcggagttcagactgacaccccacatcgacaatttggaggtggcaaacagcttcgcagtcactaatgctttctgctcccagttttcgagaggagtctatgctatttttggattttatgacaagaagtctgtaaataccatcacatcattttgcggaacactccacgtctccttcatcactcccagcttcccaacagatggcacacatccatttgtcattcagatgagacccgacctcaaaggagctctccttagcttgattgaatactatcaatgggacaagtttgcatacctctatgacagtgacagaggcttatcaacactgcaagctgtgctggattctgctgctgaaaagaaatggcaagtgactgctatcaatgtgggaaacattaacaatgacaagaaagatgagatgtaccgatcactttttcaagatctggagttaaaaaaggaacggcgtgtaattctggactgtgaaagggataaagtaaacgacattgtagaccaggttattaccattggaaaacatgttaaagggtaccactacatcattgcaaatctgggatttactgatggagacctattaaaaatccagtttggaggtgcaaatgtctctggatttcagatagtggactatgatgattcgttggtatctaaatttatagaaagatggtcaacactggaagaaaaagaataccctggagctcacacaacaacaattaagtatacttctgctctgacctatgatgccgttcaagtgatgactgaagccttccgcaacctaaggaagcaaagaattgaaatctcccgaagggggaatgcaggagactgtctggcaaacccagcagtgccctggggacaaggtgtagaaatagaaagggccctcaaacaggttcaggttgaaggtctctcaggaaatataaagtttgaccagaatggaaaaagaataaactatacaattaacatcatggagctcaaaactaatgggccccggaagattggctactggagtgaagtggacaaaatggttgttacccttactgagctcccttctggaaatgacacctctgggcttgagaataagactgttgttgtcaccacaattttggaatctccgtatgttatgatgaagaaaaatcatgaaatgcttgaaggcaatgagcgctatgagggctactgtgttgacctggctgcagaaatcgccaaacattgtgggttcaagtacaagttgacaattgttggtgatggcaagtatggggccagggatgcagacacgaaaatttggaatgggatggttggagaacttgtatatgggaaagctgatattgcaattgctccattaactattacccttgtgagagaagaggtgattgacttctcaaagcccttcatgagcctcgggatatctatcatgatcaagaagcctcagaagtccaaaccaggagtgttttcctttcttgatcctttagcctatgagatctggatgtgcattgtttttgcctacattggggtcagtgtagttttattcctggtcagcagatttagcccctacgagtggcacactgaggagtttgaagatggaagagaaacacaaagtagtgaatcaactaatgaatttgggatttttaatagtctctggttttccttgggtgcctttatgcagcaaggatgcgatatttcgccaagatccctctctgggcgcattgttggaggtgtgtggtggttctttaccctgatcataatctcctcctacacggctaacttagctgccttcctgactgtagagaggatggtgtctcccatcgaaagtgctgaggatctttctaagcaaacagaaattgcttatggaacattagactctggctccactaaagagtttttcaggagatctaaaattgcagtgtttgataaaatgtggacctacatgcggagtgcggagccctctgtgtttgtgaggactacggccgaaggggtggctagagtgcggaagtccaaagggaaatatgcctacttgttggagtccacgatgaacgagtacattgagcaaaggaagccttgcgacaccatgaaagttggtggaaacctggattccaaaggctatggcatcgcaacacctaaaggatcctcattaagaaatgcggttaacctcgcagtactaaaactgaatgaacaaggcctgttggacaaattgaaaaacaaatggtggtacgacaaaggagagtgcggcagcgggggaggtgattccaaggaaaagaccagtgccctcagtctgagcaacgttgctggagtattctacatccttgtcgggggccttggtttggcaatgctggtggctttgattgagttctgttacaagtcaagggccgaggcgaaacgaatgaaggtggcaaagaatgcacagaatattaacccatcttcctcgcagaattcacagaattttgcaacttataaggaaggttacaacgtatatggcatcgaaagtgttaaaatttaggggatgaccttgaatgatgccatgaggaacaaggcaaggctgtcaattacaggaagtactggagaaaatggacgtgttatgactccagaatttcccaaagcagtgcatgctgtcccttacgtgagtcctggcatgggaatgaatgtcagtgtgactgatctctcgtgattgataagaaccttttgagtgccttacacaatggttttcttgtgtgtttattgtcaaagtggtgagaggcatccagtatcttgaagacttttctttcagccaagaattcttaaatatgtggagttcatcttgaattgtaaggaatgattaattaaaacacaacatctttttctactcgagttacagacaaagcgtggtggacatgcacagctaacatggaagtactataatttacctgaagtctttgtacagacaacaaacctgtttctgcagccactattgttagtctcttgattcataatgacttaagcacacttgacatcaactgcatcaagatgtgacatgt

SEQ ID NO: 37733 - DNA, 2652 bp, Artificial Sequence
  derived and/or modified sequence
atgcagaagatcatgcacatctctgtgctgctgagccctgtgctgtggggcctcatcttcggcgtgagcagcaacagcatccagattggaggcctcttccccagaggagctgaccaggagtacagcgccttccgggtgggcatggtgcagttcagcaccagcgagttccggctgaccccccacatcgacaacctggaggtggccaacagctttgctgtgaccaatgccttctgcagccagttcagccggggcgtgtatgccatcttcggcttctatgacaagaagtctgtgaacaccatcaccagcttctgtggcaccctgcacgtgtccttcatcacccccagcttccccacagatggcacccaccccttcgtcatccagatgaggccagacctgaagggggccctgctgagcctcatcgagtactaccagtgggacaagtttgcctacctgtatgacagcgaccggggcctgagcaccctgcaggccgtgctggacagcgctgctgagaagaagtggcaggtgacagccatcaacgtgggcaacatcaacaatgacaagaaggatgagatgtaccgcagcctcttccaggacctggagctgaagaaggagaggagggtcatcctggactgtgagcgggacaaggtgaatgacatcgtggaccaggtgatcaccatcggcaagcacgtgaagggctaccactacatcatcgccaacctgggcttcacagatggagacctgctgaagatccagtttggaggagccaacgtgtctggcttccagatcgtggactatgatgacagcctggtgtccaagttcatcgagcgctggagcaccctggaggagaaggagtacccaggggcccacaccaccaccatcaagtacaccagcgccctgacctatgatgctgtgcaggtgatgacagaggccttcaggaacctgaggaagcagagaattgagatcagcagaagaggaaatgctggggactgcctggccaacccagctgtgccctggggccagggcgtggagattgaaagagccctgaagcaggtgcaggtggagggcctgagcggcaacatcaagtttgaccagaatggcaagaggatcaactacaccatcaacatcatggagctgaagaccaacggccccaggaagattggctactggagcgaggtggacaagatggtggtgaccctgacagagctgcccagcggaaatgacaccagcggcctggagaacaagacagtggtggtgaccaccatcctggagagcccctacgtgatgatgaagaagaaccacgagatgctggagggcaatgaaagatatgagggctactgtgtggacctggccgctgagatcgccaagcactgcggcttcaagtacaagctgaccatcgtgggagatggcaagtatggagccagagatgctgacaccaagatctggaatggcatggtgggggagctggtgtatggcaaggctgacatcgccatcgcccccctgaccatcaccctggtgcgggaggaggtgattgacttcagcaagcccttcatgagcctgggcatcagcatcatgatcaagaagccccagaagagcaagccaggagtcttctccttcctggaccccctggcctatgagatctggatgtgcatcgtgtttgcctacatcggcgtgtctgtggtgctcttcctggtgagccgcttcagcccctatgagtggcacacagaggagtttgaagatggccgggagacccagagcagcgagagcaccaatgaatttggcatcttcaacagcctgtggttcagcctgggcgccttcatgcagcagggctgtgacatcagccccaggagcctgagcggcagaattgtgggcggcgtgtggtggttcttcaccctcatcatcatcagcagctacacagccaacctggccgccttcctgactgtggagaggatggtgagccccatcgagagcgctgaggacctgagcaagcagacagagatcgcctacggcaccctggacagcggcagcaccaaggagttcttcagaagaagcaagattgctgtgtttgacaagatgtggacctacatgaggtctgctgagcccagcgtgtttgtgaggaccacagctgagggcgtggcccgggtgaggaagagcaagggcaagtatgcctacctgctggagagcaccatgaatgagtacatcgagcagaggaagccctgtgacaccatgaaggtgggcggcaacctggacagcaagggctatggaattgccacccccaagggcagcagcctgagaaatgctgtgaacctggccgtgctgaagctgaatgagcagggcctgctggacaagctgaagaacaagtggtggtatgacaagggagaatgtggcagcggcggcggggacagcaaggagaagaccagcgccctgagcctgagcaatgtggccggggtcttctacatcctggtgggcggcctgggcctggccatgctggtggccctgattgagttctgctacaagagcagagctgaggccaagaggatgaaggtggccaagaatgcccagaacatcaaccccagcagcagccagaacagccagaactttgccacctacaaggagggctacaacgtgtatggcatcgagagcgtgaagatctag

SEQ ID NO: 37734 - DNA, 147 bp, Artificial Sequence
  derived and/or modified sequence
atgcagaagatcatgcacatctctgtgctgctgagccctgtgctgtggggcctcatcttcggcgtgagcagcaacagcatccagattggaggcctcttccccagaggagctgaccaggagtacagcgccttccgggtgggcatgtag

SEQ ID NO: 37735 - DNA, 2652 bp, Artificial Sequence
  derived and/or modified sequence
atgcagaagatcatgcacatcagcgtgctgctgagccccgtgctgtggggtctgatctttggcgtaagcagcaacagcattcagattggcgggctttttccccggggtgccgaccaggaatactccgcattccgggtggggatggtgcaatttagtacaagcgaattcagattgacaccccacatcgataatctggaagtggctaattctttcgctgttaccaacgcgttttgttcacaattttcacgaggcgtttacgctatctttggtttctacgacaaaaaaagtgtgaacactattacatccttttgcggcactctccatgtatcattcatcacaccttcatttccgacggacggaacacaccccttcgtcatccagatgaggcccgacttgaagggcgccctgctgtcccttatcgaatactaccagtgggacaagtttgcctatctctacgactctgaccgcggtttgtcaactctgcaagcagtactggattctgccgcagaaaaaaagtggcaggtgacagctattaatgtaggtaacattaacaatgacaaaaaggacgagatgtatagatctctgttccaggatttagagcttaagaaagagcgccgggtgatactggactgtgaaagagacaaagtgaacgatattgtggaccaggtgatcactataggcaagcacgtcaaagggtatcactatattatcgctaacttaggcttcacggatggggatttgctgaagattcagttcggaggtgcaaatgtgtcaggttttcagattgtcgattacgacgactctctggtcagtaagttcattgaaaggtggtcgacacttgaagagaaggaatacccgggggcacatactactactattaagtacacatcggcccttacttatgacgccgttcaagtgatgacggaggctttcagaaacctgcgaaaacagcgtattgaaatctcacgcagaggaaatgcgggggattgcctggcgaaccccgctgtgccgtggggccagggggttgaaatcgagcgggccctgaaacaggtacaggttgagggcctctcaggcaatataaaattcgatcaaaacggtaaacgcattaattatacaattaacataatggaactaaagacaaacggacccaggaaaattggatattggtcagaagttgacaaaatggtggtaacccttacagagttacccagtggtaatgatacgagtggcctggagaacaaaaccgtggtcgttaccacaattctggaaagcccatatgtaatgatgaaaaaaaatcacgaaatgttggaggggaatgaaaggtacgaaggctattgtgtggatctggcggcagagatcgccaaacactgcggatttaaatacaagctgaccattgttggcgatggcaagtatggcgcccgcgatgccgacaccaaaatatggaatggcatggtgggcgaattagtgtacggcaaagctgacatcgcaatcgccccactcaccattaccttggtccgagaagaggtcatcgactttagtaagccttttatgtcgctagggatatcaattatgattaagaagccccagaaatcaaagcccggcgtattttcattcctggatcccctggcatatgagatctggatgtgcatcgtttttgcttatattggcgtttctgtggtgctctttttggtgagccggttctcaccctacgagtggcacactgaggagttcgaggacgggcgcgaaacgcagtcctcggaatcaacaaatgaatttggaatctttaactcgctgtggttttctctcggcgcttttatgcagcaaggttgcgacatctcccccagatcactgagcgggcgcattgtgggcggggtgtggtggttctttacactgatcattatcagctcctataccgcaaatcttgccgcttttcttaccgtggaaagaatggtcagtccaatcgagagtgcagaggacttaagcaaacagactgaaattgcatatggtaccctagattcaggaagcactaaagaattttttcgaagaagcaagatcgctgtgtttgataagatgtggacatacatgcgcagtgcagaaccctctgtttttgtgcgaactactgccgagggcgtcgctcgggtcagaaagtccaaaggcaagtatgcatatctcttagaaagcactatgaatgagtatatcgaacagagaaaaccttgtgataccatgaaggtggggggcaatcttgacagcaagggatacggcatcgccacccccaaagggtcgtccctacgcaacgccgttaatctcgctgtgctgaaactgaatgaacaggggctgctcgacaagctcaagaacaagtggtggtatgacaagggggagtgcggctcgggggggggggactctaaggagaagacgtccgccttatctctgtccaatgtggcgggggtcttctatattctcgtgggcgggttgggcttggcaatgttagtggccctcattgagttctgctataagtccagggcagaggccaagcggatgaaggtcgcaaaaaacgcccaaaatattaatccaagctcgtcacagaacagccaaaactttgctacctacaaagaaggatataatgtgtatggaatcgagtctgtgaagatatag

SEQ ID NO: 37736 - DNA, 147 bp, Artificial Sequence
  derived and/or modified sequence
atgcagaagatcatgcacatcagcgtgctgctgagccccgtgctgtgggggctgatattcggagtatctagcaactctatacagattggtggactgttcccacggggcgctgatcaggagtactctgctttccgagtgggtatgtag

SEQ ID NO: 37737 - DNA, 2652 bp, Artificial Sequence
  derived and/or modified sequence
atgcagaaaataatgcatatcagcgtactcctttcacctgtactctggggactcattttcggcgtttcctcaaattccattcaaattggaggcctcttccctcgcggtgccgatcaggaatatagcgcatttcgcgtcgggatggttcaattttcaacttcagagtttcgtctcacccctcatattgataacttagaggtggccaatagctttgctgtcaccaacgcgttctgctctcagttctccagaggggtgtacgcgatctttggcttttacgacaagaaatcagtgaatactatcacctcattctgcggtaccttgcacgtgagctttatcacaccgtcctttcccactgacggtacccatcccttcgtgatccagatgaggcccgacctgaagggcgcactgttgagcctcatagaatattaccagtgggacaaattcgcctacttgtacgacagcgatcgaggtctgtctaccttgcaggccgtcctggacagtgcagcagagaaaaaatggcaggtcacagcaatcaacgttgggaacatcaacaacgataaaaaggatgaaatgtacaggagcctgttccaggacttggagttgaaaaaggagagaagggttattctcgattgtgaacgggacaaggttaacgacattgtggaccaggttattaccatcggtaaacatgtcaaaggctaccattacataatcgccaatctcgggtttaccgacggcgatctgctgaaaatccaattcggcggtgccaatgtctccggattccagatcgtggactacgatgacagcctcgtgtccaagtttattgagaggtggtctaccctggaagaaaaggagtatccaggcgctcacactaccaccattaaatacacctctgcactgacctatgatgcggttcaggtcatgactgaggctttccgcaatttacgcaaacagcggatcgagatcagccgcaggggcaacgcgggtgactgcctagcaaacccagctgtaccctggggacagggcgtggagattgagcgtgccctgaagcaggtgcaggtggagggcctgtctggcaacatcaagttcgatcaaaatgggaagagaataaactatactattaacatcatggagcttaaaaccaatggacctcggaaaataggctattggtcagaggtggataagatggtggtcacattgaccgagttgccaagcggtaacgatacaagtgggctcgagaataaaactgttgttgtaaccacgatcctggagagcccttatgtgatgatgaagaagaatcatgagatgctcgagggcaatgaaaggtatgaaggctactgcgtagatctggccgcagagatagctaagcactgcggcttcaaatacaagctgacaatcgtaggcgacggcaagtatggtgctagggatgccgacaccaaaatctggaacggcatggtgggggagctggtgtacgggaaagccgatattgcaattgctccactcaccatcacgctcgtgagagaggaggtcattgacttctccaaaccctttatgagtctaggcatctctataatgattaaaaagccgcagaaatccaaacctggagtgtttagttttctcgaccccctagcttacgaaatttggatgtgtatcgtttttgcttacataggggtttcagtggttctatttttagtgtccagattcagcccatatgaatggcatactgaggagttcgaggacggtagagaaacacagtcatcagaaagtaccaatgagttcggtattttcaattctctatggttctctctcggggcattcatgcagcagggctgtgatatctctcctcggtcactctctgggagaatcgtgggcggtgtgtggtggttctttacgttaataatcatttcaagttacaccgccaatctggctgctttcctcaccgttgagagaatggtttcccccatcgagagtgccgaagatttgtcgaagcagaccgaaatcgcctacgggaccctggattctgggagcacaaaagaattcttccggaggagcaagatcgccgtgttcgacaaaatgtggacgtacatgcggtctgcggagcccagcgtgttcgtcaggacaacggctgagggtgtggctagagtgcgcaagagcaagggaaagtacgcttatctactagaatccacaatgaacgaatatatcgagcaacggaaaccctgtgacacgatgaaggtgggcggaaacctagactcaaagggttacggcatcgcaacacccaaaggaagctcccttagaaatgccgtcaatctggcagtgctgaagctcaacgaacagggattactggacaagttaaaaaacaaatggtggtacgataaaggggagtgcgggtctgggggaggggattctaaagagaagacgagcgccctatctctgtctaatgtggccggtgttttttacatcctcgtggggggactcggtctggccatgttagtggccctgatcgaattttgctataaatcccgcgctgaagctaagcggatgaaggtggctaagaacgcccagaacattaacccttcaagcagtcaaaattcacaaaatttcgccacgtacaaggaaggatacaatgtttacggcattgagtctgtaaaaatctag

SEQ ID NO: 37738 - DNA, 147 bp, Artificial Sequence
  derived and/or modified sequence
atgcagaagatcatgcatatctcagtcctgctgagcccggtgctctggggcctaatttttggcgtttcttccaatagcatccagattggcggtctgtttcctaggggcgctgatcaggagtactccgccttccgcgtgggcatgtag

SEQ ID NO: 37739 - DNA, 2652 bp, Artificial Sequence
  derived and/or modified sequence
atgcagaagatcatgcacatcagcgtgctgctgagccccgtgctgtggggcctgatcttcggcgtgagcagcaacagcatccagatcggcggcctgttccccagaggcgccgaccaggagtacagcgccttcagagtgggcatggtgcagttcagcaccagcgagttcagactgaccccccacatcgacaacctggaggtggccaacagcttcgccgtgaccaacgccttctgcagccagttcagcagaggcgtgtacgccatcttcggcttctacgacaagaagagcgtgaacaccatcaccagcttctgcggcaccctgcacgtgagcttcatcacccccagcttccccaccgacggcacccaccccttcgtgatccagatgagacccgacctgaagggcgccctgctgagcctgatcgagtactaccagtgggacaagttcgcctacctgtacgacagcgacagaggcctgagcaccctgcaggccgtgctggacagcgccgccgagaagaagtggcaggtgaccgccatcaacgtgggcaacatcaacaacgacaagaaggacgagatgtacagaagcctgttccaggacctggagctgaagaaggagagaagagtgatcctggactgcgagagagacaaggtgaacgacatcgtggaccaggtgatcaccatcggcaagcacgtgaagggctaccactacatcatcgccaacctgggcttcaccgacggcgacctgctgaagatccagttcggcggcgccaacgtgagcggcttccagatcgtggactacgacgacagcctggtgagcaagttcatcgagagatggagcaccctggaggagaaggagtaccccggcgcccacaccaccaccatcaagtacaccagcgccctgacctacgacgccgtgcaggtgatgaccgaggccttcagaaacctgagaaagcagagaatcgagatcagcagaagaggcaacgccggcgactgcctggccaaccccgccgtgccctggggccagggcgtggagatcgagagagccctgaagcaggtgcaggtggagggcctgagcggcaacatcaagttcgaccagaacggcaagagaatcaactacaccatcaacatcatggagctgaagaccaacggccccagaaagatcggctactggagcgaggtggacaagatggtggtgaccctgaccgagctgcccagcggcaacgacaccagcggcctggagaacaagaccgtggtggtgaccaccatcctggagagcccctacgtgatgatgaagaagaaccacgagatgctggagggcaacgagagatacgagggctactgcgtggacctggccgccgagatcgccaagcactgcggcttcaagtacaagctgaccatcgtgggcgacggcaagtacggcgccagagacgccgacaccaagatctggaacggcatggtgggcgagctggtgtacggcaaggccgacatcgccatcgcccccctgaccatcaccctggtgagagaggaggtgatcgacttcagcaagcccttcatgagcctgggcatcagcatcatgatcaagaagccccagaagagcaagcccggcgtgttcagcttcctggaccccctggcctacgagatctggatgtgcatcgtgttcgcctacatcggcgtgagcgtggtgctgttcctggtgagcagattcagcccctacgagtggcacaccgaggagttcgaggacggcagagagacccagagcagcgagagcaccaacgagttcggcatcttcaacagcctgtggttcagcctgggcgccttcatgcagcagggctgcgacatcagccccagaagcctgagcggcagaatcgtgggcggcgtgtggtggttcttcaccctgatcatcatcagcagctacaccgccaacctggccgccttcctgaccgtggagagaatggtgagccccatcgagagcgccgaggacctgagcaagcagaccgagatcgcctacggcaccctggacagcggcagcaccaaggagttcttcagaagaagcaagatcgccgtgttcgacaagatgtggacctacatgagaagcgccgagcccagcgtgttcgtgagaaccaccgccgagggcgtggccagagtgagaaagagcaagggcaagtacgcctacctgctggagagcaccatgaacgagtacatcgagcagagaaagccctgcgacaccatgaaggtgggcggcaacctggacagcaagggctacggcatcgccacccccaagggcagcagcctgagaaacgccgtgaacctggccgtgctgaagctgaacgagcagggcctgctggacaagctgaagaacaagtggtggtacgacaagggcgagtgcggcagcggcggcggcgacagcaaggagaagaccagcgccctgagcctgagcaacgtggccggcgtgttctacatcctggtgggcggcctgggcctggccatgctggtggccctgatcgagttctgctacaagagcagagccgaggccaagagaatgaaggtggccaagaacgcccagaacatcaaccccagcagcagccagaacagccagaacttcgccacctacaaggagggctacaacgtgtacggcatcgagagcgtgaagatctag

SEQ ID NO: 37740 - DNA, 147 bp, Artificial Sequence
  derived and/or modified sequence
atgcagaagatcatgcacatcagcgtgctgctgagccccgtgctgtggggcctgatcttcggcgtgagcagcaacagcatccagatcggcggcctgttccccagaggcgccgaccaggagtacagcgccttcagagtgggcatgtag

SEQ ID NO: 37741 - DNA, 2511 bp, Artificial Sequence
  derived and/or modified sequence
atggtccagttctctactagtgaatttcgcctgacaccccatattgacaaccttgaggtggccaactcgtttgccgtgactaatgcattttgcagccagttcagccgaggagtttatgcgatcttcggcttctacgacaaaaagtcagtgaatactatcaccagcttttgcgggacacttcatgtatcttttatcacaccctcttttccaaccgacgggacacacccattcgtaattcagatgcgccctgacctgaaaggtgccttgctttctcttattgaatattatcagtgggataagtttgcctatctgtatgactccgatcgaggattgtctactttgcaagctgtgctagactctgcagctgagaaaaagtggcaggtaactgccatcaatgtcggtaacattaacaatgataaaaaggatgaaatgtatcgctccttatttcaggatctggaattgaagaaggagaggagggtgatactagactgtgagagggataaggtcaacgacatagtggaccaggtaattactattggaaaacacgtcaaaggctatcactatattattgcaaacctggggttcactgacggggatttgttgaagattcagttcggcggggctaacgtgtctgggttccagatagtcgactacgacgacagcctggtgtcaaaattcattgaacgctggtctacactcgaggagaaagagtacccgggagctcatacaaccacgatcaaatatactagcgctttgacatacgacgcggttcaagtcatgaccgaggcctttcgcaatctcaggaagcaaagaattgagataagccggaggggtaatgcgggcgattgtctggccaaccccgcagtcccttggggtcagggcgtggagattgaaagggccttaaagcaggttcaggttgaagggctctcagggaatatcaaattcgaccagaacggaaagcgcattaattataccatcaatatcatggagctgaagactaacggaccccggaaaattgggtactggagtgaagtcgacaagatggtggtgactctgacagaactaccctctggcaacgacacatccgggcttgagaataaaaccgtcgtcgttaccaccatactcgagagtccttatgtgatgatgaagaagaaccatgagatgctggaagggaatgagcgctacgaggggtactgcgtcgacttggctgctgagatagccaagcattgcggctttaaatacaagctcaccatcgttggagatgggaaatatggcgctagggatgccgacaccaagatctggaacggaatggtgggtgaactcgtatatggtaaggccgatatcgccatagcacccctcaccattactctggtgagagaagaagtaattgatttctccaaacctttcatgtccctgggcatttctatcatgatcaagaagccacagaaatccaaaccgggcgtgttttcgtttctggaccccctcgcgtacgagatatggatgtgcatagtgttcgcttacatcggagtgtctgtagtcttattccttgtctctcgcttcagtccctatgaatggcataccgaggagttcgaagacggccgtgaaacccagagcagtgagagcaccaatgagttcggaatctttaattccttatggttttctttaggggcattcatgcagcagggatgtgatatttcccctagatccctgtccgggaggatcgtcgggggtgtctggtggttttttactttgattattatcagctcgtacacagcgaatctggctgccttcctgaccgtggagcggatggtcagcccgatagagagcgccgaagatttatcaaagcaaacagaaattgcatatgggacccttgatagcggctcaacaaaggaattttttcgcaggagcaagatcgcggtgtttgataagatgtggacatacatgcgctccgcagagccatccgtgtttgtacgcacgaccgcagagggtgtggcacgtgtaagaaagtccaagggaaagtacgcttacctgctggagtctacaatgaacgagtatattgagcaacggaaaccgtgtgacacaatgaaagtcgggggcaatctagactctaagggctacgggattgccacacccaaaggtagctccctgcggaccccagtgaacctggccgtgctcaaattgtctgagcagggcgtgctggataagctgaaaaataaatggtggtatgacaagggtgagtgcggggccaaagattcgggcagtaaggaaaagaccagtgctctcagcctgtctaatgtcgcaggagtgttttacatattggtcggaggcctcgggctcgcgatgttagtcgctctgatagagttctgttataagagccgagctgaggccaaaagaatgaaggtagccaaaaacgctcagaacattaacccttcatcgtcacagaattcccaaaacttcgccacttataaggaagggtataacgtatacggcatcgaatcggtgaagatctag

SEQ ID NO: 37742 - DNA, 2511 bp, Artificial Sequence
  derived and/or modified sequence
atggtgcagtttagtaccagcgaattccgcctcacacctcacatcgataatctagaggttgccaacagttttgctgtgactaatgccttctgctcccaattttccaggggcgtgtacgccatcttcggcttttatgataagaaatcagtcaacaccatcacctctttctgtggcaccctgcatgtcagcttcataacccccagcttcccgactgacggaacccatccattcgtgatccagatgcgacccgacctcaaaggtgctttattaagcctgatcgagtattaccagtgggataaatttgcctacttgtacgattctgataggggattgtccaccttacaagcagtgctggactccgccgccgaaaagaaatggcaagttacggccattaacgtggggaatatcaataacgataagaaagacgagatgtataggtctcttttccaagatcttgaactgaagaaagagagacgcgtcatcttggattgcgaaagagacaaggttaatgatatagtggaccaagttatcaccattggcaagcatgtgaagggataccactatatcattgctaatctaggattcaccgatggcgatttgctgaagatccagttcggtggtgcaaacgtgtccggatttcaaatcgtggactacgatgattccctggtcagtaaatttatcgagcggtggtctactctggaagagaaggaatatcccggagctcacactaccacaatcaagtacacctctgccctgacctatgacgccgtgcaagtaatgaccgaggcatttaggaacctgagaaagcagcgcatcgaaatttctcgtcggggaaatgctggagattgtcttgcaaatcccgcggtgccatgggggcaaggagtggaaatagagcgggcccttaagcaggtgcaggtggaaggactttcggggaatattaagtttgatcagaacggcaagcggattaattataccataaacataatggagctcaagacaaacgggccacgcaagattggctactggtcggaagtggacaagatggtggtgaccctgacagagctgccaagcggtaacgacacgtcaggcttggaaaataagacagttgtggtgactacaatcctggaatccccatatgtgatgatgaaaaaaaatcatgaaatgttggagggaaatgaacgatatgaagggtattgcgtggatctggccgctgagattgccaagcactgtggcttcaagtacaaactgacaatagtcggagacgggaagtatggagcgagggacgccgacaccaaaatctggaatggtatggttggcgaactggtttacgggaaggcagatatcgcgatcgcgccactcaccattacactggttcgagaagaggtaatcgatttcagtaaaccgttcatgagtctcggcatctccataatgataaagaagcctcagaaatctaaacctggcgtcttctccttcctggatcctctggcttacgaaatttggatgtgtattgtgttcgcctatatcggagtatctgtcgttctattcctggtctccagattcagcccctatgagtggcacacagaagagttcgaggacggtagagagacacagtcctccgaatccactaacgagtttgggattttcaatagcctctggttcagtctcggcgcatttatgcaacaaggctgcgacatctctccaagatctctgagcggacgtatagttggcggcgtctggtggtttttcacgctgattataatttcctcctacacggccaatctggcagcatttctgaccgtggaacgtatggtgtcgcctatagaaagtgctgaggacctctcaaaacaaacagaaattgcgtacggtacgttggactcgggctccactaaggaattcttccgccggtcaaaaattgccgtgtttgataaaatgtggacctacatgagatcagctgagccatcggtgtttgtccggacgacagctgagggagtagctagagtgcgcaagtcaaaagggaagtatgcatacctcttggagtcgaccatgaatgaatacatcgaacagagaaagccctgcgatactatgaaggttggaggcaatctcgatagcaagggatatgggatcgcaacacccaagggatcatcacttcgaacccccgtcaacctagccgtcttgaagctttctgagcagggtgtcctcgataaactgaagaataagtggtggtacgataagggcgaatgtggcgctaaagattcgggatcaaaagaaaaaaccagcgccctctcattgtcaaacgtggctggcgtgttctacattctggtggggggccttggtcttgccatgctggtagcgctcatagagttttgctacaaaagtagagctgaagcaaagagaatgaaggttgcaaagaacgcacagaatattaacccaagcagcagccaaaattcacagaacttcgccacttataaggagggttataatgtttacggcatcgaatccgtgaaaatctag

SEQ ID NO: 37743 - DNA, 2511 bp, Artificial Sequence
  derived and/or modified sequence
atggttcagttttccacctccgagtttaggttaaccccacatatcgacaatttggaagtggcaaattcctttgccgtcacaaatgccttttgttcgcagttttcccgcggggtgtacgctatcttcgggttttatgacaagaagtccgtgaacacaatcactagcttttgcggtactttgcacgtcagttttattactcctagctttccgaccgacggtacacatccttttgttatccaaatgagaccggatctcaaaggcgcactgttgagcttaatcgaatactaccaatgggacaaattcgcatatctgtacgatagtgatcggggcctcagcacactgcaagccgtattggactctgctgccgaaaagaaatggcaggtcaccgccataaatgtcgggaatattaataatgacaagaaagacgagatgtacaggtccttgttccaggaccttgagctcaaaaaagagcgccgtgttatattggactgtgagcgggacaaggtgaatgacattgtggatcaggtgatcactattggcaaacacgtaaagggctatcactacatcatcgccaacttaggatttactgacggggacctgttgaaaatccagttcggaggggctaacgtgagtggcttccaaatcgtggactacgatgactctctagtctcgaagtttatcgagcgatggtccacattggaagagaaagaatatccgggggcccatacaacaaccatcaagtacaccagcgccctgacatacgacgccgtgcaggtgatgacagaagctttccggaaccttcggaagcaaaggatcgagatatctcgccgcggcaacgctggcgattgcttagcaaatcctgctgtcccttggggccagggcgttgagattgagagggcactgaaacaagttcaggtggaaggcctgagcggcaatattaagttcgatcagaacggcaagagaatcaattatacgattaatattatggaactgaagactaatggacctaggaagattggatattggtctgaagttgataagatggttgtaacccttaccgaacttccttcaggcaatgatacaagtggtctggagaataagacggtcgtggtaactaccattctggagtctccctatgtcatgatgaagaagaatcacgagatgctcgaagggaacgagaggtacgagggatactgtgtggatctggccgccgagatcgcgaaacactgcggctttaagtataaactgaccatcgtaggagatggtaaatacggagctagagacgctgacaccaagatctggaacgggatggtcggcgaattggtgtatggaaaggccgacatcgccatagctcctctaactattacacttgttcgcgaggaagtgattgacttctccaagccctttatgtctctgggtatttcaataatgatcaagaagcctcaaaagtccaagcctggcgtgttttcttttctggatcctctggcgtacgagatctggatgtgcatcgtgtttgcttacattggcgtgagtgttgtgctgttcttggtgagcagattttccccttatgaatggcacacagaggaattcgaggatggccgagagacgcagagtagcgaatctactaacgagtttgggatttttaactccttgtggttctccctcggggctttcatgcagcagggctgtgatataagtcccagaagtctgtcaggccggatcgtgggtggagtgtggtggtttttcaccctaattataataagctcgtacactgctaacctggcggcatttttaaccgtggaacgaatggtttctcccatcgagagtgcagaggatctgtccaagcagacagaaattgcttatggcacgctcgactcaggttcaaccaaggaattctttcggcgctccaaaattgccgtatttgataaaatgtggacatatatgcggagcgctgaaccttcggttttcgtaagaacgactgccgaaggagtagctagagttcggaagagtaaaggcaaatacgcctatcttctagagtccacgatgaacgagtacatcgagcaaagaaagccctgtgacacaatgaaggtaggaggaaatcttgactctaagggttatggcatcgcaactccaaaggggagctctctgaggacgcccgtaaatctggctgtactgaaactctctgaacagggcgtcttagacaaactcaagaataaatggtggtatgataagggtgagtgcggtgctaaggattccggatctaaagaaaagacaagcgctctctccctgagtaatgtcgccggagtgttttacatattagtcggcggcctcgggttagccatgctggtcgctctaatagaattttgctacaagtcacgggcggaagccaagcgaatgaaagtcgcgaaaaatgcccaaaacatcaatccgagctcctcacagaactcccagaacttcgccacctacaaggagggctacaatgtgtacggcattgaatctgttaagatctag

SEQ ID NO: 37744 - DNA, 2511 bp, Artificial Sequence
  derived and/or modified sequence
atggtgcagttcagcaccagcgagttccggctgaccccccacatcgacaacctggaggtggccaacagctttgctgtgaccaatgccttctgcagccagttcagcagaggagtgtatgccatcttcggcttctatgacaagaagtctgtgaacaccatcaccagcttctgtggcaccctgcacgtgtccttcatcacccccagcttccccacagatggcacccacccctttgtgatccagatgaggccagacctgaagggggccctgctgagcctgattgagtactaccagtgggacaagtttgcctacctgtatgacagcgaccggggcctgagcaccctgcaggccgtgctggacagcgctgctgagaagaagtggcaggtgacagccatcaacgtgggcaacatcaacaatgacaagaaggatgagatgtaccgcagcctcttccaggacctggagctgaagaaggagcggcgggtcatcctggactgtgagcgggacaaggtgaatgacatcgtggaccaggtgatcaccatcggcaagcacgtgaagggctaccactacatcatcgccaacctgggcttcacagatggagacctgctgaagatccagtttggaggagccaacgtgtctggcttccagatcgtggactatgatgacagcctggtgtccaagttcatcgagcgctggagcaccctggaggagaaggagtacccaggggcccacaccaccaccatcaagtacaccagcgccctgacctatgatgctgtgcaggtgatgacagaggccttcaggaacctgaggaagcagagaattgagatcagcagaagaggaaatgctggggactgcctggccaacccagctgtgccctggggccagggcgtggagattgagcgggccctgaagcaggtgcaggtggagggcctgagcggcaacatcaagtttgaccagaatggcaagaggatcaactacaccatcaacatcatggagctgaagaccaacggccccaggaagattggctactggagcgaggtggacaagatggtggtgaccctgacagagctgcccagcggaaatgacaccagcggcctggagaacaagacagtggtggtgaccaccatcctggagagcccctacgtgatgatgaagaagaaccacgagatgctggagggcaatgaaagatatgagggctactgtgtggacctggccgctgagatcgccaagcactgcggcttcaagtacaagctgaccatcgtgggagatggcaagtacggggccagagatgctgacaccaagatctggaatggcatggtgggggagctggtgtatggcaaggctgacatcgccatcgcccccctgaccatcaccctggtgcgggaggaggtgattgacttcagcaagcccttcatgagcctgggcatcagcatcatgatcaagaagccccagaagagcaagccaggagtcttctccttcctggaccccctggcctatgagatctggatgtgcatcgtgtttgcctacatcggcgtgtctgtggtgctcttcctggtgagccgcttcagcccctatgagtggcacacagaggagtttgaagatggccgggagacccagagcagcgagagcaccaatgaatttggcatcttcaacagcctgtggttcagcctgggcgccttcatgcagcagggctgtgacatcagccccaggagcctgagcggccgcatcgtgggcggcgtgtggtggttcttcaccctcatcatcatcagcagctacacagccaacctggccgccttcctgactgtggagaggatggtgagccccattgaatctgctgaggacctgagcaagcagacagaaattgcctacggcaccctggacagcggcagcaccaaggagttcttccgccgcagcaagattgctgtgtttgacaagatgtggacctacatgaggtctgctgagcccagcgtgtttgtgaggaccacagctgagggcgtggcccgggtgaggaagagcaagggcaagtatgcctacctgctggagagcaccatgaatgagtacatcgagcagaggaagccctgtgacaccatgaaggtgggcggcaacctggacagcaagggctacggcatcgccacccccaagggcagcagcctgcggacccctgtgaacctggccgtgctgaagctgtctgagcagggcgtgctggacaagctgaagaacaagtggtggtatgacaagggggagtgtggggccaaggacagcggcagcaaggagaagaccagcgccctgagcctgagcaatgtggccggggtcttctacatcctggtgggcggcctgggcctggccatgctggtggccctgattgagttctgctacaagagcagagctgaggccaagaggatgaaggtggccaagaatgcccagaacatcaaccccagcagcagccagaacagccagaactttgccacctacaaggagggctacaacgtgtatggaattgaatctgtgaagatctag

SEQ ID NO: 37745 - DNA, 2511 bp, Artificial Sequence
  derived and/or modified sequence
atggtgcagttcagcaccagcgagttccggctgaccccccacatcgataatctggaggttgctaatagtttcgccgttactaacgcattttgcagtcaattctctcgtggcgtgtatgccatattcggcttctatgacaagaagtctgtcaatactataacgtccttctgtggaacactccacgtttcatttatcactccgtcctttccgactgacggcacccacccattcgtcatacaaatgcgcccagatcttaaaggggccctcttatctcttattgagtattaccagtgggataagttcgcctacctatatgattccgacaggggtttgtccacgttgcaggctgtgttggacagcgcagcggaaaaaaagtggcaagtcacagcaatcaatgtaggcaacatcaataatgataaaaaggatgaaatgtatagaagtctgtttcaggacttggagctgaagaaggagcgccgcgtgatcctggactgtgaaagggataaagtcaacgacatcgtggatcaagtcatcaccatagggaaacacgtcaagggttaccattatatcattgccaacctggggtttaccgatggtgaccttctgaagatacaattcggcggtgccaacgtgtccggcttccagattgtcgactatgatgacagcttggtatccaaattcatcgagcgctggagcaccttggaggagaaagagtaccctggagcacacacaacgactattaaatacaccagcgccttgacatacgacgctgttcaggtcatgacagaggccttcaggaatctccgcaagcaacggatcgaaatatctcggagaggtaatgctggggactgcctggctaatcctgccgttccctggggccagggcgtagaaatcgaacgggcactgaagcaggtgcaagtcgagggactgagtggaaacatcaagtttgaccagaatggcaagcgaattaattataccattaatatcatggagttgaaaaccaacggacccaggaaaatcggctattggtcggaagtagacaaaatggtagtgacactcaccgagcttccctctgggaacgatacatctggactcgaaaacaaaactgtagtggtcaccactattttggagtcaccctacgtaatgatgaagaagaaccacgaaatgctggaggggaacgaacgctatgaaggttactgtgtcgatttggctgcagaaattgcaaagcactgtggattcaagtataagctaactattgtgggtgacggcaagtacggcgcaagagatgcggataccaagatctggaatggtatggtgggcgaactggtgtacgggaaggcagatatagccatagccccactgacgatcactctggtgcgggaggaagtcattgacttctcaaagcccttcatgagtctggggatttcaatcatgattaaaaaaccccagaagtctaagcccggcgtgttttctttcctagacccactggcctacgaaatctggatgtgcatcgtgtttgcctacattggcgtgagtgtggtgctgtttcttgtttcaagattttcaccctacgagtggcacaccgaagaattcgaagacggacgggaaacccagtcctctgagagcacaaacgaattcggcatcttcaattctctgtggttctccctaggcgcttttatgcagcaggggtgcgatatctcccctcgtagcctttctggtaggattgttggtggagtctggtggttctttacattgatcatcatttcatcttatactgcgaatttagcggcctttcttaccgtcgaacggatggtgagtcctatcgaaagcgccgaggatttaagcaagcagaccgagatcgcttatggtacgttggattccggttccacaaaggagttcttccgccgttccaaaatagcagtgttcgacaaaatgtggacttatatgcggtccgccgaaccgagcgtatttgtgcgcacaaccgccgaaggagttgccagagtcaggaaaagcaaaggcaagtatgcttacctgctcgagtcgacaatgaatgagtatatagagcaaaggaaaccatgtgacactatgaaagttggtggcaacctagattcaaaggggtatggcattgcaacgcctaaaggttcttccttgaggacacccgtgaatttggctgttctgaaactgtccgagcaaggagtactcgataaattgaaaaataaatggtggtacgataaaggagaatgcggtgccaaagactccggctctaaagagaagactagcgcactgtcgctgtccaatgtcgccggagttttctatatactagtgggaggattaggcctggctatgctcgttgcgttgattgaattttgttacaaatcacgcgcggaggcgaagagaatgaaagttgccaagaacgcccagaatatcaacccaagcagcagccaaaacagccagaactttgctacctacaaagaaggttacaatgtgtatggcatcgaatctgtcaagatctag

SEQ ID NO: 37746 - DNA, 2511 bp, Artificial Sequence
  derived and/or modified sequence
atggtgcagttcagcaccagcgagttccggctgaccccccacatcgataatctcgaggtcgccaacagcttcgctgtgactaacgcgttctgttctcagtttagtagaggggtgtatgctatttttggcttttatgacaaaaaatctgtcaacaccatcaccagcttctgtggcacgctgcatgttagctttatcacgcccagcttccctactgacggcacccatccatttgtgatccagatgcgcccagatctaaagggagcactactgtcattgatagagtactatcagtgggataaatttgcctatctctatgattccgatcgggggctgagtactttacaggccgtcctggactccgctgccgagaagaagtggcaggtcactgcaattaatgtggggaatattaacaatgataagaaggatgaaatgtacagaagcctgtttcaggacctcgagctgaaaaaggagcgcagggtaatcctggactgcgaaagggataaggtcaatgacatcgtggatcaagtaataaccataggaaaacatgtaaagggatatcattatattatagcaaacctgggattcactgacggcgatttgctcaaaatccaatttggcggagctaacgtctctggtttccagatcgtcgactacgatgattcactggtttccaagttcatagagcgttggagcacgttggaggagaaggagtaccccggcgcccataccactaccatcaagtacacctctgcccttacgtatgatgcggtgcaggtgatgactgaggccttccgcaaccttagaaagcaacgcattgaaatctcacggcggggcaacgccggagactgtctggcgaatcccgcagtgccttgggggcagggtgtggaaatcgagcgagcgctcaaacaggttcaggtggaggggttgtcagggaacattaaattcgaccaaaatggaaaaaggattaactacaccataaacataatggagctgaagacaaatggaccaagaaagatagggtattggtcagaagtggacaagatggtagttacgttgacggagctaccatcaggcaatgatacctcaggcctggaaaacaagactgtggtggtcactacaatcctcgaatccccctacgttatgatgaaaaagaatcacgaaatgctggaggggaacgagaggtatgaaggatactgcgttgatttggctgccgagatagccaaacactgtggctttaagtataaactcaccatcgttggcgacggcaagtatggagctagggacgctgatactaaaatctggaacggtatggtgggagaactcgtgtacggaaaagctgatatagccatagcacccctgactataactctggttcgcgaagaagtgatcgacttttccaagccattcatgagtttggggatctccatcatgattaagaagcctcagaagtccaagcccggggttttctcattcctcgaccctctggcctatgagatctggatgtgtatcgtgtttgcctacatcggagtttcggttgtgctgttcctggtatccagattttcaccctacgaatggcacacggaagagttcgaagatgggcgggaaacacaatcttccgagtctacaaatgaatttggtatctttaacagtctgtggttctctctaggagccttcatgcagcagggctgtgacatcagccctcggtctcttagtggtagaatcgttggaggagtgtggtggttcttcacactgataattatctcatcctacactgcaaacctcgccgcctttttaactgtggaacgtatggtatctcccatcgagagcgccgaggacctgagcaagcaaactgaaatagcctacggcacactggactccggcagtacaaaggaattctttagaaggtcgaagatcgctgtgtttgataagatgtggacctatatgcggagtgctgaacccagtgtgttcgtgcggactaccgctgagggcgtggctcgggtgaggaagtctaaggggaaatatgcttacctactagagtcgacaatgaacgagtatatagagcaacgtaaaccgtgcgataccatgaaggtggggggcaacctcgacagtaagggttatggaatcgctaccccaaaaggttcctcactgcgtacccccgtgaacctggctgttctgaagctcagtgagcagggcgtcctcgacaagcttaaaaataagtggtggtacgacaagggagaatgcggggctaaagactccggtagcaaagagaagacatcagcgctgtcgctgagcaacgtcgccggtgtgttctatatcctcgtcggcgggcttggactggccatgctggtggctctgattgagttttgctacaaatcccgggcggaagcaaagaggatgaaagttgccaagaacgcccagaacattaacccatccagcagtcagaacagccagaactttgccacatacaaagaggggtacaatgtctatggcatcgaatcagtcaaaatctag

SEQ ID NO: 37747 - DNA, 2511 bp, Artificial Sequence
  derived and/or modified sequence
atggtgcagttcagcaccagcgagttccggctgaccccccacatcgacaatttggaggttgccaatagtttcgctgtcactaacgccttctgcagtcaattttcacgcggggtttacgccatatttgggttttacgacaagaagtctgttaacacaatcacctcgttctgtggcacccttcacgtttcttttatcaccccctcttttcccactgatgggacccatccctttgtgatccagatgcgaccggatctcaaaggggctctgctgtcattgatagagtactaccagtgggataagttcgcctatttgtatgactccgataggggtctgtccacattgcaggcagtgctggatagtgctgcagagaagaaatggcaggtaaccgcaattaacgtaggaaacattaacaacgacaagaaggatgaaatgtaccggtccctttttcaggatctggagctgaaaaaagagcgcagggttatcctggactgtgagcgcgacaaggttaacgacattgtcgaccaagtcattactattggcaagcatgtcaagggatatcattatattattgcaaaccttgggtttacagatggggacctgctcaagatacagttcggcggcgctaacgtcagtggcttccagattgtagactacgacgacagtctggtgagtaaattcatcgagcgttggtccaccctcgaggagaaggagtacccgggggctcacactactacaatcaagtacacctcagcgttaacttacgacgccgtacaggtaatgaccgaggctttccgcaatctgagaaagcagaggattgagatctccaggcgggggaacgctggcgactgcctggccaaccccgcagtgccatggggccagggagtagaaatagaacgggcactgaagcaggtgcaggtcgagggactttccggaaacatcaaatttgatcagaacggcaaacggattaactacacaattaatataatggagctaaagaccaatgggcctcgaaaaatcggatactggtctgaggtggataaaatggtcgtcactttaacagagctgcccagcggcaacgacacctccgggctcgagaacaagaccgtggtagtgacaaccattctggagtctccctatgtcatgatgaagaagaaccacgagatgctggagggaaacgaaagatatgagggatactgcgttgatctggccgcagagatcgctaaacattgcggctttaaatataaattaaccattgtgggagatgggaagtacggtgcgagagatgcagataccaagatatggaatggcatggttggagagcttgtatacgggaaggctgacatcgccattgctccgcttacaattacacttgtgagggaggaggttatcgacttcagcaagccttttatgagcctgggcatttctattatgatcaaaaagccacaaaagtccaaaccaggcgtgttcagtttcctcgaccccctggcttatgagatctggatgtgtatagtgttcgcttacatcggcgtgagtgtcgtcttgtttctcgtttcaaggttctcaccttacgagtggcatacggaagaattcgaggacggcagggagactcagagctccgaaagcacaaacgagttcggcatatttaactccttgtggttctctctgggcgcctttatgcaacaaggatgtgatatttccccacgctccctctccggtcgcattgttgggggcgtctggtggtttttcactttaattattatctcctcttataccgctaatctggcagcatttttaaccgtagaaagaatggtctctcccatcgaatccgctgaagatctgagcaagcagactgagatcgcctacggtacactggacagcggatctacaaaggagttttttcggagatccaagattgctgtgttcgacaaaatgtggacatacatgcggagcgcagagccctccgtttttgtgcgtacaactgctgaaggagtcgcccgggtgaggaagagtaaggggaagtacgcttatctgctggagtccacaatgaatgaatacattgagcagcggaaaccttgcgacacaatgaaggtgggcggtaatctcgactctaaaggctacggcatcgccactccaaagggcagtagcctccgtacccctgtcaacctggcagtactcaagctttccgagcagggcgttctggacaagcttaagaacaagtggtggtacgacaaaggtgagtgcggcgctaaggatagcggtagcaaagaaaaaacctcagccctgtccttgtccaatgtcgccggggtattctacatcctggttggcggtttaggactggccatgttagtagccctcattgagttctgttacaagtcgcgggccgaagctaagcgcatgaaggtcgctaaaaacgcccagaacattaacccctcctcttcccagaattctcagaacttcgctacttacaaagaggggtacaacgtttacggcatcgaatctgtgaagatttag

SEQ ID NO: 37748 - DNA, 2511 bp, Artificial Sequence
  derived and/or modified sequence
atggtccagttcagtacctcagaattccgattgactccccacattgacaatttggaggttgccaattccttcgcagtgacgaacgccttctgctcacagttcagccggggagtctatgccattttcggcttctatgacaagaagtccgtgaacactatcacttccttttgtggaacactccacgtgagtttcattacccctagttttcccaccgatgggacgcacccgttcgttatacagatgagacctgacctcaaaggtgccttgctgagcctgattgagtactaccagtgggacaagttcgcatacctgtatgattcagataggggtctgagtacactgcaagcagttctggatagtgctgccgaaaaaaagtggcaggtgacagcaataaatgtggggaatataaataatgataagaaggacgagatgtaccggagcttatttcaggaccttgagctgaagaaggagcgcagagtgattctggattgtgaacgggataaagtcaacgatatcgtcgaccaggtcataacaatcggaaagcacgttaagggttatcactatattatcgcgaacttggggtttaccgacggcgatctgttgaaaatccaatttggcggtgccaatgtgtccggcttccagattgtcgattacgacgacagtctggttagtaagttcattgagcgttggagcactctcgaggaaaaggagtatcctggtgcccataccacaacgatcaaatacacaagcgccctgacctacgatgccgtgcaggttatgaccgaggcgtttcgcaacctgcggaaacagaggatcgagatcagtcgtcgaggcaacgccggagattgtctggcgaaccctgcagtgccttggggccagggtgttgagattgagagagcactgaaacaagttcaggtggaggggctgtctggcaatatcaagtttgaccagaacgggaaaaggatcaactataccatcaatatcatggagctcaaaactaatggtcccagaaagatcgggtattggtctgaggtggacaagatggtggtaacgctgaccgagctgccatccggtaacgacacctctgggctggaaaacaagacagtggtggtgacaacaatactggaaagtccgtacgttatgatgaagaagaatcatgaaatgttagaaggtaatgagagatatgaaggttactgtgtggacttggctgcggagatcgcaaaacactgtggctttaagtacaaactgacaatagtcggagatgggaagtacggggcaagagatgccgataccaagatttggaatggtatggtaggtgaacttgtttacgggaaggccgacatagcgatcgctcctctgacaataacccttgtaagggaggaagttatcgacttctctaagcccttcatgagcctggggattagcatcatgatcaaaaaaccgcagaagagtaaacccggtgttttcagcttccttgatccgctagcttacgaaatttggatgtgcatagtgttcgcatatattggcgtctccgtcgtccttttccttgtgagcagattctccccctacgaatggcacaccgaggagttcgaagatggtagggagactcagagttccgagtctacgaacgagttcggcattttcaattccctatggttctcactgggagcctttatgcagcagggctgtgacattagtccgcgttcgctgtctggacgtattgttggaggcgtctggtggttctttacgctgatcatcatcagctcctacacggctaatctggctgcctttctcacagtcgagagaatggtgagcccaattgaatcagccgaggacctgtcaaagcagactgaaatcgcatatggcaccttagattctgggtcgactaaagaattcttccgcaggtcgaaaatcgccgttttcgacaaaatgtggacctatatgaggtccgctgaaccatccgtttttgtccgaaccaccgcagagggtgtggccagggtcagaaagagcaaggggaaatatgcatatttgctggagtctacgatgaatgagtacattgagcagcgcaagccgtgtgacacaatgaaagtgggtggtaatctcgacagtaagggatatgggatagcaacccccaaaggttcgtctctccgcacccccgtaaacttggccgtgctgaaactcagtgagcaaggcgtcctcgataaattgaaaaataagtggtggtatgacaagggggagtgcggtgccaaagacagtgggtccaaggagaagacatccgccttgagcctatctaacgtggcaggcgtgttctacatcctggtgggcggactgggtcttgccatgctcgtggctctcatcgagttctgttacaagagccgagccgaagcaaaacggatgaaagtggccaagaacgctcaaaacatcaacccaagctcgtcacagaactcccagaacttcgcaacttacaaagaaggttacaacgtctacggcatcgagtctgtgaaaatatag

SEQ ID NO: 37749 - DNA, 2511 bp, Artificial Sequence
  derived and/or modified sequence
atggtacaatttagcactagtgaattcagactcacaccccatatcgacaacttagaagtggccaacagctttgccgtgacgaacgcattctgttcccaattcagtcgcggagtttatgccatctttggcttctacgataagaagtccgttaatacaatcacaagtttctgcggcaccctccatgtgtcttttatcactccatcgtttccaaccgacggcacgcatccttttgtgattcagatgagacctgacctgaaaggagccttgctgtccttgatcgaatactatcaatgggacaagtttgcctacctttacgacagcgacaggggcctcagtactctgcaggccgtcctggactcagccgcagagaaaaaatggcaggtcactgctatcaacgttgggaacatcaataatgataagaaagatgagatgtaccgttcactcttccaagaccttgagctgaaaaaggaaagaagagtgatcctggattgtgagcgtgataaagtaaacgatatcgttgaccaggtcatcaccatagggaagcacgtgaaaggctaccactacataatagcaaacttagggttcaccgacggggatctgctgaagatccagtttgggggtgctaacgtgtccggctttcagatcgtcgactacgatgacagtttggtgtcgaaattcatcgaacgttggtctactcttgaggagaaagagtacccgggagcacatactaccacaatcaagtacacctctgcgttgacctacgatgccgtgcaggtgatgaccgaggcgttcaggaaccttagaaaacagcgcatcgaaataagcaggaggggcaatgctggcgactgtctcgctaaccccgctgtgccatggggccagggggtcgagatcgagagggcacttaagcaggtacaggtcgagggactgagtggcaacatcaagtttgaccagaatggaaagcggataaactacaccattaatatcatggagttgaaaaccaacgggcctcgtaagattggttactggtctgaggtcgacaagatggttgtcacactcaccgaactgccctctgggaacgacactagcggactggagaacaaaacagtggtcgttacaactatactggagagcccttatgtgatgatgaaaaagaatcacgagatgttagagggaaacgaacgctatgaagggtattgtgtggacctcgctgctgagattgccaaacattgcggatttaagtataagttgacaattgtaggggacggcaagtacggcgctcgggacgccgatacaaaaatctggaatggtatggtcggtgaactggtctatggcaaggccgacatcgctatcgctcccctgacgatcactctggtgcgagaagaggtaattgatttctccaagcccttcatgagcctaggaatctccataatgattaaaaaaccgcaaaagagcaaacctggagttttctcattcctcgatccattggcttacgaaatttggatgtgcatcgtatttgcatatattggtgtatctgtggtactgtttctggtttctcggttttccccctacgagtggcatactgaagagtttgaggacgggcgagaaacccaaagctcagagtccactaacgaattcggcatttttaattccctctggttcagtcttggggctttcatgcagcagggctgcgatattagcccccgaagtctctcggggcgtatcgtgggaggagtttggtggttttttactctgatcattataagttcttataccgctaacttggcagcttttctgacagtcgaacgcatggtctcacccatcgagagtgcagaggacctgtcaaaacaaacagagattgcgtatggaacattggacagtggttctaccaaagaatttttccgccgaagtaaaatcgcagtgttcgacaagatgtggacctacatgaggagtgcggagccttctgtgttcgtgagaacgacagccgagggagttgcaagagtgagaaaaagcaaaggcaagtacgcctatctgctggaaagcaccatgaacgaatacatcgagcagcgcaaaccttgtgatacaatgaaagtgggcggaaatctcgatagtaaagggtatggaatcgcgacccctaaaggcagttcactgaggacgcctgtgaacctagcggttctgaagctctccgagcagggggtgctggacaagcttaagaacaagtggtggtatgataaaggcgagtgcggagcaaaagatagcggcagcaaagagaaaacgtccgccctctctctaagcaacgtggcaggcgtgttttacatcctggtaggcggtctgggattggctatgctggtggcgctcatcgagttttgttataaatctcgcgctgaggctaagcgtatgaaggtggcaaaaaatgcacagaacattaacccatcctcttcccagaacagccaaaacttcgcaacctataaagagggctacaatgtttacgggatcgaaagtgtgaagatatag

SEQ ID NO: 37750 - DNA, 2511 bp, Artificial Sequence
  derived and/or modified sequence
atggttcagttttccaccagtgaattcaggttgactccccacattgataatctggaggtcgctaactctttcgccgtcactaacgccttctgttctcagttttccaggggggtgtacgcaatttttgggttctacgataaaaagtctgtgaataccatcactagtttttgtggcactctgcacgtgagttttattactccgtcctttcccacagatggcacacaccccttcgtcattcagatgcggccagatctgaagggagcccttctgtcccttatcgagtactaccagtgggacaagttcgcatacttatacgactctgatcggggattgtccacccttcaggcagtgctggactctgctgccgaaaaaaaatggcaggtgactgctatcaatgtgggaaacattaataatgataagaaggacgagatgtatcgatcccttttccaggacttagaactaaagaaagagcgcagagttattctcgattgcgaaagagataaagtgaatgacatagtggaccaggtcataactattggcaagcatgtaaagggctaccattacattatagcgaatcttggcttcactgacggcgacctgcttaaaatacagtttggaggtgccaatgtgtcggggtttcagatcgtggactatgacgattcactggtatcaaaattcatagagcgctggtctactctggaggagaaagagtaccctggggcacacacaaccacaatcaagtataccagcgctctgacatatgacgctgtgcaggtgatgactgaggcctttaggaatcttaggaaacagcgcatcgagatttcaaggagaggaaacgccggtgactgcctggcaaatcctgccgttccttggggacagggtgtagagattgaaagagctctcaagcaggtccaggtggaaggcctgtctgggaacatcaagtttgaccagaatgggaagagaatcaattacactattaatataatggaactgaagactaatggccctcggaaaataggttactggtctgaggtggataagatggtagtaacactcacagagcttcccagcggtaacgacactagcggtctggagaataagacagttgtggtgactaccattctcgaatccccttacgtgatgatgaaaaaaaaccacgagatgcttgaaggtaacgagcgatacgagggatattgcgtcgacctcgctgcagagattgccaagcactgcgggttcaagtacaaactcactatcgtgggcgacggaaagtacggcgcaagggacgctgataccaaaatttggaacgggatggtcggcgagctggtttatggcaaagccgacatcgcaatagctcccctgaccatcactttagtgcgggaggaggtgattgacttttcgaaacccttcatgagcctgggaatttctattatgattaaaaaaccccagaaaagcaagcctggcgtattctccttcctagaccccctcgcgtacgagatttggatgtgtatagtgttcgcatacattggggtcagcgtcgtactcttcctggtctcccggtttagtccatatgaatggcacactgaggagttcgaggacggcagggaaactcaatcaagcgaatcgacaaatgagtttgggatcttcaactcattgtggtttagcctgggcgcttttatgcagcaaggctgtgacataagcccaaggagcctgagtggaaggatcgtgggaggcgtgtggtggtttttcactctcattattatctcatcgtacactgctaatctggccgcatttctcacagtcgaacgtatggtctcaccaattgagtcggccgaggacctaagtaaacagaccgagattgcatacgggaccctcgactccggttccacaaaggagttctttagacgttcaaagatagccgtgtttgataagatgtggacttacatgagatcagctgaaccctctgtgttcgtccggacgacagccgagggggtcgctcgcgtgaggaaatccaaaggaaagtacgcgtacctgctggaatccactatgaatgaatatatcgagcagaggaagccgtgtgatactatgaaggtgggtggaaatttagatagcaagggatacggaatcgcaacacccaagggctcctccctacgaacacccgttaacctcgcagtgcttaagctatccgagcagggagtactggataaactgaaaaataagtggtggtatgataagggcgaatgcggggcaaaagattcaggaagtaaagagaaaactagcgctctgagcctgtctaacgtcgccggagttttttacatcctggtcgggggtctgggactggctatgctggtcgctctcattgagttttgttacaaatctagagctgaggccaagagaatgaaggttgccaaaaacgctcagaatatcaatccctcatcatcccagaacagtcaaaactttgccacctataaggagggatacaacgtctacggcattgaatcagtcaagatttag

SEQ ID NO: 37751 - DNA, 2511 bp, Artificial Sequence
  derived and/or modified sequence
atggtgcagttcagcaccagcgagttcagactgaccccccacatcgacaacctggaggtggccaacagcttcgccgtgaccaacgccttctgcagccagttcagcagaggcgtgtacgccatcttcggcttctacgacaagaagagcgtgaacaccatcaccagcttctgcggcaccctgcacgtgagcttcatcacccccagcttccccaccgacggcacccaccccttcgtgatccagatgagacccgacctgaagggcgccctgctgagcctgatcgagtactaccagtgggacaagttcgcctacctgtacgacagcgacagaggcctgagcaccctgcaggccgtgctggacagcgccgccgagaagaagtggcaggtgaccgccatcaacgtgggcaacatcaacaacgacaagaaggacgagatgtacagaagcctgttccaggacctggagctgaagaaggagagaagagtgatcctggactgcgagagagacaaggtgaacgacatcgtggaccaggtgatcaccatcggcaagcacgtgaagggctaccactacatcatcgccaacctgggcttcaccgacggcgacctgctgaagatccagttcggcggcgccaacgtgagcggcttccagatcgtggactacgacgacagcctggtgagcaagttcatcgagagatggagcaccctggaggagaaggagtaccccggcgcccacaccaccaccatcaagtacaccagcgccctgacctacgacgccgtgcaggtgatgaccgaggccttcagaaacctgagaaagcagagaatcgagatcagcagaagaggcaacgccggcgactgcctggccaaccccgccgtgccctggggccagggcgtggagatcgagagagccctgaagcaggtgcaggtggagggcctgagcggcaacatcaagttcgaccagaacggcaagagaatcaactacaccatcaacatcatggagctgaagaccaacggccccagaaagatcggctactggagcgaggtggacaagatggtggtgaccctgaccgagctgcccagcggcaacgacaccagcggcctggagaacaagaccgtggtggtgaccaccatcctggagagcccctacgtgatgatgaagaagaaccacgagatgctggagggcaacgagagatacgagggctactgcgtggacctggccgccgagatcgccaagcactgcggcttcaagtacaagctgaccatcgtgggcgacggcaagtacggcgccagagacgccgacaccaagatctggaacggcatggtgggcgagctggtgtacggcaaggccgacatcgccatcgcccccctgaccatcaccctggtgagagaggaggtgatcgacttcagcaagcccttcatgagcctgggcatcagcatcatgatcaagaagccccagaagagcaagcccggcgtgttcagcttcctggaccccctggcctacgagatctggatgtgcatcgtgttcgcctacatcggcgtgagcgtggtgctgttcctggtgagcagattcagcccctacgagtggcacaccgaggagttcgaggacggcagagagacccagagcagcgagagcaccaacgagttcggcatcttcaacagcctgtggttcagcctgggcgccttcatgcagcagggctgcgacatcagccccagaagcctgagcggcagaatcgtgggcggcgtgtggtggttcttcaccctgatcatcatcagcagctacaccgccaacctggccgccttcctgaccgtggagagaatggtgagccccatcgagagcgccgaggacctgagcaagcagaccgagatcgcctacggcaccctggacagcggcagcaccaaggagttcttcagaagaagcaagatcgccgtgttcgacaagatgtggacctacatgagaagcgccgagcccagcgtgttcgtgagaaccaccgccgagggcgtggccagagtgagaaagagcaagggcaagtacgcctacctgctggagagcaccatgaacgagtacatcgagcagagaaagccctgcgacaccatgaaggtgggcggcaacctggacagcaagggctacggcatcgccacccccaagggcagcagcctgagaacccccgtgaacctggccgtgctgaagctgagcgagcagggcgtgctggacaagctgaagaacaagtggtggtacgacaagggcgagtgcggcgccaaggacagcggcagcaaggagaagaccagcgccctgagcctgagcaacgtggccggcgtgttctacatcctggtgggcggcctgggcctggccatgctggtggccctgatcgagttctgctacaagagcagagccgaggccaagagaatgaaggtggccaagaacgcccagaacatcaaccccagcagcagccagaacagccagaacttcgccacctacaaggagggctacaacgtgtacggcatcgagagcgtgaagatctag

SEQ ID NO: 37752 - protein, 797 aa, Artificial Sequence
  derived and/or modified sequence
MDELAGGGGGGPGMAAPPRQQQGPGGNLGLSPGGNGAAGGGGPPASEGAGPAAGPELSRPQQYTIPGILHYIQHEWARFEMERAHWEVERAELQARIAFLQGERKGQENLKKDLVRRIKMLEYALKQERAKYHKLKYGTELNQGDLKMPTFESEETKDTEAPTAPQNSQLTWKQGRQLLRQYLQEVGYTDTILDVRSQRVRSLLGLSNSEPNGSVETKNLEQILNGGESPKQKGQEIKRSSGDVLETFNFLENADDSDEDEENDMIEGIPEGKDKHRMNKHKIGNEGLAADLTDDPDTEEALKEFDFLVTAEDGEGAGEARSSGDGTEWDKDDLSPTAEVWDVDQGLISKLKEQYKKERKGKKGVKRANRTKLYDMIADLGDDELPHIPSGIINQSRSASTRMTDHEGARAEEAEPITFPSGGGKSFIMGSDDVLLSVLGLGDLADLTVTNDADYSYDLPANKDAFRKTWNPKYTLRSHFDGVRALAFHPVEPVLVTASEDHTLKLWNLQKTVPAKKSASLDVEPIYTFRAHIGPVLSLAISSNGEQCFSGGIDATIQWWNMPSPSVDPYDTYEPNVLAGTLVGHTDAVWGLAYSGIKNQLLSCSADGTVRLWNPQEKLPCICTYNGDKKHGIPTSVDFIGCDPAHMVTSFNTGSAVIYDLETSQSLVILSSQVDSGLQSNNHINRVVSHPTLPVTITAHEDRHIKFFDNKTGKMIHSMVAHLDAVTSLAVDPNGIYLMSGSHDCSIRLWNLDSKTCVQEITAHRKKLDESIYDVAFHSSKAYIASAGADALAKVFV

SEQ ID NO: 37753 - DNA, 2394 bp, Artificial Sequence
  derived and/or modified sequence
atggacgagctggccggcggcggcggcggcggccccggcatggccgccccccccagacagcagcagggccccggcggcaacctgggcctgagccccggcggcaacggcgccgccggcggcggcggcccccccgccagcgagggcgccggccccgccgccggccccgagctgagcagaccccagcagtacaccatccccggcatcctgcactacatccagcacgagtgggccagattcgagatggagagagcccactgggaggtggagagagccgagctgcaggccagaatcgccttcctgcagggcgagagaaagggccaggagaacctgaagaaggacctggtgagaagaatcaagatgctggagtacgccctgaagcaggagagagccaagtaccacaagctgaagtacggcaccgagctgaaccagggcgacctgaagatgcccaccttcgagagcgaggagaccaaggacaccgaggcccccaccgccccccagaacagccagctgacctggaagcagggcagacagctgctgagacagtacctgcaggaggtgggctacaccgacaccatcctggacgtgagaagccagagagtgagaagcctgctgggcctgagcaacagcgagcccaacggcagcgtggagaccaagaacctggagcagatcctgaacggcggcgagagccccaagcagaagggccaggagatcaagagaagcagcggcgacgtgctggagaccttcaacttcctggagaacgccgacgacagcgacgaggacgaggagaacgacatgatcgagggcatccccgagggcaaggacaagcacagaatgaacaagcacaagatcggcaacgagggcctggccgccgacctgaccgacgaccccgacaccgaggaggccctgaaggagttcgacttcctggtgaccgccgaggacggcgagggcgccggcgaggccagaagcagcggcgacggcaccgagtgggacaaggacgacctgagccccaccgccgaggtgtgggacgtggaccagggcctgatcagcaagctgaaggagcagtacaagaaggagagaaagggcaagaagggcgtgaagagagccaacagaaccaagctgtacgacatgatcgccgacctgggcgacgacgagctgccccacatccccagcggcatcatcaaccagagcagaagcgccagcaccagaatgaccgaccacgagggcgccagagccgaggaggccgagcccatcaccttccccagcggcggcggcaagagcttcatcatgggcagcgacgacgtgctgctgagcgtgctgggcctgggcgacctggccgacctgaccgtgaccaacgacgccgactacagctacgacctgcccgccaacaaggacgccttcagaaagacctggaaccccaagtacaccctgagaagccacttcgacggcgtgagagccctggccttccaccccgtggagcccgtgctggtgaccgccagcgaggaccacaccctgaagctgtggaacctgcagaagaccgtgcccgccaagaagagcgccagcctggacgtggagcccatctacaccttcagagcccacatcggccccgtgctgagcctggccatcagcagcaacggcgagcagtgcttcagcggcggcatcgacgccaccatccagtggtggaacatgcccagccccagcgtggacccctacgacacctacgagcccaacgtgctggccggcaccctggtgggccacaccgacgccgtgtggggcctggcctacagcggcatcaagaaccagctgctgagctgcagcgccgacggcaccgtgagactgtggaacccccaggagaagctgccctgcatctgcacctacaacggcgacaagaagcacggcatccccaccagcgtggacttcatcggctgcgaccccgcccacatggtgaccagcttcaacaccggcagcgccgtgatctacgacctggagaccagccagagcctggtgatcctgagcagccaggtggacagcggcctgcagagcaacaaccacatcaacagagtggtgagccaccccaccctgcccgtgaccatcaccgcccacgaggacagacacatcaagttcttcgacaacaagaccggcaagatgatccacagcatggtggcccacctggacgccgtgaccagcctggccgtggaccccaacggcatctacctgatgagcggcagccacgactgcagcatcagactgtggaacctggacagcaagacctgcgtgcaggagatcaccgcccacagaaagaagctggacgagagcatctacgacgtggccttccacagcagcaaggcctacatcgccagcgccggcgccgacgccctggccaaggtgttcgtgtag

SEQ ID NO: 37754 - DNA, 2394 bp, Artificial Sequence
  derived and/or modified sequence
atggacgaactcgctggcgggggcggtgggggccctggcatggccgcacctccaagacagcagcagggccccggtggcaatctgggactatcaccaggcggaaacggcgctgcaggaggaggtgggccaccagcgtcagagggagccggccccgctgctggcccggaactttccaggcctcaacagtacaccataccagggattctgcactatatccagcatgagtgggcacggttcgagatggagcgggctcactgggaggtggaaagagcagagctgcaggcccgcatcgcttttctccagggagagaggaagggtcaagaaaatctgaagaaggacctcgtaaggcgcattaaaatgctcgagtacgccttgaagcaagagcgggcaaaataccacaagctgaagtatggcaccgagctgaaccaaggcgacctgaagatgcctactttcgaaagtgaggagactaaggacacagaagctccaacggccccccaaaattcccagcttacctggaaacagggtcggcagttgcttagacagtatctccaagaagtcggatacaccgacacgattctagatgttaggagccagcgggtgcgttccctcctggggctgagcaatagcgaacctaacggttccgttgagacaaagaacctggaacagatattgaacggaggcgaatcaccaaagcagaaaggtcaagaaatcaagcgaagtagcggagatgtgctcgagactttcaacttccttgaaaacgccgatgattccgatgaggacgaggagaacgacatgatcgaggggataccggagggaaaagacaagcaccggatgaacaaacataaaattggaaatgaaggtctcgcagcagatctgacagatgaccccgacacggaagaggcccttaaggagtttgacttcttagtcacagcagaagacggagagggagctggggaggcaagatccagcggagacggaactgaatgggataaggatgacctatcaccgacagccgaggtgtgggacgtcgatcaagggctgatcagtaagttaaaggagcagtataagaaagagagaaaagggaaaaagggagttaaacgggcgaatcggactaaactctatgatatgattgcggatctaggggacgatgaactgcctcacattccttctggcattattaaccagtctcggtcagcttccacgcgcatgaccgaccatgaaggcgctcgagccgaggaagccgaaccaataacattcccctccggcggcggtaagtccttcatcatgggctccgacgatgtccttctctccgtgctgggcctcggggatctagcggatctgaccgtgactaacgatgctgattactcctatgatctccctgccaacaaggacgccttccggaaaacgtggaacccaaagtatactttaagatcacatttcgacggagttcgggcactagcattccaccccgtggaacctgtcctggtgacggcaagcgaagatcataccttgaaactgtggaatctgcagaagacagtgcctgcaaagaagtcggcctcactcgacgtggaaccaatttacaccttccgcgcccacatcgggccggtactgtctctggccataagctccaatggagaacagtgtttttccggggggatcgacgcaaccatccagtggtggaacatgccatcccccagtgtggacccatatgacacttatgagcctaacgtgcttgcgggcacactcgttggccacactgatgctgtctggggactggcctactccggtattaaaaaccagttgttgtcttgctccgcggacggcaccgtcagactctggaacccccaggaaaaactgccttgcatttgcacctataacggggacaaaaagcatggaattcctacgtccgttgactttatcggttgcgacccagcccatatggttacctcttttaacactggttctgccgtcatttatgacttagagacgagccagtcgctcgtgatcttgtcttcccaggtggatagcgggctccagtcaaacaatcacataaatagggtcgtgtcacacccgaccctaccagttactattacagcccacgaggatcgccatattaaattctttgacaacaaaaccgggaaaatgattcattccatggtcgcccacctggacgctgtgacctcactggccgtcgaccccaacggcatatacctgatgtctgggtctcacgactgcagtattcgcctctggaacctcgacagtaagacatgcgtgcaggagatcaccgcccatcggaagaaactcgacgagagtatatatgacgtggcgtttcacagttcaaaggcctatatcgcgagtgcaggggctgacgcgctggccaaagtctttgtctag

SEQ ID NO: 37755 - DNA, 2394 bp, Artificial Sequence
  derived and/or modified sequence
atggatgagctggccggcggcggcggcggcggccctggcatggccgccccaccccggcagcagcagggccctgggggcaacctgggcctgagccctggaggaaatggagctgctgggggcggcggccccccagccagcgagggcgccggccctgctgctggccctgagctgagccggccccagcagtacaccatccctggcatcctgcactacatccagcacgagtgggccaggtttgagatggagcgggcccactgggaggtggagagagctgagctgcaggccagaattgccttcctgcagggcgagaggaagggccaggagaacctgaagaaggacctggtgcggcgcatcaagatgctggagtatgccctgaagcaggagcgggccaagtaccacaagctgaagtatggaacagagctgaaccagggcgacctgaagatgcccacctttgaaagtgaggagaccaaggacacagaggcccccacagccccccagaacagccagctgacctggaagcagggccggcagctgctgcggcagtacctgcaggaggtgggctacacagacaccatcctggatgtgcgcagccagagggtgcgcagcctgctgggcctgagcaacagcgagcccaacggctctgtggagaccaagaacctggagcagatcctgaatggaggagagagccccaagcagaagggccaggagatcaagaggagcagtggagatgtgctggagaccttcaacttcctggagaatgctgatgacagtgatgaagatgaggagaatgacatgattgagggcatccctgagggcaaggacaagcacaggatgaacaagcacaagattggaaatgaaggcctggccgctgacctgacagatgatcctgacacagaggaggccctgaaggagtttgacttcctggtgacagcagaagatggagagggcgctggggaggcccggagcagtggagatggaacagagtgggacaaggatgacctgagccccacagctgaggtgtgggatgtggaccagggcctcatcagcaagctgaaggagcagtacaagaaggagaggaagggcaagaagggcgtgaagagggccaacagaaccaagctgtatgacatgattgctgacctgggagatgatgagctgccccacatccccagcggcatcatcaaccagagccgcagcgccagcaccaggatgacagaccacgagggcgcccgggcagaggaggccgagcccatcaccttccccagcggcggcggcaagagcttcatcatgggcagtgatgatgtgctgctgtctgtgctgggcctgggggacctggccgacctgactgtgaccaatgatgctgactacagctatgacctgcctgccaacaaggatgccttcaggaagacctggaaccccaagtacaccctgcggagccactttgatggagtgcgggccctggccttccaccctgtggagcctgtgctggtgacagccagcgaggaccacaccctgaagctgtggaacctgcagaagacagtgcctgccaagaagagcgccagcctggatgtggagcccatctacaccttccgggcccacatcggccctgtgctgagcctggccatcagcagcaatggagagcagtgcttcagcggcggcattgatgccaccatccagtggtggaacatgcccagccccagcgtggacccctatgacacctatgagcccaacgtgctggccggcaccctggtgggccacacagatgctgtgtggggcctggcctacagcggcatcaagaaccagctgctgagctgcagcgcagatggcaccgtgcggctgtggaacccccaggagaagctgccctgcatctgcacctacaacggggacaagaagcacggcatccccacctctgtggacttcatcggctgtgaccctgcccacatggtgaccagcttcaacacaggcagcgctgtgatctatgacctggagaccagccagagcctggtgatcctgagcagccaggtggacagcggcctgcagagcaacaaccacatcaacagagtggtgagccaccccaccctgcctgtgaccatcacagcccatgaagatagacacatcaagttctttgacaacaagacaggcaagatgatccacagcatggtggcccacctggatgctgtgaccagcctggccgtggaccccaacggcatctacctgatgagcggcagccatgactgcagcatccggctgtggaacctggacagcaagacctgtgtgcaggagatcacagcccacaggaagaagctggatgagagcatctatgatgtggccttccacagcagcaaggcctacatcgccagcgctggagcagatgccctggccaaggtgtttgtgtag

SEQ ID NO: 37756 - DNA, 2394 bp, Artificial Sequence
  derived and/or modified sequence
atggacgagctggccggcggcggcggcggcggccccggcatggccgccccgcctcgccagcagcagggcccaggcggaaatctagggctttcacctggcggcaacggagccgcggggggaggagggcctcctgcctccgaaggcgcaggtccggcagccggaccggagcttagccgtccacagcagtatactatccccgggatcctgcactatattcagcacgagtgggccaggtttgagatggagcgggctcattgggaggtggaaagggcggagttgcaagcaagaattgcttttctgcagggggaacgaaaaggacaggagaacttgaagaaagacctggtgcgtcgtattaagatgttggaatatgctttgaaacaagagagagctaagtaccacaagctgaagtacgggaccgaactgaatcagggcgacctgaaaatgcctaccttcgaatctgaggagactaaggacaccgaagctcctacagctccccagaatagtcaactcacatggaaacaaggccggcaacttttacgacagtacttacaggaagtggggtacacggacaccattctggatgtgaggtcccaaagggtcaggagtctcttgggcttgtctaacagtgagcccaatgggtcagtggaaactaagaacttggagcagatcctgaatggcggagaatcacctaaacagaagggccaagaaatcaagcgttctagcggagatgtgctcgaaacgtttaattttctggagaatgcggacgattctgacgaggatgaagagaacgatatgatcgaggggatcccggaaggtaaagataagcatcgtatgaacaaacacaagatcggtaatgaaggactggcggctgatctcactgatgatccggatacggaagaggctctgaaggagttcgactttctcgttaccgcggaggatggtgagggcgctggagaggctaggagcagcggtgatggcactgagtgggacaaggacgacctgtccccaaccgctgaagtttgggatgtggatcaaggtcttatctctaaactgaaggagcagtacaagaaagaaaggaaaggcaaaaagggagtcaaaagagctaaccgcacaaagctgtacgacatgattgcggacctcggcgatgacgaacttcctcacatccccagcgggattattaaccagagcaggagtgcatccaccagaatgaccgaccacgagggagcaagagccgaggaagccgagccaataacattcccgtcaggaggtggcaaatcttttatcatgggatccgatgacgtccttctgagcgtactgggcctcggagatttggcagacttgactgttacaaatgacgcagactactcttacgacttgccagcaaacaaggatgcttttaggaaaacttggaatccaaaatatactctcagatctcacttcgacggcgtgagggcgctggccttccaccctgttgaacctgtgctcgtgactgcctccgaggaccacactcttaagctgtggaatttacaaaagaccgtgcctgcgaaaaaatcggcgtcactagatgtggaacctatttacactttccgagcacatatcggcccagttctgtctctggctatctcttctaacggggagcagtgtttttcaggaggcatagatgcgacaatccagtggtggaacatgcctagcccgagtgtcgacccatacgatacctacgagcctaacgtgctggccggcacactggtcgggcatactgacgctgtatggggcctggcctattccgggattaagaaccagttgctgagctgctctgccgatggaaccgtgaggctatggaacccccaggaaaagctgccatgcatatgcacttacaatggtgataaaaagcatggcatacctacctccgtggacttcatcgggtgcgacccagcacacatggtgactagcttcaatacaggctcggccgtcatctatgatttggaaacttcacagtcgctcgtgattctttcgtcccaggtagactcggggctgcagtccaataaccatattaacagagtagtttcacatcccactctcccagttaccatcacagcgcacgaggataggcacatcaagttttttgataacaagaccgggaaaatgatccacagtatggtggcacacctcgacgctgttacttcactggcagtagacccaaatgggatttacctgatgtctggatcccacgactgcagcatacggctgtggaacttggactctaagacctgcgtgcaagagatcactgcgcatcgcaaaaaactggatgagtccatctatgacgtcgcgtttcattcgtcgaaggcttacatcgcatccgcaggcgccgacgcattagcaaaagtgttcgtttag

SEQ ID NO: 37757 - DNA, 2394 bp, Artificial Sequence
  derived and/or modified sequence
atggacgagttggcgggaggtggaggaggaggtcccggaatggccgctcctcccaggcaacaacaaggcccaggcggtaatctcggattatcccctggaggcaacggcgctgctggaggtggtgggccaccagcctctgagggagccggtcctgcggcagggcctgaactgagcaggccacagcaatatacaattcccggaatcctgcattacattcagcacgaatgggcaagattcgaaatggagagagctcactgggaggtcgagcgtgcagaactgcaggccagaattgcgttccttcaaggggagcgaaagggccaggaaaacctgaaaaaggatttagtacgccgaatcaagatgctggagtatgctctcaaacaggagcgcgctaaatatcataaactgaagtatggaaccgagctaaaccagggtgatctcaaaatgccaacattcgaatctgaggaaacaaaggacactgaagctccgaccgcccctcagaactcgcagctaacctggaagcaggggagacagctcttacgccaatatcttcaggaggtggggtatacagacaccatcttggacgtacgatcccagagggttcgctctctgctgggtctgtctaacagcgaaccaaacggcagcgtcgagactaagaacctggaacagattctcaacggcggagagagcccaaagcaaaaggggcaggaaattaagcggtcctctggagatgtgctggagaccttcaatttccttgaaaacgccgacgattccgatgaggatgaagagaatgacatgattgagggtatcccagagggcaaagataaacatcggatgaataagcataagattgggaacgagggtctcgccgcagaccttaccgatgatcctgatacggaggaggctctgaaagaattcgattttcttgtgactgccgaggatggtgaaggcgctggtgaggcaagaagcagcggagatggcactgagtgggataaagacgacctgtcccctaccgctgaggtatgggatgtggatcaggggctcatcagtaaactaaaagaacagtacaaaaaagagaggaagggaaaaaaaggggtgaagagggccaatagaaccaaactgtacgatatgatcgcagaccttggggatgatgaacttccccatattcctagcggcatcattaaccagtccaggtccgcctctacacgtatgaccgatcacgaaggagccagggccgaggaagcagaacccataacatttcctagcgggggtggaaaatcctttatcatgggttccgatgacgtcctgctttccgtgcttgggctgggcgatctggctgacctcactgtgaccaatgacgctgactattcctatgacctccccgcaaataaagacgcctttcggaaaacctggaatcctaaatacactttgagaagccatttcgacggagttcgggctctcgctttccaccccgtggaaccagtcctggttacggcctccgaagaccacaccctgaagttgtggaacctacagaagacagtgccggcaaaaaagagcgctagtctcgatgtggagcctatttacacttttagggcccacatcgggcctgtactgtccctcgccatctcatcaaatggcgagcagtgcttctctgggggaattgatgccaccatccaatggtggaatatgccttctccctccgtggacccttacgatacatacgaacccaacgtccttgctggcaccctagtcggacatacggatgctgtctggggcctagcctactccggcatcaaaaatcagttactgtcatgctcggccgacggtacagtccggctgtggaacccccaagagaaactgccctgcatctgtacatataacggagacaaaaaacatgggatccccacatctgtcgacttcattggctgcgatcctgcgcacatggtcactagctttaataccggatctgccgtgatatacgacctggagacaagccagtctctggtcattttgtcctcacaggtggatagcggcctgcagagcaacaatcatattaaccgtgttgtgtctcaccctacactcccggtcacaatcaccgcccacgaagatcgccatatcaagtttttcgacaataagaccgggaaaatgatacatagcatggttgcccacctcgatgccgtgacatctttggcagtagatcctaatggaatctacttgatgagcggaagccacgattgctcgattagactgtggaacctggactctaagacgtgtgttcaggagatcactgcacatcgtaagaagctggatgaatcgatttacgatgtggcctttcatagcagcaaggcctacattgctagtgctggagccgatgccctggcgaaagtgttcgtttag

SEQ ID NO: 37758 - DNA, 2799 bp, Artificial Sequence
  derived and/or modified sequence
ggcagatggaggagggattgtaatggcggcagccggcagctccctgctctgacccacggcaggcacacagcaacgaccccttccccgcccctctcccggccggcctccgccccgcagccagcgcggggccaccctctccggcccttcccccagctgtcggcgtctcgccctgcgccccggccggggccccacacacaatggacgagcttgccggaggcggtggtggcggcccggggatggcggcccctccccggcagcagcagggacctggggggaacctgggcctttcgcccggggggaacggagcggcgggcggcgggggtcctccggcctccgagggagcgggtcccgcggcaggccccgagctgtcccggccgcagcagtacactatcccggggatactgcactacatccagcacgagtgggctcggttcgagatggagcgggcgcactgggaggtggaacgggccgaactgcaggcccggattgcatttctacaaggcgaaagaaaaggtcaagagaacctgaagaaggacttagtaagaagaataaagatgttagagtatgcattaaaacaagaaagggcaaaatatcacaaattaaaatatggcacggaactgaaccaaggtgacttgaaaatgccaacctttgagtcagaagaaaccaaagacacagaggctcccacagcacctcagaatagccagttaacgtggaagcaaggcagacagcttttaagacagtatcttcaggaagtaggttatacagatacaatattagatgtacggtctcagcgggtaaggtcattacttggactatctaattcagaaccaaatggatcagtagaaacaaagaatttagaacagatcctgaatggaggtgaatctcctaagcaaaagggacaagaaataaaaaggtcctctggtgatgttcttgagacgttcaatttcttagaaaatgccgatgacagtgatgaagatgaggaaaatgacatgatcgaaggcatcccagaaggaaaagacaaacatcggatgaataaacataaaataggtaatgaaggtttagctgctgacctaactgacgatcctgatactgaggaagcactgaaagaatttgattttttagtgactgctgaagatggtgaaggagctggagaagcacggagttcgggggatggcacagaatgggataaagatgacctctccccaactgctgaggtttgggatgtagaccagggactaataagtaaactgaaggaacagtacaagaaggaacgaaaggggaagaaaggggtgaagagggccaacaggacaaaactctacgacatgatagctgatctgggagatgatgagctgccccacatcccttcaggaatcattaatcagtctaggtcagcctctactagaatgactgatcatgaaggtgcaagagcagaggaagctgaaccaataacgtttccatctggaggaggcaagtcatttattatgggttctgatgatgttttgttaagtgtactgggccttggagaccttgcagacttgacggtaacaaatgatgcagactatagttatgatttgcctgctaataaagatgcctttcgaaagacatggaatcccaagtatacactacgtagccattttgatggagtacgggcattagcttttcatcctgtagaacctgtgctggttactgcttctgaggaccataccctgaaactttggaacctgcaaaaaacagttcctgccaaaaagagtgcctctttagatgtagagcctatctacacatttagggcccacatcggccctgttctgtcattagctattagttctaatggagaacagtgttttagtggtggtattgatgcaaccatccagtggtggaatatgccgagtcccagtgtagatccatatgatacatatgagccaaatgttctagctggcactttagttggtcatacagatgcagtttggggtcttgcttatagtggcataaaaaatcaattactgtcttgttcagcagatggcactgttaggttatggaatccacaagaaaaattgccatgtatttgcacttacaatggagataaaaagcatggaatacctacatcagttgactttataggctgtgatccagctcatatggtaacctctttcaacactggtagtgcagtaatttatgatttagaaacatcacagtcattggtgatactttcatcacaggtagattctggtttacaatctaataatcatatcaacagagtagtaagtcatcccacacttcctgttacaataactgctcatgaagatagacacatcaaattttttgacaataaaacgggtaaaatgatccattctatggtagctcacttggatgctgttacaagtctagcagtagatcctaatggaatctatttgatgtctggaagccatgactgttccatcagattatggaatttagacagcaagacatgtgtgcaagaaataacagctcacagaaagaaattggatgaatcaatttatgatgttgctttccactcgtcaaaagcatatatagctagtgcaggagctgatgctcttgccaaagtatttgtatgaatcaacaaaaacttgcatcgtaacaagatttgcttggacagaaagagggtctgcatcactgccatcagaaaggttactgatatgacactacatgtgatctgcctggtgaaggctatctggggcaggcacaaattggtggaaatcacatcttaatgtcaagctcattaagttaactgtaattactgtattttgtgggacaaagaaaaaa

SEQ ID NO: 37759 - protein, 620 aa, Artificial Sequence
  derived and/or modified sequence
MSPSPTALFCLGLCLGRVPAQSGPLPKPSLQALPSSLVPLEKPVTLRCQGPPGVDLYRLEKLSSSRYQDQAVLFIPAMKRSLAGRYRCSYQNGSLWSLPSDQLELVATGVFAKPSLSAQPGPAVSSGGDVTLQCQTRYGFDQFALYKEGDPAPYKNPERWYRASFPIITVTAAHSGTYRCYSFSSRDPYLWSAPSDPLELVVTGTSVTPSRLPTEPPSPVAEFSEATAELTVSFTNEVFTTETSRSITASPKESDSPAGESCPPVLHQGQPGPDMPRGCDPNNPGGVSGRGLAQPEEAPAAQGQGCAEAASAPPAPPADPEIKRGSGWRPTGCSQPRVMFMTAEPQARSYPREGSWHGRRLKDWRVWSVEAGGQRLQLWKRGHAASSWCSIREPFGQCLSVCLPLCLRAPSIWDGRNLWRPHPPPCTLWMTWYPGWTTYWPLSSTSLIWAPDGSLRFPALRVDSVPSSVQNPPVLPFGPLCSCLVFPRNSHPHSISHCGLTNLLSSLRTGLAGSLGMSFIFLSVKLARCPLPFTLENKISLCNMVKPHLYQQNKKTQKLARCGGASLYSQQLRGLRWENGLSLGGRGCSELRSHHCTLARVTKPDFVSKNTGMNMSITLI

SEQ ID NO: 37760 - DNA, 486 bp, Artificial Sequence
  derived and/or modified sequence
ggcccagccggggagggaggaaggaggagggacgggaggagggacgggaggagggagggcgggcaggcgccagcccagagcagccccgggcaccagcacggactctctcttccagcccaggtgccccccactctcgctccattcggcgggagcacccagtcctgtacgccaaggaactggttcttgctctgtcacccaggctggagtgcagtgccaactccgctcactgcagcctcaacttcccgggctcaggcgattctcccacctcggtctcctcggtacctgggaccacaagtgtgcgccactaggcctggctaatttttggtgtttttagtagagacagaattttgccgtgttgaccaggctggtcttgaactcctgagctcaggtcctgggggcaccatggtttcggcggcagcccccagcctcctcatccttctgttgctgctcctggggtctgtgcctgctaccgacgcccgctctgtg

SEQ ID NO: 37761 - DNA, 561 bp, Artificial Sequence
  derived and/or modified sequence
atgtggaaccagcagggcagacccggcatcagaaaccagttcagcctgttcttcttcctgacccagagcctggccctgagcctgagactggagtgcagcggcgccatcagcgaccactgcaacctgagactgctgggcagcagcgacagcagcgccagcgccagcagagtggccggcatcatcgacgtgagacacatgcccggccagcacggcgagaccctgagcctgctgaagatccagaagctggccggctgcggcggcagccacctgtacagccagctgctgggcagactgaagtgggaggacggcctgagcagcggcggcagaggctgcagcgagctgagaggcagacactgcgcccccggctgggtgaccgccagactgtgcctgaagaagaagaagaagagaggcggcggcaagaccaagctgtacagcgtgggcctggagttcaacatctggaaggtggacatctggaacgccctggtgcccctggacctgtggttcagcctgaagggcgagagcagaaccatcgtgctggagagcagcgaggtgagaacctag

SEQ ID NO: 37762 - DNA, 561 bp, Artificial Sequence
  derived and/or modified sequence
atgtggaaccagcagggccgcccggggatccggaaccagttttccctgttttttttccttactcagtcccttgccctgagtttacgccttgagtgttcgggcgccattagcgatcactgtaatctgcgccttcttggcagctccgatagctcggcctccgctagccgcgtcgcggggatcatcgacgtgagacacatgcccggacagcacggggagacattgagtctgcttaagattcagaagttggcggggtgtggtggatcccacctctactcccaactgcttggaaggctaaagtgggaagacgggttgtctagcggaggcaggggatgcagcgagcttcgaggtcgtcactgtgccccagggtgggtcactgcacggctgtgcttgaagaaaaagaagaaacgcggaggcggtaagaccaagttatactctgttgggctggagttcaacatttggaaagtcgatatctggaatgccctcgtgcccctcgacctgtggttttccctgaaaggtgagtcccggactatagtcttggaatcctccgaggtcaggacttag

SEQ ID NO: 37763 - DNA, 2210 bp, Artificial Sequence
  derived and/or modified sequence
acagagctcaggacagggctgaggaaccatgtctccatccccgaccgccctcttctgtcttgggctgtgtctggggcgtgtgccagcgcagagtggaccgctccccaagccctccctccaggctctgcccagctccctggtgcccctggagaagccagtgaccctccggtgccagggacctccgggcgtggacctgtaccgcctggagaagctgagttccagcaggtaccaggatcaggcagtcctcttcatcccggccatgaagagaagtctggctggacgctaccgctgctcctaccagaacggaagcctctggtccctgcccagcgaccagctggagctcgttgccacgggagtttttgccaaaccctcgctctcagcccagcccggcccggcggtgtcgtcaggaggggacgtaaccctacagtgtcagactcggtatggctttgaccaatttgctctgtacaaggaaggggaccctgcgccctacaagaatcccgagagatggtacagggctagttttcccatcatcacggtgaccgccgcccacagcggaacctaccgatgctacagcttctccagcagggacccatacctgtggtcagcccccagcgaccccctggagcttgtggtcacagaattctcagaagccaccgctgaactgaccgtctcattcacaaacgaagtcttcacaactgagacttctaggagtatcaccgccagtccaaaggagtcagactctccagctggtcctgcccgccagtactacaccaagggcaacctggtccggatatgcctcggggctgtgatcctaataatcctggcggggtttctggcagaggactggcacagccggaggaagcgcctgcggcacaggggcagggctgtgcagaggccgcttccgcccctcccgcccctcccgctgacccggaaatcaaacgggggtcaggatggaggccgacaggatgttcacagccgcgggttatgttcatgaccgctgaaccccaggcacggtcgtatccaagggagggatcatggcatgggaggcgactcaaagactggcgtgtgtggagcgtggaagcaggagggcagaggctacagctgtggaaacgaggccatgctgcctcctcctggtgttccatcagggagccgttcggccagtgtctgtctgtctgtctgcctctctgtctgagggcaccctccatttgggatggaaggaatctgtggagaccccatcctcctccctgcacactgtggatgacatggtaccctggctggaccacatactggcctctttcttcaacctctctaatatgggctccagacggatctctaaggttcccagctctcagggttgactctgttccatcctctgtgcaaaatcctcccgtgcttccctttggccctctgtgctcttgtctggttttccccagaaactctcaccctcactccatctcccactgcggtctaacaaatctcctttcgtctctcagaacgggtcttgcaggcagtttgggtatgtcattcattttccttagtgtaaaactagcacgttgcccgcttcccttcacattagaaaacaagatcagcctgtgcaacatggtgaaacctcatctctaccaacaaaacaaaaaaacacaaaaattagccaggtgtggtggtgcatccctatactcccagcaactcagggggctgaggtgggagaatggcttgagcctgggaggcagaggttgcagtgagctgagatcacaccactgcactctagctcgggtgacgaagcctgactttgtctcaaaaaatacagggatgaatatgtcaattaccctgatttgatcatagcacgttgtatacatgtactgcaatattgctgtccaccccataaatatgtacaattctgtatacatttttaaaatcataaaaataagataatgcaccgtctccacccctctcatatttactttctgaaggaaatgttaggtcttctcaaggtaaagttctatatttattatagcgtttaggcatttcttgaccatctaatgagtgtaaaactgtaccactgggccaagtgcagtggatcatgtctgtaatcctagcactgtgggaggccaaggcaggaggatcgcttgagcccaggagttcaagaccagcctgggcaacatagtgagaccccatctctacttaaaataaagaagataaaaattgttttaaaa

SEQ ID NO: 37764 - DNA, 561 bp, Artificial Sequence
  derived and/or modified sequence
atgtggaaccagcagggccggcccggcatccggaaccagttcagcctcttcttcttcctgacccagagcctggccctgagcctgcggctggagtgcagcggggccatcagtgaccactgcaacctgcggctgctgggcagcagtgacagcagcgccagcgccagccgggtggccggcatcattgatgtgcgccacatgcctggccagcacggggagaccctgagcctgctgaagatccagaagctggccggctgcggcggcagccacctgtacagccagctgctgggccgcctgaagtgggaggatggcctgagcagcggcggccggggctgcagcgagctgcggggccgccactgtgcccctggctgggtgacagcccggctgtgcctgaagaagaagaagaagagaggaggcggcaagaccaagctgtacagcgtgggcctggagttcaacatctggaaggtggacatctggaatgccctggtgcccctggacctgtggttcagcctgaagggggagagcaggaccatcgtgctggagagcagcgaggtgaggacatag

SEQ ID NO: 37765 - DNA, 561 bp, Artificial Sequence
  derived and/or modified sequence
atgtggaaccagcagggccggcccggcatccggaaccagttcagcctcttctttttcctcactcagtcgctggcccttagcttgcgtcttgagtgcagtggcgctatctcggatcattgtaatctccggctgttgggtagctctgattctagcgcctccgcctcgcgcgtcgctggaataatcgacgtgcggcacatgccgggccagcacggggagaccctgtctctcctgaaaatacagaaactggctggttgtgggggcagccatctgtactcacagctccttgggagactgaaatgggaggacgggctaagtagcgggggacgcggttgcagcgaactgaggggaagacactgtgcccctggttgggtcacggcaaggctttgtctcaagaagaaaaaaaaacgcggcggcggaaaaacaaaactttacagcgtggggttggagttcaacatatggaaagtcgacatatggaacgctctggtccctctggacttgtggttttcactgaagggtgagtccaggaccattgttttggagtcttcagaggtgcggacttag

SEQ ID NO: 37766 - DNA, 624 bp, Artificial Sequence
  derived and/or modified sequence
atggggatgaggctgcagctgttgcgggatagaagaatctcctcgaggggcccagggctgcatcgggctaaagccgatccccagcagcagaagcgtctaaccacaggtttgatgacccaggctgaaacccagaaagaagctcagcaacgtcaggcagctatgagaaagacagccctgtggcatacaggacacctccagcctaaaacccacacccataccgggatgcacacacagacacatcgagaacgggagagaaatactcaacgcctgcgtgacagagagcgcagggagaacggaaggcatacccatagacatactcatacccttacccacactcatacgcatcgggatacgcacactgccagctatcggagagggattgagacccacaccacacggcaaccactgcgattacgtggatccgctcatgacgagaacgaccctcgagtacgggaacaaccacgaggcacccaggccgacctttcctcgaggtccaggatggccgctcggttactagggaggctgacacctaccaataccgtgcgcgcaggcctacggctcggctctagagcagctagtcctgacccagcctgggggttcctcatcgtcgtcgggcctctgtag

SEQ ID NO: 37767 - DNA, 561 bp, Artificial Sequence
  derived and/or modified sequence
atgtggaaccagcaaggtcggcctgggatacggaatcaatttagtctgttcttttttctgacccagagcctagccctctcactgcggttggagtgttctggcgcaattagtgaccactgcaatttacggctactcggctcttctgatagttctgctagcgcttccagggtcgcgggtatcatcgacgtgcgacatatgccaggtcagcacggagagacactcagtctcctcaaaatccagaaactcgcaggctgcggcggttcccatctctatagccagttgctggggaggctcaagtgggaagacggcctatctagtggcggacgagggtgttccgagctgagaggtagacactgcgcgcctgggtgggttacagctagactgtgtctgaagaagaaaaaaaaacggggaggcggtaagaccaagctctactctgtcggtctggagttcaatatttggaaagtggatatctggaacgccttggtccctctggacctgtggttctccttaaaaggagagtctagaactatcgtgttagaatcaagcgaggttcggacctag

SEQ ID NO: 37768 - DNA, 1863 bp, Artificial Sequence
  derived and/or modified sequence
atgtccccttctcccaccgctctgttttgtctgggcctgtgcttgggccgcgtgcctgcccagtctggtcctctccccaaaccatccctgcaggctctcccctcttcactggtgcctctggaaaagcccgtgaccctgcgctgccagggaccacctggggtcgacctctataggctggagaagttgtctagcagtaggtatcaagaccaagccgttctgtttatccccgcaatgaaacgatctctcgccggtcgctaccgttgctcgtatcaaaacggctccctctggtctctgccaagcgaccagttggagcttgtggccacaggagtttttgccaagccctctctgtctgcccagccggggcctgccgtgagtagtgggggcgatgttactctccagtgccaaacaagatatggatttgaccagtttgcgctttataaggagggtgatccggccccatacaaaaatcccgaacggtggtatcgcgccagtttcccaattattacggtgacagcagctcatagtggaacgtatcggtgttatagcttcagttccagggacccgtacctctggagcgccccaagtgatcctctggagcttgtcgtgaccggcacctcagttacaccttctcggctacctacagaacccccctccccggtcgctgaattttcagaagcaacagcagaactgacggtgtcttttaccaacgaggttttcaccacggagacttccagaagtatcacagcttcccccaaagagtcagatagtccagcaggcgagtcctgcccacctgtgctgcaccagggccaaccagggccagatatgccccgggggtgtgatcccaataacccagggggagtttctgggcggggcctagcccagcctgaggaggcacctgcggctcagggccagggctgtgcagaggcagcaagcgcgccccccgctcccccagctgatcccgagattaagcggggatctggctggcgccctaccggctgctcacagcctagagtgatgttcatgacagccgagccacaggcccgatcctatccccgtgagggttcctggcacggacgcagactcaaagactggcgtgtgtggtccgtggaggcgggtggacaacggctccagctgtggaagagagggcatgccgctagctcatggtgcagcatccgagaaccttttggacaatgcctctcagtttgtctccctctttgtcttcgcgcaccatctatttgggacgggagaaatctgtggcgtcctcatccacctccttgcacactctggatgacttggtacccaggatggacaacatactggcccctgtcatccacatcactgatctgggcacccgatggttctctccgtttccctgcactccgggtggattccgttccctcgtctgtccaaaatccaccggtgcttccctttggccccttatgcagttgcctggtgttccctcggaatagccacccacatagcatcagccactgtggccttactaatttactgtcaagcctgcggaccggtctagctggcagccttggaatgagtttcatttttctttctgtgaagctggccaggtgccctctcccctttaccctggagaacaaaatcagcctatgcaacatggtgaaaccccatttgtatcagcagaataagaagacccaaaagttggcccgatgcggcggagcaagcttgtactcgcagcagttgcgcggactgagatgggaaaacggactaagcctaggggggcggggatgttccgaactacggtctcaccactgtaccctggcgcgagttaccaaacctgacttcgtttccaaaaatactgggatgaatatgagtattaccctgatttag

SEQ ID NO: 37769 - DNA, 2268 bp, Artificial Sequence
  derived and/or modified sequence
acagagctcaggacagggctgaggaaccatgtctccatccccgaccgccctcttctgtcttgggctgtgtctggggcgtgtgccagcgcagagtggaccgctccccaagccctccctccaggctctgcccagctccctggtgcccctggagaagccagtgaccctccggtgccagggacctccgggcgtggacctgtaccgcctggagaagctgagttccagcaggtaccaggatcaggcagtcctcttcatcccggccatgaagagaagtctggctggacgctaccgctgctcctaccagaacggaagcctctggtccctgcccagcgaccagctggagctcgttgccacgggagtttttgccaaaccctcgctctcagcccagcccggcccggcggtgtcgtcaggaggggacgtaaccctacagtgtcagactcggtatggctttgaccaatttgctctgtacaaggaaggggaccctgcgccctacaagaatcccgagagatggtacagggctagttttcccatcatcacggtgaccgccgcccacagcggaacctaccgatgctacagcttctccagcagggacccatacctgtggtcagcccccagcgaccccctggagcttgtggtcacaggaacctctgtgacccccagccggttaccaacagaaccaccttccccggtagcagaattctcagaagccaccgctgaactgaccgtctcattcacaaacgaagtcttcacaactgagacttctaggagtatcaccgccagtccaaaggagtcagactctccagctggtgagtcctgcccgccagtactacaccaagggcaacctggtccggatatgcctcggggctgtgatcctaataatcctggcggggtttctggcagaggactggcacagccggaggaagcgcctgcggcacaggggcagggctgtgcagaggccgcttccgcccctcccgcccctcccgctgacccggaaatcaaacgggggtcaggatggaggccgacaggatgttcacagccgcgggttatgttcatgaccgctgaaccccaggcacggtcgtatccaagggagggatcatggcatgggaggcgactcaaagactggcgtgtgtggagcgtggaagcaggagggcagaggctacagctgtggaaacgaggccatgctgcctcctcctggtgttccatcagggagccgttcggccagtgtctgtctgtctgtctgcctctctgtctgagggcaccctccatttgggatggaaggaatctgtggagaccccatcctcctccctgcacactgtggatgacatggtaccctggctggaccacatactggcctctttcttcaacctctctaatatgggctccagacggatctctaaggttcccagctctcagggttgactctgttccatcctctgtgcaaaatcctcccgtgcttccctttggccctctgtgctcttgtctggttttccccagaaactctcaccctcactccatctcccactgcggtctaacaaatctcctttcgtctctcagaacgggtcttgcaggcagtttgggtatgtcattcattttccttagtgtaaaactagcacgttgcccgcttcccttcacattagaaaacaagatcagcctgtgcaacatggtgaaacctcatctctaccaacaaaacaaaaaaacacaaaaattagccaggtgtggtggtgcatccctatactcccagcaactcagggggctgaggtgggagaatggcttgagcctgggaggcagaggttgcagtgagctgagatcacaccactgcactctagctcgggtgacgaagcctgactttgtctcaaaaaatacagggatgaatatgtcaattaccctgatttgatcatagcacgttgtatacatgtactgcaatattgctgtccaccccataaatatgtacaattctgtatacatttttaaaatcataaaaataagataatgcaccgtctccacccctctcatatttactttctgaaggaaatgttaggtcttctcaaggtaaagttctatatttattatagcgtttaggcatttcttgaccatctaatgagtgtaaaactgtaccactgggccaagtgcagtggatcatgtctgtaatcctagcactgtgggaggccaaggcaggaggatcgcttgagcccaggagttcaagaccagcctgggcaacatagtgagaccccatctctacttaaaataaagaagataaaaattgttttaaaa

SEQ ID NO: 37770 - DNA, 2264 bp, Artificial Sequence
  derived and/or modified sequence
acagagctcaggacagggctgaggaaccatgtctccatccccgaccgccctcttctgtcttgggctgtgtctggggcgtgtgccagcgcagagtggaccgctccccaagccctccctccaggctctgcccagctccctggtgcccctggagaagccagtgaccctccggtgccagggacctccgggcgtggacctgtaccgcctggagaagctgagttccagcaggtaccaggatcaggcagtcctcttcatcccggccatgaagagaagtctggctggacgctaccgctgctcctaccagaacggaagcctctggtccctgcccagcgaccagctggagctcgttgccacgggagtttttgccaaaccctcgctctcagcccagcccggcccggcggtgtcgtcaggaggggacgtaaccctacagtgtcagactcggtatggctttgaccaatttgctctgtacaaggaaggggaccctgcgccctacaagaatcccgagagatggtacagggctagttttcccatcatcacggtgaccgccgcccacagcggaacctaccgatgctacagcttctccagcagggacccatacctgtggtcagcccccagcgaccccctggagcttgtggtcacaggaacctctgtgacccccagccggttaccaacagaaccaccttccccggtagcagaattctcagaagccaccgctgaactgaccgtctcattcacaaacgaagtcttcacaactgagacttctaggagtatcaccgccagtccaaaggagtcagactctccagctggtcctgcccgccagtactacaccaagggcaacctggtccggatatgcctcggggctgtgatcctaataatcctggcggggtttctggcagaggactggcacagccggaggaagcgcctgcggcacaggggcagggctgtgcagaggccgcttccgcccctcccgcccctcccgctgacccggaaatcaaacgggggtcaggatggaggccgacaggatgttcacagccgcgggttatgttcatgaccgctgaaccccaggcacggtcgtatccaagggagggatcatggcatgggaggcgactcaaagactggcgtgtgtggagcgtggaagcaggagggcagaggctacagctgtggaaacgaggccatgctgcctcctcctggtgttccatcagggagccgttcggccagtgtctgtctgtctgtctgcctctctgtctgagggcaccctccatttgggatggaaggaatctgtggagaccccatcctcctccctgcacactgtggatgacatggtaccctggctggaccacatactggcctctttcttcaacctctctaatatgggctccagacggatctctaaggttcccagctctcagggttgactctgttccatcctctgtgcaaaatcctcccgtgcttccctttggccctctgtgctcttgtctggttttccccagaaactctcaccctcactccatctcccactgcggtctaacaaatctcctttcgtctctcagaacgggtcttgcaggcagtttgggtatgtcattcattttccttagtgtaaaactagcacgttgcccgcttcccttcacattagaaaacaagatcagcctgtgcaacatggtgaaacctcatctctaccaacaaaacaaaaaaacacaaaaattagccaggtgtggtggtgcatccctatactcccagcaactcagggggctgaggtgggagaatggcttgagcctgggaggcagaggttgcagtgagctgagatcacaccactgcactctagctcgggtgacgaagcctgactttgtctcaaaaaatacagggatgaatatgtcaattaccctgatttgatcatagcacgttgtatacatgtactgcaatattgctgtccaccccataaatatgtacaattctgtatacatttttaaaatcataaaaataagataatgcaccgtctccacccctctcatatttactttctgaaggaaatgttaggtcttctcaaggtaaagttctatatttattatagcgtttaggcatttcttgaccatctaatgagtgtaaaactgtaccactgggccaagtgcagtggatcatgtctgtaatcctagcactgtgggaggccaaggcaggaggatcgcttgagcccaggagttcaagaccagcctgggcaacatagtgagaccccatctctacttaaaataaagaagataaaaattgttttaaaa

SEQ ID NO: 37771 - DNA, 1863 bp, Artificial Sequence
  derived and/or modified sequence
atgagccccagccccacagccctcttctgcctgggcctgtgcctgggccgggtgcctgcccagagcggccccctgcccaagcccagcctgcaggccctgcccagcagcctggtgcccctggagaagcctgtgaccctgcgctgccagggccccccaggagtggacctgtaccgcctggagaagctgagcagcagccgctaccaggaccaggccgtgctcttcatcccagccatgaagaggagcctggccggccgctaccgctgcagctaccagaatggcagcctgtggagcctgcccagcgaccagctggagctggtggccaccggggtgtttgccaagcccagcctgagcgcccagcccggccctgctgtgtcctctggaggagatgtgaccctgcagtgccagaccaggtatggctttgaccagtttgccctgtacaaggagggggaccctgccccctacaagaaccctgagcgctggtaccgggccagcttccccatcatcaccgtgacagctgcccacagcggcacctaccgctgctacagcttcagcagccgggacccctacctgtggagcgcccccagcgaccccctggagctggtggtgacaggcacctctgtgacccccagccggctgcccacagagccccccagccctgtggccgagttcagcgaggccacagctgagctgactgtgtccttcaccaatgaggtgttcaccacagagaccagccgcagcatcacagccagccccaaggagagtgacagccctgctggggagagctgcccccctgtgctgcaccagggccagcccggccctgacatgccccggggctgtgaccccaacaaccctgggggcgtgtctggccggggcctggcccagcctgaggaggccccagctgcccagggccagggctgtgccgaggccgccagcgcccccccagcccccccagctgaccctgagatcaagaggggcagcggctggaggcccaccggctgcagccagccccgggtgatgttcatgacagctgagccccaggcccggagctacccccgggagggctcctggcatggaagaaggctgaaggactggagggtgtggagcgtggaggccggcggccagaggctgcagctgtggaagaggggccacgccgccagctcctggtgcagcatccgggagcccttcggccagtgcctgtctgtgtgcctgcccctgtgcctgcgggcccccagcatctgggatggcaggaacctgtggaggccccaccccccaccctgcaccctgtggatgacctggtacccaggctggaccacctactggcccctgagcagcaccagcctcatctgggccccagatggcagcctgcgcttccctgccctgcgggtggacagcgtgcccagctctgtgcagaacccccctgtgctgcccttcggccccctgtgcagctgcctggtgttccccaggaacagccacccccacagcatcagccactgcggcctgaccaacctgctgagcagcctgaggacaggcctggccggcagcctgggcatgtccttcatcttcctgtctgtgaagctggcccgctgccccctgcccttcaccctggagaacaagatcagcctgtgcaacatggtgaagccccacctgtaccagcagaacaagaagacccagaagctggcccgctgtggcggggccagcctgtacagccagcagctgcggggcctgcgctgggagaatggcctgagcctgggcggccggggctgcagcgagctgcggagccaccactgcaccctggcccgggtgaccaagccagactttgtgtccaagaacacaggcatgaacatgagcatcaccctcatctag

SEQ ID NO: 37772 - DNA, 1863 bp, Artificial Sequence
  derived and/or modified sequence
atgagccccagccccaccgccctgttctgcctgggcctgtgcctgggccgcgttccagcccagtccggaccactcccaaaacctagcttacaagctctgccctcatccctggttcctctcgagaaaccagttaccttgagatgtcaagggccccccggagtggatctctatagactcgaaaaactgtcctcaagcagatatcaggaccaggcagtcctgttcattcccgcaatgaagcggagtcttgcaggtcggtatagatgttcttaccagaacggctcactgtggtctttaccaagtgaccagctggagcttgtagcaacaggagtgttcgccaaaccttccctctccgcacagcccggccccgccgtatcaagcggaggcgatgtgaccctgcagtgtcagactagatatggcttcgaccagttcgcactgtacaaggaaggagatcctgccccctacaagaatcccgagcgatggtatcgcgcaagtttccccatcatcaccgtcaccgctgctcacagcgggacctatagatgctattcattctcaagccgggacccctacctctggagcgcgccaagtgatcccctcgagctggtggttaccggtacctccgtcaccccctccaggttaccaactgaaccaccaagcccagtggccgaatttagcgaggccactgccgaactcactgtgagctttaccaacgaggtgtttactaccgaaacatctaggtccattacagctagccccaaggagagtgatagcccagccggggaatcctgtcctcctgtgttacaccaaggccagcccggccctgacatgcctcgtggctgcgatcctaataaccccggaggcgtgagtgggaggggcctagcacaacctgaagaggctcccgcagcccaggggcaaggatgcgccgaggcggcgtccgcgcctccagcaccaccagcggatcccgagatcaaacgcggatctggttggcgccctacagggtgcagccagccgcgtgttatgttcatgactgctgagcctcaagctcgtagctaccctcgggagggctcttggcatgggcgacggctcaaagattggcgggtgtggtcagtcgaggcgggcggacagcgcctccagctgtggaagagggggcatgcagcaagcagctggtgctccatcagagagccctttgggcagtgcttatcagtttgccttccactgtgcctgcgtgccccttcaatttgggacggacggaatctttggcgccctcatcctcctccttgcacactgtggatgacatggtacccagggtggaccacctattggccattgtccagcacaagtttaatctgggctcccgatggcagccttcggtttcccgctcttagggtcgactctgtcccctcctccgtgcagaatccacccgttctgccctttgggccgctgtgtagctgcctggtgtttccacgaaatagccacccccactcgatatcacactgtggactgacaaacttgctgagctccctacggaccggtctggcaggctctctaggcatgagcttcatattcctgtctgtaaagttggctaggtgcccactcccgttcacgctagaaaataagattagcctgtgtaatatggtaaaacctcacctgtaccaacagaacaaaaagacacagaagcttgctagatgtggcggcgcgagcctctacagccaacagctccgaggcctgcggtgggagaatggactatccctgggaggacgggggtgttccgagttacggtcccaccattgtactctggccagggtcaccaaacctgattttgtatcaaagaatactggtatgaatatgtccattacacttatatag

SEQ ID NO: 37773 - DNA, 1863 bp, Artificial Sequence
  derived and/or modified sequence
atgtctccatctccaaccgccctgttctgcctgggtctgtgtctgggaagggtgccggctcaatctgggcctttgcctaaacctagcctccaggcgctgccgagttcactggtccccctagaaaaaccagtgaccttgcgttgtcagggacccccaggggtggatctatatcggctggaaaaactgtcaagtagtaggtatcaggaccaggctgtattattcatccctgctatgaagcgtagcctcgcaggtaggtaccgctgttcataccagaacggatccctgtggagcctaccaagtgaccagttggaactggttgccacaggagtgttcgcgaaaccttcactcagtgcccaacccggacctgcggtgtcttccggaggggacgttacccttcagtgccaaacaaggtacggatttgaccaattcgccctgtacaaggagggcgaccctgccccttacaaaaatccggaacgctggtatcgagcctccttccctatcattacagtgaccgcggcacattctggtacctaccggtgctactccttttctagcagagatccttacctgtggagcgcgcctagcgacccactcgaactcgtggtcaccggtaccagtgtgacaccctccagattacctacggagccccctagccccgtggcagaattttctgaggccaccgcggagctgacggtcagttttaccaatgaagtgttcacaaccgaaacgagtcggagcatcacggctagtcccaaggagtccgattctcccgctggtgaatcttgtccccctgtactgcaccagggacagccgggtccagacatgccccgtggttgcgatccgaacaaccctgggggtgtcagcggacgaggacttgcccagcccgaggaggccccagctgcgcaaggccaagggtgcgcggaggccgcatcagcccctcccgctccacccgcagatccggaaattaaacggggatccggttggcgcccaacgggctgctcccagcctcgcgttatgtttatgacagccgaacctcaggcccgttcttatcccagggaaggcagttggcacggccgaagactcaaggactggcgagtgtggagcgtggaggccggtggccagcgcctacaactctggaaacgcggtcatgccgcttccagctggtgctctattcgcgagccatttggacagtgtctgtctgtctgtctacccctctgtttgcgggcaccatccatttgggatggcaggaacctatggaggcctcaccctcccccttgcactctatggatgacatggtacccaggctggacgacctactggcctctctcctcgacgtccctgatctgggcacctgatggcagcctgcggttccccgctctccgggtggattctgtgccttcctccgtgcaaaacccgcctgtcctgccattcggaccattgtgctcatgtctagtgtttcccaggaacagccatcctcattccatatcccattgcggtctgactaacttgctgtccagcctgcggactggactagccggtagccttggcatgtcctttatttttctgtctgtcaagctggctagatgcccgctgccctttacccttgagaataagatttcactctgcaacatggtgaagccacacctgtaccagcagaataaaaagacacagaaactggccaggtgtgggggtgcatctctgtattctcaacagctcaggggccttaggtgggagaacgggctgtccctgggcggacgaggttgctccgagctgagatcacatcattgtacattagcccgtgtaacaaaacccgattttgtgtcaaaaaatacagggatgaacatgagcatcaccctcatttag

SEQ ID NO: 37774 - DNA, 1863 bp, Artificial Sequence
  derived and/or modified sequence
atgagccccagccccaccgccctgttctgcctgggcctgtgcctgggcagagtgcccgcccagagcggccccctgcccaagcccagcctgcaggccctgcccagcagcctggtgcccctggagaagcccgtgaccctgagatgccagggcccccccggcgtggacctgtacagactggagaagctgagcagcagcagataccaggaccaggccgtgctgttcatccccgccatgaagagaagcctggccggcagatacagatgcagctaccagaacggcagcctgtggagcctgcccagcgaccagctggagctggtggccaccggcgtgttcgccaagcccagcctgagcgcccagcccggccccgccgtgagcagcggcggcgacgtgaccctgcagtgccagaccagatacggcttcgaccagttcgccctgtacaaggagggcgaccccgccccctacaagaaccccgagagatggtacagagccagcttccccatcatcaccgtgaccgccgcccacagcggcacctacagatgctacagcttcagcagcagagacccctacctgtggagcgcccccagcgaccccctggagctggtggtgaccggcaccagcgtgacccccagcagactgcccaccgagccccccagccccgtggccgagttcagcgaggccaccgccgagctgaccgtgagcttcaccaacgaggtgttcaccaccgagaccagcagaagcatcaccgccagccccaaggagagcgacagccccgccggcgagagctgcccccccgtgctgcaccagggccagcccggccccgacatgcccagaggctgcgaccccaacaaccccggcggcgtgagcggcagaggcctggcccagcccgaggaggcccccgccgcccagggccagggctgcgccgaggccgccagcgccccccccgccccccccgccgaccccgagatcaagagaggcagcggctggagacccaccggctgcagccagcccagagtgatgttcatgaccgccgagccccaggccagaagctaccccagagagggcagctggcacggcagaagactgaaggactggagagtgtggagcgtggaggccggcggccagagactgcagctgtggaagagaggccacgccgccagcagctggtgcagcatcagagagcccttcggccagtgcctgagcgtgtgcctgcccctgtgcctgagagcccccagcatctgggacggcagaaacctgtggagaccccacccccccccctgcaccctgtggatgacctggtaccccggctggaccacctactggcccctgagcagcaccagcctgatctgggcccccgacggcagcctgagattccccgccctgagagtggacagcgtgcccagcagcgtgcagaacccccccgtgctgcccttcggccccctgtgcagctgcctggtgttccccagaaacagccacccccacagcatcagccactgcggcctgaccaacctgctgagcagcctgagaaccggcctggccggcagcctgggcatgagcttcatcttcctgagcgtgaagctggccagatgccccctgcccttcaccctggagaacaagatcagcctgtgcaacatggtgaagccccacctgtaccagcagaacaagaagacccagaagctggccagatgcggcggcgccagcctgtacagccagcagctgagaggcctgagatgggagaacggcctgagcctgggcggcagaggctgcagcgagctgagaagccaccactgcaccctggccagagtgaccaagcccgacttcgtgagcaagaacaccggcatgaacatgagcatcaccctgatctag

SEQ ID NO: 37775 - protein, 755 aa, Artificial Sequence
  derived and/or modified sequence
MIYEEDAEEWALYLTEVFLHVVKREAILLYRLENFSFRHLELLNLTSYKCKLLILSNSLLRDLTPKKCQFLEKILHSPKSVVTLLCGVKSSDQLYELLNISQSRWEISTEQEPEDYISVIQSIIFKDSEDYFEVNIPTDLRAKHSGEISERKEIEELSEASRNTIPLAVVLPTEIPCENPGEIFIILRDEVIGDTVEVEFTSSNKRIRTRPALWNKKVWCMKALEFPAGSVHVNVYCDGIVKATTKIKYYPTAKAKECLFRMADSGESLCQNSIEELDGVLTSIFKHEIPYYEFQSLQTEICSQNKYTHFKELPTLLHCAAKFGLKNLAIHLLQCSGATWASKMKNMEGSDPAHIAERHGHKELKKIFEDFSIQEIDINNEQENDYEEDIASFSTYIPSTQNPAFHHESRKTYGQSADGAEANEMEGEGKQNGSGMETKHSPLEVGSESSEDQYDDLYVFIPGADPENNSQEPLMSSRPPLPPPRPVANAFQLERPHFTLPGTMVEGQMERSQNWGHPGVRQETGDEPKGEKEKKEEEKEQEEEEDPYTFAEIDDSEYDMILANLSIKKKTGSRSFIINRPPAPTPRPTSIPPKEETTPYIAQVFQQKTARRQSDDDKFCGLPKKQDRARIESPAFSTLRGCLTDGQEELILLQEKVKNGKMSMDEALEKFKHWQMGKSGLEMIQQEKLRQLRDCIIGKRPEEENVYNKLTIVHHPGGKETAHNENKFYNVHFSNKLPARPQVEKEFGFCCKKDH

SEQ ID NO: 37776 - DNA, 2268 bp, Artificial Sequence
  derived and/or modified sequence
atgatatatgaggaagacgccgaggagtgggctctgtacctgacggaggtattcctgcatgtcgtgaagagagaggccatcctcctgtatcgacttgagaatttcagctttcgccatctcgaactgttaaatctgacatcttataagtgtaaattacttatactgtctaactcgctgctccgtgatcttacccctaaaaagtgtcagtttttggagaaaattttgcacagcccaaagagcgtggtgaccctgctttgtggcgtgaagtcatcagaccagttgtatgagctgctgaatatctcacagtccaggtgggaaataagcacagaacaggagcctgaagattatatatccgtgattcaaagtatcattttcaaggacagtgaagactacttcgaggttaacattccaaccgacttgagggctaaacattctggcgagatttcagagagaaaggagatcgaagagttgtcggaagcatctagaaatacgatccccctggctgttgtcctgcctaccgaaatcccctgtgagaaccccggcgagattttcataatattgcgcgatgaggtgataggcgacacagtggaagttgagttcacgagctcgaataaaaggatccggacgaggcccgccttgtggaacaagaaagtgtggtgtatgaaagccctggagtttccggccggcagcgtgcacgtcaatgtatactgtgacggcatcgtgaaggcgaccactaaaattaagtactatcccaccgctaaggcgaaggaatgcctgttcaggatggccgactccggggagtctctatgccaaaattctatagaggagctagacggcgttcttacctcaatattcaaacatgagatcccctactacgaattccaaagtctgcagactgagatttgttcacaaaacaaatacacacacttcaaggagcttcccacgctactgcattgtgccgcaaagtttggcctcaaaaacctggcaatccacctgctacaatgctccggtgcaacctgggcatctaagatgaaaaacatggaaggctctgacccagctcacatagctgagaggcatggccataaggaactgaaaaaaattttcgaggacttctccatccaagagatcgacatcaacaacgaacaggagaatgattacgaggaggacattgcttcgttttcaacatacattcccagtacacagaaccccgccttccaccacgaatctcgcaagacgtatgggcagtctgccgatggcgccgaagccaatgaaatggagggcgagggaaagcagaatggctcaggaatggaaaccaagcacagtcctttggaggtaggttccgaatcttccgaagatcagtatgatgatctctatgtgttcatcccaggcgccgaccctgagaacaacagtcaggaacctctcatgtcttcgcggcctccactcccacctccccgacctgtcgctaacgcattccaactggagcggccccattttacccttccggggacaatggttgaagggcagatggagcgcagccaaaactgggggcatcctggagttagacaggagacaggggatgagcccaagggagagaaagagaagaaggaggaggagaaggaacaggaggaggaggaggatccctatacatttgccgagattgatgactcggaatacgacatgatactggcaaatctgagcattaaaaagaagacaggatcgcgctctttcatcatcaaccggcctcccgctccaactccgagaccaacatccattccgcccaaggaagagactaccccgtacatcgcgcaagttttccagcaaaaaaccgcaaggcgtcagagtgacgatgacaagttttgtggtctgcccaagaagcaggaccgggccagaatcgagtctcccgcctttagcacactccgaggatgccttacagacgggcaggaggaattgattctgctccaggaaaaggtcaaaaacggaaaaatgagtatggacgaggctctggagaagtttaaacattggcagatgggaaagtccggcctggagatgatacagcaggagaagttaagacagctgagggattgtataattggtaagcgacccgaagaggagaacgtctacaataagctgacgatagtacaccaccccggtgggaaggaaaccgcccataatgaaaacaagttttacaacgtgcacttctcaaacaaactgccagcacgccctcaggtggagaaagaattcggattctgttgtaagaaagatcactag

SEQ ID NO: 37777 - DNA, 2268 bp, Artificial Sequence
  derived and/or modified sequence
atgatctatgaagaagatgctgaggagtgggccctgtacctgacagaggtgttcctgcacgtggtgaagcgggaggccatcctgctgtaccgcctggagaacttctccttccgccacctggagctgctgaacctgaccagctacaagtgcaagctgctgatcctgagcaacagcctgctgcgggacctgacccccaagaagtgccagttcctggagaagatcctgcacagccccaagtctgtggtgaccctgctgtgtggggtgaagagcagtgaccagctgtatgagctgctgaacatcagccagagccgctgggagatcagcacagagcaggagcctgaggactacatcagcgtcatccagagcatcatcttcaaggacagcgaggactactttgaggtgaacatccccacagacctgcgggccaagcacagcggggagatcagcgagaggaaggagattgaggagctgtctgaggccagcaggaacaccatccccctggccgtggtgctgcccacagagatcccctgtgagaaccctggagagatcttcatcatcctgagagatgaagtcatcggggacacagtggaggtggagttcaccagcagcaacaagaggatccgcaccaggcctgccctgtggaacaagaaggtgtggtgcatgaaggccctggagttccctgctggctctgtgcacgtgaatgtgtactgtgatggcatcgtgaaggccaccaccaagatcaagtactaccccacagccaaggccaaggaatgtctcttcaggatggctgacagcggggagagcctgtgccagaacagcattgaggagctggatggagtgctgaccagcatcttcaagcatgagatcccctactatgagttccagagcctgcagacagagatctgcagccagaacaagtacacccacttcaaggagctgcccaccctgctgcactgtgccgccaagtttggcctgaagaacctggccatccacctgctgcagtgcagcggggccacctgggccagcaagatgaagaacatggagggcagtgaccctgcccacatcgccgagagacatggccacaaggagctgaagaagatctttgaggacttcagcatccaggagattgacatcaacaatgagcaggagaatgactatgaggaggacatcgccagcttcagcacctacatccccagcacccagaacccagccttccaccacgagagcaggaagacctacggccagagcgcagatggagctgaggccaatgagatggagggggagggcaagcagaatggcagcggcatggagaccaagcacagccccctggaggtgggcagcgagagcagcgaggaccagtatgatgacctgtatgtgttcatccctggagctgaccctgagaacaacagccaggagcccctgatgagcagcaggcctcccctgcccccacccaggcctgtggccaatgccttccagctggagcggccccacttcaccctgcccggcaccatggtggagggccagatggagaggagccagaactggggccaccctggggtgcggcaggagactggagatgagcccaagggggagaaggagaagaaggaggaggagaaggagcaggaggaggaggaggacccctacacctttgctgagattgatgacagtgaatatgacatgatcctggccaacctgagcatcaagaagaagacaggcagccgctccttcatcatcaacagacctccagcccccaccccccggcccaccagcatcccccccaaggaggagaccaccccctacatcgcccaggtgttccagcagaagacagcccggcggcagagtgatgatgacaagttctgtggcctgcccaagaagcaggaccgggccagaattgagagccctgccttcagcaccctgcggggctgcctgacagatggccaggaggagctgatcctgctgcaggagaaggtgaagaatggcaagatgtccatggatgaggccctggagaagttcaagcactggcagatgggcaagagcggcctggagatgatccagcaggagaagctgcggcagctgcgggactgcatcatcggcaagaggcctgaggaggagaatgtgtacaacaagctgaccatcgtgcaccaccctgggggcaaggagacagcccacaatgaaaacaagttctacaacgtgcacttcagcaacaagctgcctgcccggccccaggtggagaaggagtttggcttctgctgcaagaaggaccactag

SEQ ID NO: 37778 - DNA, 2268 bp, Artificial Sequence
  derived and/or modified sequence
atgatctacgaggaggacgccgaggagtgggccctgtacctgaccgaagtcttcctgcatgtcgtgaaacgcgaagctatcttactgtaccggcttgagaatttctccttccggcacctggaacttctcaacctgacatcttataagtgtaagctgcttattctgtcgaattcactcttgagagacttgaccccaaagaagtgtcagtttctagagaagatcttgcacagccctaaatctgtggtgactctgctatgtggagtaaaatccagtgaccagttgtatgagctccttaatatcagccagagccgctgggaaataagtaccgagcaggagcctgaagactacatctctgttatacaatctatcatctttaaggattctgaagattatttcgaggtcaacatacccactgatctccgggcaaagcatagcggcgaaatctccgagcgcaaagagattgaggagcttagcgaagcaagcagaaacaccattccccttgccgtcgtgctgcctacagaaataccttgcgagaatcctggcgagatttttattattctgagagatgaagtgatcggtgacacagtggaggtagaatttacctcgtcaaacaagagaattagaaccagaccagcactgtggaacaaaaaggtctggtgcatgaaggcactggagtttcctgctggctcagttcacgttaacgtctactgcgatggaattgtgaaagccacgactaagattaagtattaccccaccgccaaagccaaagagtgtctctttagaatggccgatagtggagaatccctttgtcaaaattcaattgaggagctggacggcgtgctcaccagcatcttcaagcacgagattccgtactacgagttccaatccctgcagactgagatttgttcccagaataagtacacccattttaaggaactgccgactcttcttcactgcgccgcaaaattcggcctcaaaaatcttgcaatccacctcctacaatgttccggagccacatgggcctcgaagatgaaaaacatggagggaagcgatcctgcccatatcgcggaaagacatggtcataaggaactgaagaaaattttcgaggatttctctatccaagaaattgacattaataacgagcaggaaaacgattatgaggaagatatcgcttccttttccacttacatccccagcacacaaaacccagcgtttcatcacgagtctagaaaaacatacggacaatcggctgatggggctgaagctaacgagatggagggcgagggcaagcaaaacggatcaggcatggagacaaagcactcacccctggaggtgggcagcgagtcaagcgaggaccagtacgatgacttgtacgtgttcatccctggagccgatcccgagaataatagccaagaaccactgatgtctagcagacctccccttccaccaccccggcctgtcgccaacgcgttccagctggagcgaccccatttcacactccctggtactatggtagagggacaaatggaacgtagtcagaactggggccacccgggagtaagacaggaaaccggcgatgagcccaagggcgaaaaagagaagaaggaggaagaaaaagagcaggaggaggaagaggacccttacaccttcgccgaaatcgatgattctgagtacgatatgatcttggcgaatttgtccataaaaaaaaaaactggcagtagaagttttattatcaatcgtccacccgcccccaccccaagacccacgagtatccctccgaaggaagagaccaccccgtacatcgctcaggtctttcagcagaaaacggcccgccgccagtccgacgacgataaattctgcggccttccgaaaaagcaagacagagctcgaattgagtctccagctttttccacacttcggggatgcctcaccgacggccaggaggaattgattttactccaggagaaagtgaagaatgggaagatgtcgatggacgaggccctggagaagtttaagcactggcagatgggtaaaagtggcctggagatgatccagcaagaaaagttacggcagcttcgcgattgtatcattgggaaacgtcctgaggaggaaaacgtgtataacaagttgacaatcgtccaccatcccggaggcaaggagactgcgcataacgaaaataaattttataatgtccatttcagtaacaagcttcccgctaggccccaggtggagaaagaatttggcttttgctgtaaaaaagatcactag

SEQ ID NO: 37779 - DNA, 2268 bp, Artificial Sequence
  derived and/or modified sequence
atgatatacgaagaagatgcagaggaatgggccctttatctgaccgaagtattccttcatgtggtaaagcgcgaggcaattttgctgtacaggctcgagaatttctcctttaggcacctggaattgttaaatctaacgagctataaatgcaaacttctgatcctgtctaattctttgctccgcgatctcactcctaagaagtgccagtttctggaaaagatcctacactcgcccaaatctgtcgttaccctgctgtgtggagtgaagagtagcgaccagctgtatgaactcctcaatatttcccagtcccggtgggaaattagtactgagcaggagccggaagattatattagcgtgatacagtcaattatcttcaaggactctgaagattattttgaggtgaatatccccactgacctccgggcaaagcattctggcgagattagtgagcggaaagagattgaggaactgtctgaggcttcccgaaacacaatccccctggccgtcgtgctccccactgagataccctgtgaaaatccaggagagatcttcatcatactcagggatgaagtgatcggcgacaccgtagaggtcgagtttactagctccaacaagcggatcaggacacggcctgccttatggaacaaaaaagtgtggtgcatgaaagctctcgagttcccagccggttcagttcatgtgaacgtctattgcgatggcatagtgaaggctaccacaaagatcaagtattaccccacagcgaaagccaaggagtgtctcttccgaatggctgactctggagaatcactgtgtcagaactctatcgaagagcttgatggtgtcctgacctccatcttcaaacacgaaataccctactacgaatttcagagcttgcagacggagatctgctcccagaacaaatacactcatttcaaggaattaccaaccctgctgcattgtgctgccaaatttggcctcaaaaacctggcaattcatctgctccaatgcagcggcgcaacatgggctagtaagatgaaaaacatggaaggcagtgatccggctcatattgctgaaaggcacgggcacaaggagcttaagaagatttttgaagatttttcaatccaagaaattgacatcaacaacgaacaggagaacgattacgaggaggatatcgcctctttcagcacatacattccaagtacgcagaatcctgccttccatcacgaatcccggaagacctacggacaaagcgctgatggagccgaagcaaacgagatggaaggagaagggaagcagaatggatctggcatggagacgaaacatagccctcttgaagtgggctccgaaagttcagaagatcaatatgatgacctttatgtctttatacctggcgctgaccccgagaacaattctcaggaacccctaatgtcgtccaggcctccactgcccccacccaggccagtcgccaacgcattccagctagagcgccctcacttcacactgccaggtacaatggtggaggggcaaatggagaggtcacagaattgggggcaccccggtgtgaggcaggagacaggcgacgaacctaagggcgaaaaagagaagaaagaagaggaaaaggaacaggaggaagaagaggacccttacacatttgctgaaattgatgactcagaatatgatatgatcctcgccaacctgagcatcaagaaaaagaccggatcacgatctttcatcatcaataggccgccagctcctacccccagaccaacttcaattccccctaaagaggaaacaaccccttatattgctcaggtttttcagcaaaaaactgcgaggagacagtctgacgatgataagttctgtggactgcccaagaagcaagacagagcccgtatagagagccccgctttctctacgctgcgcggatgtctgacagacggccaggaagaattaattctgttacaggagaaggtgaagaatggcaaaatgtctatggacgaagctcttgagaagtttaagcattggcagatgggcaagtcaggactcgagatgatccaacaggaaaagcttcgccagctcagggattgtatcatcgggaaaaggcctgaagaggaaaatgtgtacaacaagctgaccattgttcatcacccgggagggaaggagactgcccataacgagaataaattctataacgttcacttctccaacaaactgcctgctcgaccacaggttgaaaaagagtttgggttctgttgcaagaaggatcattag

SEQ ID NO: 37780 - DNA, 2268 bp, Artificial Sequence
  derived and/or modified sequence
atgatctacgaggaggacgccgaggagtgggccctgtacctgaccgaggtgttcctgcacgtggtgaagagagaggccatcctgctgtacagactggagaacttcagcttcagacacctggagctgctgaacctgaccagctacaagtgcaagctgctgatcctgagcaacagcctgctgagagacctgacccccaagaagtgccagttcctggagaagatcctgcacagccccaagagcgtggtgaccctgctgtgcggcgtgaagagcagcgaccagctgtacgagctgctgaacatcagccagagcagatgggagatcagcaccgagcaggagcccgaggactacatcagcgtgatccagagcatcatcttcaaggacagcgaggactacttcgaggtgaacatccccaccgacctgagagccaagcacagcggcgagatcagcgagagaaaggagatcgaggagctgagcgaggccagcagaaacaccatccccctggccgtggtgctgcccaccgagatcccctgcgagaaccccggcgagatcttcatcatcctgagagacgaggtgatcggcgacaccgtggaggtggagttcaccagcagcaacaagagaatcagaaccagacccgccctgtggaacaagaaggtgtggtgcatgaaggccctggagttccccgccggcagcgtgcacgtgaacgtgtactgcgacggcatcgtgaaggccaccaccaagatcaagtactaccccaccgccaaggccaaggagtgcctgttcagaatggccgacagcggcgagagcctgtgccagaacagcatcgaggagctggacggcgtgctgaccagcatcttcaagcacgagatcccctactacgagttccagagcctgcagaccgagatctgcagccagaacaagtacacccacttcaaggagctgcccaccctgctgcactgcgccgccaagttcggcctgaagaacctggccatccacctgctgcagtgcagcggcgccacctgggccagcaagatgaagaacatggagggcagcgaccccgcccacatcgccgagagacacggccacaaggagctgaagaagatcttcgaggacttcagcatccaggagatcgacatcaacaacgagcaggagaacgactacgaggaggacatcgccagcttcagcacctacatccccagcacccagaaccccgccttccaccacgagagcagaaagacctacggccagagcgccgacggcgccgaggccaacgagatggagggcgagggcaagcagaacggcagcggcatggagaccaagcacagccccctggaggtgggcagcgagagcagcgaggaccagtacgacgacctgtacgtgttcatccccggcgccgaccccgagaacaacagccaggagcccctgatgagcagcagaccccccctgcccccccccagacccgtggccaacgccttccagctggagagaccccacttcaccctgcccggcaccatggtggagggccagatggagagaagccagaactggggccaccccggcgtgagacaggagaccggcgacgagcccaagggcgagaaggagaagaaggaggaggagaaggagcaggaggaggaggaggacccctacaccttcgccgagatcgacgacagcgagtacgacatgatcctggccaacctgagcatcaagaagaagaccggcagcagaagcttcatcatcaacagaccccccgcccccacccccagacccaccagcatcccccccaaggaggagaccaccccctacatcgcccaggtgttccagcagaagaccgccagaagacagagcgacgacgacaagttctgcggcctgcccaagaagcaggacagagccagaatcgagagccccgccttcagcaccctgagaggctgcctgaccgacggccaggaggagctgatcctgctgcaggagaaggtgaagaacggcaagatgagcatggacgaggccctggagaagttcaagcactggcagatgggcaagagcggcctggagatgatccagcaggagaagctgagacagctgagagactgcatcatcggcaagagacccgaggaggagaacgtgtacaacaagctgaccatcgtgcaccaccccggcggcaaggagaccgcccacaacgagaacaagttctacaacgtgcacttcagcaacaagctgcccgccagaccccaggtggagaaggagttcggcttctgctgcaagaaggaccactag

SEQ ID NO: 37781 - protein, 789 aa, Artificial Sequence
  derived and/or modified sequence
MAKAAASSSLEDLDLSGEEVQRLTSAFQDPEFRRMFSQYAEELTDPENRRRYEAEITALERERGVEVRFVHPEPGHVLRTSLDGARRCFVNVCSNALVGAPSSRPGSGGDRGAAPGSHWSLPYSLAPGREYAGRSSSRYMVYDVVFHPDALALARRHEGFRQMLDATALEAVEKQFGVKLDRRNAKTLKAKYKGTPEAAVLRTPLPGVIPARPDGEPKGPLPDFPYPYQYPAAPGPRAPSPPEAALQPAPTEPRYSVVQRHHVDLQDYRCSRDSAPSPVPHELVITIELPLLRSAEQAALEVTRKLLCLDSRKPDYRLRLSLPYPVDDGRGKAQFNKARRQLVVTLPVVLPAARREPAVAVAAAAPEESADRSGTDGQACASAREGEAGPARSRAEDGGHDTCVAGAAGSGVTTLGDPEVAPPPAAAGEERVPKPGEQDLSRHAGSPPGSVEEPSPGGENSPGGGGSPCLSSRSLAWGSSAGRESARGDSSVETREESEGTGGQRSACAMGGPGTKSGEPLCPPLLCNQDKETLTLLIQVPRIQPQSLQGDLNPLWYKLRFSAQDLVYSFFLQFAPENKLSTTEPVISISSNNAVIELAKSPESHGHWREWYYGVNNDSLELQECSNSDQLQGKEERVNEESHLTEKEYIEHCNTPTTDSDSSIAVKALQIDSFGLVTCFQQESLDVSQMILGKSQQPESKMQSEFIKEKSATCSNEEKDNLNESVITEEKETDGDHLSSLLNKTTVHNIPGFDSIKETNMQDGSVQVIKDHVTNCAFSFQNSLLYDLD

SEQ ID NO: 37782 - DNA, 2370 bp, Artificial Sequence
  derived and/or modified sequence
atggccaaggccgccgccagcagcagcctggaggacctggacctgagcggcgaggaggtgcagagactgaccagcgccttccaggaccccgagttcagaagaatgttcagccagtacgccgaggagctgaccgaccccgagaacagaagaagatacgaggccgagatcaccgccctggagagagagagaggcgtggaggtgagattcgtgcaccccgagcccggccacgtgctgagaaccagcctggacggcgccagaagatgcttcgtgaacgtgtgcagcaacgccctggtgggcgcccccagcagcagacccggcagcggcggcgacagaggcgccgcccccggcagccactggagcctgccctacagcctggcccccggcagagagtacgccggcagaagcagcagcagatacatggtgtacgacgtggtgttccaccccgacgccctggccctggccagaagacacgagggcttcagacagatgctggacgccaccgccctggaggccgtggagaagcagttcggcgtgaagctggacagaagaaacgccaagaccctgaaggccaagtacaagggcacccccgaggccgccgtgctgagaacccccctgcccggcgtgatccccgccagacccgacggcgagcccaagggccccctgcccgacttcccctacccctaccagtaccccgccgcccccggccccagagcccccagcccccccgaggccgccctgcagcccgcccccaccgagcccagatacagcgtggtgcagagacaccacgtggacctgcaggactacagatgcagcagagacagcgcccccagccccgtgccccacgagctggtgatcaccatcgagctgcccctgctgagaagcgccgagcaggccgccctggaggtgaccagaaagctgctgtgcctggacagcagaaagcccgactacagactgagactgagcctgccctaccccgtggacgacggcagaggcaaggcccagttcaacaaggccagaagacagctggtggtgaccctgcccgtggtgctgcccgccgccagaagagagcccgccgtggccgtggccgccgccgcccccgaggagagcgccgacagaagcggcaccgacggccaggcctgcgccagcgccagagagggcgaggccggccccgccagaagcagagccgaggacggcggccacgacacctgcgtggccggcgccgccggcagcggcgtgaccaccctgggcgaccccgaggtggcccccccccccgccgccgccggcgaggagagagtgcccaagcccggcgagcaggacctgagcagacacgccggcagcccccccggcagcgtggaggagcccagccccggcggcgagaacagccccggcggcggcggcagcccctgcctgagcagcagaagcctggcctggggcagcagcgccggcagagagagcgccagaggcgacagcagcgtggagaccagagaggagagcgagggcaccggcggccagagaagcgcctgcgccatgggcggccccggcaccaagagcggcgagcccctgtgcccccccctgctgtgcaaccaggacaaggagaccctgaccctgctgatccaggtgcccagaatccagccccagagcctgcagggcgacctgaaccccctgtggtacaagctgagattcagcgcccaggacctggtgtacagcttcttcctgcagttcgcccccgagaacaagctgagcaccaccgagcccgtgatcagcatcagcagcaacaacgccgtgatcgagctggccaagagccccgagagccacggccactggagagagtggtactacggcgtgaacaacgacagcctggagctgcaggagtgcagcaacagcgaccagctgcagggcaaggaggagagagtgaacgaggagagccacctgaccgagaaggagtacatcgagcactgcaacacccccaccaccgacagcgacagcagcatcgccgtgaaggccctgcagatcgacagcttcggcctggtgacctgcttccagcaggagagcctggacgtgagccagatgatcctgggcaagagccagcagcccgagagcaagatgcagagcgagttcatcaaggagaagagcgccacctgcagcaacgaggagaaggacaacctgaacgagagcgtgatcaccgaggagaaggagaccgacggcgaccacctgagcagcctgctgaacaagaccaccgtgcacaacatccccggcttcgacagcatcaaggagaccaacatgcaggacggcagcgtgcaggtgatcaaggaccacgtgaccaactgcgccttcagcttccagaacagcctgctgtacgacctggactag

SEQ ID NO: 37783 - DNA, 2819 bp, Artificial Sequence
  derived and/or modified sequence
cccagaaactctgaggcggatcccccaacccagtgtcagactgatcgcctttggcccgagggcgaggagccacaggacagtatggccaaagcggcggcctcctcgtcgctggaggacttggacctgagcggagaggaggtccagcggctcacctccgccttccaggacccggagttccggcgaatgttctcccagtacgccgaggagctcaccgacccggagaaccggcggcgctacgaggcggagatcaccgcgctagagcgtgagcgcggggtggaagtgcggttcgtgcacccggagcccggccatgtgctgcgcaccagcctggacggggcgcggcgctgctttgtgaatgtctgcagcaacgcgttggtgggcgcgcccagcagccggcccggctccggtggcgaccggggcgcagctcctggcagccactggtccctgccctacagcctggcgcccggccgcgagtacgcggggcgcagcagcagccgctacatggtctacgacgtggtcttccatccagacgcgcttgcgctggcccggcggcacgagggcttccgccagatgctggacgccacggccctggaggccgtcgagaagcagttcggcgtgaagctggaccgcaggaatgccaagaccctgaaggccaagtataaggggaccccagaggctgcggtgctgcgcacgcccctgcccggggtcatccccgcaaggcctgacggggagccgaagggtcctctcccggacttcccctacccttaccagtacccggcagcccccgggccccgggcgccctcccctccggaagcggccttgcagcccgcccccaccgagcctcgctacagcgtggtgcagcgccaccacgtggacctccaggattaccgctgctccagggactcagccccgagccccgtgccccatgagctggtgatcaccatcgaactgccgctgttgcgctcggccgagcaggcggcgctggaggtaacgagaaagctgctgtgcctcgactcgaggaaacctgactaccggctgcggctctcgctcccgtacccagtggacgatggccgcggcaaggcacaattcaacaaggcccggcggcagctggtggttacgctgccagtggtgctgccggccgcgcgccgggagcccgctgtcgccgtcgccgccgccgcgccggaagagtccgcggaccggtccggaactgacggccaggcctgcgcttccgctcgcgagggggaggcgggacccgcgaggagtcgcgcggaggacggaggccacgatacctgcgtggctggggctgcgggctccggggtcaccaccctgggcgacccggaggtggcgcctccgccggccgcagctggagaggagcgtgtccccaagccgggggagcaggacttgagcaggcacgcggggtcaccgccgggcagcgtggaggagccatctcctggaggagaaaactcacctggtggcggaggctccccttgtttgtcctcccggagcctggcgtggggttcttctgcgggaagagagagtgcgcgcggagatagcagtgtggaaacacgcgaggagtcggagggcacgggcggccagcgctcagcctgcgccatgggtggtcccgggaccaagagcggggagcctttgtgtcctccgttactgtgtaatcaggacaaagaaaccttgactctgctcattcaggtgcctcggatccagccgcaaagtcttcaaggagatttgaatcccctctggtacaaattacgcttctccgcacaagacttagtttattccttctttttgcaatttgctccagagaataaattgagtaccacagaacctgtgattagcatttcttcaaacaatgcagtgatagaactggcaaaatctccagagagccatggacattggagagagtggtattatggtgtaaacaacgattctttggagttgcaagaatgtagtaactctgatcagctacaaggaaaggaggaaagagtaaatgaagaaagtcatctaactgaaaaggaatatatagaacattgtaacacccctacaactgattctgattcatctatagcagttaaagcactacaaatagatagctttggtttagttacatgctttcaacaagagtctcttgatgtttctcaaatgatacttggaaaatctcagcaacctgagtcaaaaatgcaatctgaatttataaaagaaaaaagtgctacttgttcaaatgaggaaaaagataacttaaacgagtcagtaataactgaagagaaagaaacagatggagatcacctatcttcattactgaacaaaactacggttcacaatatacctggattcgacagcataaaagaaaccaatatgcaggatggtagtgtgcaggtcattaaagatcatgtgaccaattgtgcattcagttttcagaattctttgctatatgatttggattaattctatataattttggacttttaaatattaaggttaaaaaatacctgtatctaaaattgattctgttaactgttgtcttaaaactaaaggtattaaagtataaaattaaaatttgcaattttttttaaaaaattgcaattttgattctcatgggggaaattggagataatttttttttttttgcctctggagtttaaagtttccttatggagataagttttgtgattcctgtaatagatgtgtatgttttctatttgagagttaaaacatttgagagttaaaacatttagttttaatacaacctatgtatatatacttctgtgttaaattttgctttgtcattaataaaatttaaaaatattcactaa

SEQ ID NO: 37784 - DNA, 2370 bp, Artificial Sequence
  derived and/or modified sequence
atggccaaagccgcagcatcgtcatcgctggaggatctggatctatccggcgaagaggtgcagagactcaccagtgccttccaggatcccgaattccggagaatgttctcccagtacgccgaagagctgaccgaccccgagaatagacgtcgctacgaagctgaaatcactgcgctggaaagagaacgtggggtggaggtgagattcgtccatcccgaaccagggcacgtcctgcggaccagcctggacggcgccagaagatgcttcgtgaacgtctgttctaacgctctcgttggggcaccatcttctagacctggatctggtggggaccgcggtgccgcccccgggtctcactggtccctcccttattccctggcccctggacgtgaatacgcgggcaggtcttctagccgttatatggtctatgacgttgtgttccaccccgatgccctggccttagcaagaaggcacgagggatttcgacagatgctggacgctaccgccctggaggccgtcgaaaaacaatttggagtgaaactggatcgccggaatgccaagacattgaaagcaaaatacaaaggcacccccgaggcagccgtacttcgcactccactacccggcgtgatccccgccaggccagacggcgaacctaagggaccactcccagacttcccttatccttatcagtaccctgctgctccagggccccgggctcctagtccacccgaagctgccctgcagccggcccctaccgagcccaggtatagtgtggtacagcgtcatcatgttgacttgcaggactaccgctgttccagagatagtgctccaagtccggttccgcacgaactggtaatcaccattgaactcccattgttgaggagcgcggaacaggccgcattagaggttactaggaagctgttatgtctcgacagccgtaagccagactatcgcctccggctttcgctgccctaccccgtggacgacgggaggggaaaagctcagtttaataaggcccgcagacagcttgtggtgacgctaccagtcgtcctccccgcagctaggcgggagcctgctgtagccgttgccgcagccgctccggaagagtcagcagacaggtcaggaacggacggccaagcatgcgcatctgcacgagaaggtgaggccggaccagccagaagcagagcggaggacggcggtcatgatacatgtgtcgcgggcgccgccggttccggggtgactactctgggggatcctgaggtcgcacctccacctgcagccgctggagaagaacgcgttcccaaacccggggagcaggaccttagcagacacgctggttcgccaccaggtagcgtggaagaaccatcacccgggggagagaattctcccggcggtggtggtagtccttgcctaagctctcgttccctcgcttggggctctagcgccggccgagaatccgccaggggagactctagcgtcgaaacaagagaagaaagtgagggaaccggcggccaacgtagcgcttgtgcgatgggtggccctggaaccaaaagcggcgaaccgttatgccctcctctgctgtgcaaccaggataaggaaacactaaccctcctcattcaggtcccgagaattcagccacagagcttacagggagacctcaaccccttatggtacaaattgaggttcagcgcccaggatctagtatactccttctttctccagtttgccccagagaacaagctgtccactactgagcccgtcatctctatctcaagtaataatgcggtgatcgagctcgcaaaaagccccgagagccacggacattggcgagagtggtattacggggtgaacaacgattccctcgagcttcaagagtgtagtaattcagatcagctccaagggaaagaggaacgcgttaatgaggaaagccaccttaccgaaaaggagtatattgagcattgtaatacgcctactacagacagtgacagctccatagccgtcaaggcgctgcagatcgattcctttggactcgtgacatgcttccaacaggagtccctcgacgtgtctcagatgatcctgggaaaatcccagcagccagaatccaaaatgcagtcagagttcataaaagaaaaatccgctacgtgcagtaatgaagagaaagataacctcaatgaatcggtgattaccgaagaaaaggagacagatggggaccacctctcgagtctgctgaacaagactaccgtacacaatatccctggattcgattccatcaaagagaccaatatgcaagatggctctgtccaggtgattaaggatcacgtgaccaactgcgccttcagttttcagaacagccttttgtacgacttggattag

SEQ ID NO: 37785 - DNA, 2370 bp, Artificial Sequence
  derived and/or modified sequence
atggccaaggctgctgccagcagcagcctggaggacctggacctgagcggggaggaggtgcagaggctgaccagcgccttccaggaccctgagttccggaggatgttcagccagtatgcagaggagctgacagatcctgaaaatagaagaagatatgaggccgagatcacagccctggagcgggagcggggcgtggaggtgcgctttgtgcaccctgagcccggccacgtgctgcggaccagcctggatggagcccggcgctgctttgtgaatgtgtgcagcaatgccctggtgggcgcccccagcagcaggcctggcagcggcggggacagaggagctgcccctggcagccactggagcctgccctacagcctggcccctggccgggagtatgccggccgcagcagcagccgctacatggtgtatgatgtggtgttccacccagatgccctggccctggccaggagacatgagggcttccggcagatgctggatgccacagccctggaggccgtggagaagcagtttggagtgaagctggacagaagaaatgccaagaccctgaaggccaagtacaagggcaccccagaggccgctgtgctgcggacccccctgcccggggtcatcccagcccggccagatggagagcccaagggccccctgcctgacttcccctacccctaccagtacccagctgcccctggcccccgggcccccagccccccagaggccgccctgcagcctgcccccacagagccccgctacagcgtggtgcagaggcaccacgtggacctgcaggactaccgctgcagccgggacagcgcccccagccctgtgccccatgagctggtgatcaccatcgagctgcccctgctgcggtctgctgagcaggccgccctggaggtgaccaggaagctgctgtgcctggacagcaggaagccagactaccgcctgcggctgagcctgccctaccctgtggatgatggccggggcaaggcccagttcaacaaggcccggcggcagctggtggtgaccctgcctgtggtgctgcctgctgcccggcgggagcctgctgtggccgtggccgccgccgcccctgaggagagcgctgacagaagtggcacagatggccaggcctgtgccagcgcccgggagggggaggccggccctgcccggagcagagcagaagatggcggccatgacacctgtgtggccggggccgccggcagcggcgtgaccaccctgggggaccctgaggtggcccctcctcctgctgctgctggggaggagcgggtgcccaagccaggagagcaggacctgagcagacatgctggcagccccccaggctctgtggaggagcccagccctggaggagagaacagccctgggggcggcggcagcccctgcctgagcagccgcagcctggcctggggcagcagcgctggccgggagagcgcccggggggacagctctgtggagacccgggaggagagcgagggcactggaggccagaggtctgcctgtgccatgggcggccctggcaccaagtctggagagcccctgtgcccccccctgctgtgcaaccaggacaaggagaccctgaccctgctgatccaggtgccccgcatccagccccagagcctgcagggcgacctgaaccccctgtggtacaagctgcgcttcagcgcccaggacctggtgtacagcttcttcctgcagtttgcccctgagaacaagctgagcaccacagagcctgtgatcagcatcagcagcaacaatgctgtgattgagctggccaagagccctgagagccacggccactggagggagtggtactatggagtgaacaatgacagcctggagctgcaggagtgcagcaacagcgaccagctgcagggcaaggaggagcgggtgaatgaggagagccacctgacagagaaggagtacatcgagcactgcaacacccccaccacagacagcgacagcagcattgctgtgaaggccctgcagattgacagctttggcctggtgacctgcttccagcaggagagcctggatgtgtcccagatgatcctgggcaagagccagcagcctgagagcaagatgcagagcgagttcatcaaggagaagagcgccacctgcagcaatgaggagaaggacaacctgaatgaatctgtcatcacagaggagaaggagacagatggagaccacctgagcagcctgctgaacaagaccaccgtgcacaacatccctggctttgacagcatcaaggagaccaacatgcaggacggctctgtgcaggtgatcaaggaccacgtgaccaactgtgccttctccttccagaacagcctgctgtatgacctggactag

SEQ ID NO: 37786 - DNA, 2370 bp, Artificial Sequence
  derived and/or modified sequence
atggccaaggccgccgccagcagcagcctggaggacctggacctgtctggcgaagaagtgcagcggttgacctccgcctttcaagaccccgagtttcggaggatgttttctcagtatgcagaagaattgacagatccagaaaatagaagaaggtacgaggcagaaattacagctctagagagagagcgcggcgtggaagttcggttcgttcacccagagccaggacatgttctcagaacaagccttgatggagcccggcgttgtttcgttaacgtatgctcaaacgccctcgtaggcgcaccatccagtagacccggctctgggggggaccgcggggccgcacccggctcacactggagtcttccatacagcctggcgcccgggcgggaatacgcaggcaggtcgagcagcaggtacatggtttacgatgttgtctttcatcctgatgcacttgcactcgcgcgccggcacgagggtttccgtcagatgctagatgcaaccgcactcgaggcagtggagaaacagtttggagtaaagttagatagacgaaacgctaagaccctgaaggctaagtataaaggcacccccgaagccgccgtgcttcggacacctttacctggtgtaatccccgcccggcctgacggcgaaccgaaaggccccctccccgacttcccttacccctatcagtaccccgccgcacctgggccccgagcccccagtcctccggaagctgcactgcagcccgctcctacagaacctcgatatagtgtagtgcaacgacaccacgtcgatctccaggactatcggtgttctagggattctgcaccatcacctgtgccccacgagctcgtcatcacaatcgaattgcctcttctcaggtctgctgagcaggccgcgctcgaagtcaccagaaagttactgtgtttggactcaaggaaacctgattacaggctgcgcctgtcattgccctacccagtggatgatggaaggggtaaggcacagttcaacaaggcgaggaggcaacttgtcgtcactcttcccgtggtactgcccgcagccaggcgggagccggcggtcgccgtagcggccgccgctcccgaagaatccgcagacaggagcgggactgacggtcaggcctgtgcaagtgcaagagagggcgaggccggtcccgcaagaagcagggccgaagatgggggccacgacacatgcgttgccggcgcggccggatcaggcgtcactacccttggcgatcctgaggtagcccctccaccggcagccgcgggagaagaacgtgtgccaaagccgggcgagcaggatctttccaggcatgcgggcagtccacctggttcagtggaagagccctctcccgggggagagaactctcccggcggaggcggctccccttgcttatcctctcgaagcctggcatggggatcttctgccgggcgagagtcagccaggggagattcctcggtggagacgagagaggaaagtgaaggaaccgggggacaaaggtctgcttgtgccatgggtgggcctgggactaagtcaggggagccattgtgccctccgctgctttgcaaccaggacaaagagaccctgactctgttaattcaggtgccacgcatccagccgcagtcgctgcagggtgatctgaaccccctttggtataaactccgtttttccgcgcaggatcttgtttacagcttcttcctgcagttcgctcctgagaacaaattatctaccacagagcccgtgattagcatatcttcaaacaacgcggtgatagagctagccaagagccccgagtctcacgggcattggcgagagtggtactacggagtcaataacgatagtctggagttgcaggagtgttctaattcagatcagctgcaaggcaaggaagagcgagtaaatgaggagagtcatctgaccgagaaggagtatattgaacactgcaacaccccgaccaccgattctgattcctcaattgcagtcaaggcactccagattgattcatttggattagtgacctgttttcagcaagagtctctggatgtcagccaaatgatccttggaaaatctcaacagccagaaagtaagatgcagagcgagttcatcaaggaaaagagcgccacgtgttccaacgaggagaaggataatctaaacgaatccgtgatcacggaagaaaaagaaactgatggggaccatctctctagcctgctcaataagaccactgtgcataatatccctggtttcgactccattaaggaaaccaatatgcaggatggttcggtccaggtcatcaaagaccatgtgacaaactgcgcgttctcattccaaaactcgcttctttacgacttagattag

SEQ ID NO: 37787 - DNA, 2370 bp, Artificial Sequence
  derived and/or modified sequence
atggcgaaggccgctgcctccagcagcctggaggatctggacttgagtggcgaagaggtgcaacgcctgacctccgcatttcaagacccagagttcagacgaatgttctcacagtatgccgaggagctgacggatcccgaaaatagacggcgttacgaagcagagataaccgctttggagagagagcgaggcgtagaagttcgcttcgtgcatccggagccgggacatgtgctccgaactagcctagacggagcacgccgttgttttgtaaacgtctgttccaatgccctggtgggcgcaccctcaagcagacctggaagcgggggagatcgcggagccgcaccaggatcccactggagtttgccatacagcttggccccaggtcgcgaatacgccggacggagcagctcaagatacatggtctatgacgtcgtcttccatcccgatgccctggcgctggctcgtcgccatgagggctttagacagatgctggacgcaacagccctggaagcggttgagaagcaatttggtgtaaaactcgaccggagaaatgccaagaccctaaaggctaaatacaagggcactccagaagcagccgtgcttcggactcctctccctggggtcattccagctaggcccgacggcgagcccaagggccctctccctgacttcccctatccatatcagtatcctgccgcaccgggacctagggcacctagtcctccagaagccgctctccagcccgcaccgacagaaccacggtactcagtggtgcaacgccaccacgtggacctccaagactatcgctgctctagagacagcgcaccctcacctgtgccccacgaattagtgataactatagaactgcccctcctgagatcggccgaacaggccgctctggaagtgaccaggaaattgctctgcctggattcccggaagccagattatcgattacgactgtctttaccttatccagtggacgacggacgcggtaaagcacagttcaataaagccagaagacagctggtggtgacactgcccgtggtgctgcctgccgctcgaagggaacccgctgttgcggtggccgctgccgcaccagaagaatcagcagatcgatcgggtacagacggtcaggcttgtgcttccgcacgggagggcgaggcgggacccgcaagatcacgggctgaggatgggggacacgatacttgcgtggctggcgctgccggaagcggcgttacaactctcggagatccagaagtggctcctccaccagcagcagctggggaggagcgtgttccaaaacctggtgagcaggatctttccaggcacgcgggaagcccgccaggtagtgtagaagagccctcccctggcggagagaacagtccagggggaggcggtagtccctgcctaagtagtaggtcactggcttgggggtcctcagcaggacgcgagtcagcgagaggggatagcagcgtggaaacccgggaggaaagtgagggtactggcggacagagaagtgcttgtgctatgggcggtccgggtactaagtctggcgagccactgtgccctccccttctgtgtaatcaggataaagagacactgacgctgctaatccaggtgccaagaattcagccacaatcattacagggggatcttaaccctctttggtacaaactccggttttccgctcaggacctcgtttatagtttcttcctccagttcgctccggaaaataagctttctactacagaaccagtgatctccatatcttctaataatgctgtcatcgagcttgcgaagagcccagagtctcacggacactggcgagagtggtattacggggtgaataatgactcattagagctacaggaatgcagtaactccgatcagttacagggaaaagaggaacgggtgaatgaggaatcacacttgaccgaaaaagaatacatcgagcactgtaacactcccactaccgatagcgattcctctattgctgtgaaggccttgcagatcgacagcttcgggctggtgacctgttttcaacaagagtccctggacgtcagccaaatgattcttggtaaatcccaacagcctgagtctaagatgcagtccgaattcataaaagaaaagtctgccacctgctctaacgaagagaaagataatctgaacgaatcagtgattacagaagaaaaggaaactgatggagaccatctgtccagcctgcttaacaaaacaaccgttcacaacataccagggtttgattccattaaagagactaacatgcaggacgggtctgtgcaagtgatcaaagaccatgttactaattgcgcgttttccttccaaaactccctactgtacgatctggattag

SEQ ID NO: 37788 - protein, 464 aa, Artificial Sequence
  derived and/or modified sequence
MLWIGVTARNIYKQVTKKAPLCLDTDQPPYPRQPLLSRFYLVSGGVPFIICGVTAATNIRNYGTEDEDTAYCWMAWEPSLGAFYGPAAIITLVTCVYFLGTYVQLRRHPGRRYELRTQPEEQRRLATPEGGRGIRPGTPPAHDAPGASVLQNEHSFQAQLRAAAFTLFLFTATWAFGALAVSQGHFLDMVFSCLYGAFCVTLGLFVLIHHCAKREDVWQCWWACCPPRKDAHPALDANGAALGRAACLHSPGLGQPRGFAHPPGPCKMTNLQAAQGHASCLSPATPCCAKMHCEPLTADEAHVHLQEEGAFGHDPHLHGCLQGRTKPPYFSRHPAEEPEYAYHIPSSLDGSPRSSRTDSPPSSLDGPAGTHTLACCTQGDPFPMVTQPEGSDGSPALYSCPTQPGREAALGPGHLEMLRRTQSLPFGGPSQNGLPKGKLLEGLPFGTDGTGNIRTGPWKNETTV

SEQ ID NO: 37789 - protein, 560 aa, Artificial Sequence
  derived and/or modified sequence
MDLKTVLSLPRYPGEFLHPVVYACTAVMLLCLLASFVTYIVHQSAIRISRKGRHTLLNFCFHAALTFTVFAGGINRTKYPILCQAVGIVLHYSTLSTMLWIGVTARNIYKQVTKKAPLCLDTDQPPYPRQPLLRFYLVSGGVPFIICGVTAATNIRNYGTEDEDTAYCWMAWEPSLGAFYGPAAIITLVTCVYFLGTYVQLRRHPGRRYELRTQPEEQRRLATPEGGRGIRPGTPPAHDAPGASVLQNEHSFQAQLRAAAFTLFLFTATWAFGALAVSQGHFLDMVFSCLYGAFCVTLGLFVLIHHCAKREDVWQCWWACCPPRKDAHPALDANGAALGRAACLHSPGLGQPRGFAHPPGPCKMTNLQAAQGHASCLSPATPCCAKMHCEPLTADEAHVHLQEEGAFGHDPHLHGCLQGRTKPPYFSRHPAEEPEYAYHIPSSLDGSPRSSRTDSPPSSLDGPAGTHTLACCTQGDPFPMVTQPEGSDGSPALYSCPTQPGREAALGPGHLEMLRRTQSLPFGGPSQNGLPKGKLLEGLPFGTDGTGNIRTGPWKNETTV

SEQ ID NO: 37790 - DNA, 3441 bp, Artificial Sequence
  derived and/or modified sequence
cccgtggggggctcatcctacccacagtaagagcatcctggcgtgaccccactgaggacttcacctcctctcccttggtggacacctatccaggtgggcatcgtgctgcactattctacactgtccaccatgctgtggataggagtgaccgccaggaacatctacaagcaggtgaccaagaaggcccctctgtgcctggacacagaccagccaccgtaccccaggcagcccctgctcagcaggttttacctcgtcagcggaggggtcccctttatcatctgtggggtcacggctgccacgaacatcaggaattacgggacagaggacgaggacacggcgtactgctggatggcctgggagcccagcctgggcgccttctacggcccagccgccatcatcaccctggtcacctgtgtgtacttcctgggcacctacgtgcagctgcggcgccacccagggcgcaggtacgagctgcgcacacagcccgaggagcagcggcggctggcgacacccgagggcggccgtgggatccggccaggcaccccacccgcacacgatgcccccggcgcctccgtgctgcagaacgagcactcattccaggcacagctgcgcgccgccgccttcacgctgttcctgttcacggccacgtgggccttcggggcgctggcggtgtcacagggccacttcctggacatggtcttcagctgcctgtacggcgccttctgcgtgaccctgggactcttcgtgctcatccaccactgcgccaagcgtgaggacgtgtggcagtgctggtgggcatgctgcccgccccgcaaggacgcccaccccgcacttgacgccaacggggccgcgctgggccgcgccgcctgcctgcactcgccgggactgggccagccacggggcttcgcgcacccaccgggcccctgcaagatgaccaacctgcaggccgcgcagggccacgccagttgcctgtcaccggccaccccgtgctgcgccaagatgcactgcgagccactgacggcggacgaggcgcacgtgcacctgcaggaggagggcgccttcgggcacgacccccacctgcacgggtgccttcagggcagaactaagccgccctactttagccggcacccagcagaggagcccgagtacgcctaccacatcccatccagcctggatggcagcccccgcagctcgcgcacagacagcccccccagctctctggatggcccggcggggacacacacgctggcctgctgcacccagggcgaccccttccccatggtcacccagcccgagggcagtgatgggagccctgccctctacagctgccccacgcagccgggcagggaggcagcgctcgggcccggccacttggagatgctgcggaggacacagtccctgccctttggtggccccagccagaacgggctgcccaagggtaaattgctagaaggcctgccgtttggcaccgacgggaccggcaacatccgaacgggaccctggaaaaacgaaactactgtgtagatgggggcagaggacacggtgttcctggaggagcttcagagcagagtggggggcccatctgccacatgaggtcactgggggtaccgaagtgaccccgcctttcagaagccgttcacacccctgccccttccttgtgatcacacccctgccccttccttgtgatcacacccctgccccttccttgtgatcacacccctgccccttccttgtgaaagacctcagcggggaaacgctccgggccacgcccactccccttatcccaattccgcgtgctggtcccgcacacggtcatccggtttctgtcctgtggtctccagtcctggggcaccctagaggcagagcaggggattccatcaaaggacccactgagaccccagcatggccctgcccgagatgccctgctgcccacggagtcctggcttcccctggtgtggccgggcagggccgagatcgcaggagggggctgccctgacctttcccagtgttcaatgtgtgtgtcttgcgttctactccgggggtggcggcggcaggtctgtccccagcattctcgctctgggcagaaccctcgggaccctccgctgtcgtgtgtctgagccacccctgcagcttcacagggcccctgcacacctctgcccactcagtgtgccctgtcagccctgtccttgtcgtagccccagccctgcagggctgagagcaccacagatgctgggggctgctctggactttggggatggctgtcagcctcagagggccaatggggggctttcacgggcccaaggcttgggaaaatgcccagacatcctttagtgaagactcgacttccaaaaccagccaccgctgggactggattccactccagtataggcacttagcaacacgaaggtttattccaaaaagaaaaggggctgacagacgggagattctcatggacaaaatccctttccctttttctcgtctccatgaacatctgggtaccaagccctgactcaaaggacagatgtggatgacagcaagacttctgtgaaagcaagtggcccgtccctaggtgggagggagtccagagggtcatgggtgtgaaactgtgcacagctttccctccctccctcttcctccttgtctgtgacacatgtgcacccacacacacacacacaaacacatgtgcatatcacacacatgcacacacacaaacacatgtgcatatcacacacgcgcacacacccaaacacgtgcatatcacacacatgcacacacacaaacacgtgcatatcacacacatgcacacaaacgtgcatatcacacacacgcacacacacccaaacacgtgcatatcacacacacgcacacacacaaacacgtgcatatcacacacaaacacacgtgcacacatacttaacacacacttgcacctgctgtgcacatgtgcacacacacgtagtagtgtgttttccagccacccacacactgggtttgcattggagattgtttcaccctgcaaacgtcaacgtcagcagactcgtcggtgcgctgtgctatccggttgggaggtctcaccaggagcagagcctccctaacgtgcacctccgagaagaggggtgtcggggagtgttcccagcacctgctcggtggaagggctctccggagactggcactcagtatctgagtatgaggagcctcacttcccggggtgtcggtaaacttgaccgtgactcagtaacccacagcgtgctcctcccagcaaaccccgtgtgtccttacaggtcgaccagacgggccgtcggaggaccaccaggtggctctgcctctgcctcaccttctcacctgcttccatagctgatgtgaacccgaatccccacgctgtgctgtgtacgcactgtaggtgcagaaccgtccacacaaaaatacagtcttggcattgtt

SEQ ID NO: 37791 - DNA, 4283 bp, Artificial Sequence
  derived and/or modified sequence
gtcgccgcgggaggtgcgcgcagaggcggcggcgctgctggccgggctgggccgctcgtgcgcggggctgtgactcaccggccggcgccgcagccccgcaatctgttgataactcggtcccagctcggccgctgccctcgcgaatggagagcgggtccccggcggggggagcgcagcgcgtctgtctccgggagcgcggcccggccgccccggcagccgcttcggccacagcagatgggagcagctcccggactgcgcccgccccgccgcggtcaccctgaggccaggggcccgggagcgcgacctcctggccgccgtctgggactttgaccttccagaggccatggaggctggcggggagcagggcgccacctgatcgcctccccctggacgcctcctccagcggcgctcacgcttccgcaactttgcagcgctcatggatctgaagacagtgctctccctgccccgctacccaggggagttcctgcaccccgtggtgtacgcgtgcacggccgtcatgctgctctgcctcctggcctccttcgtcacctacatcgtgcaccagagcgccatccgcatcagccgcaagggccggcacacgctcctgaatttctgcttccacgcggccctgaccttcactgtgttcgccggcggcatcaatcgcaccaagtaccccatcctgtgccaggcggtgggcatcgtgctgcactattctacactgtccaccatgctgtggataggagtgaccgccaggaacatctacaagcaggtgaccaagaaggcccctctgtgcctggacacagaccagccaccgtaccccaggcagcccctgctcaggttttacctcgtcagcggaggggtcccctttatcatctgtggggtcacggctgccacgaacatcaggaattacgggacagaggacgaggacacggcgtactgctggatggcctgggagcccagcctgggcgccttctacggcccagccgccatcatcaccctggtcacctgtgtgtacttcctgggcacctacgtgcagctgcggcgccacccagggcgcaggtacgagctgcgcacacagcccgaggagcagcggcggctggcgacacccgagggcggccgtgggatccggccaggcaccccacccgcacacgatgcccccggcgcctccgtgctgcagaacgagcactcattccaggcacagctgcgcgccgccgccttcacgctgttcctgttcacggccacgtgggccttcggggcgctggcggtgtcacagggccacttcctggacatggtcttcagctgcctgtacggcgccttctgcgtgaccctgggactcttcgtgctcatccaccactgcgccaagcgtgaggacgtgtggcagtgctggtgggcatgctgcccgccccgcaaggacgcccaccccgcacttgacgccaacggggccgcgctgggccgcgccgcctgcctgcactcgccgggactgggccagccacggggcttcgcgcacccaccgggcccctgcaagatgaccaacctgcaggccgcgcagggccacgccagttgcctgtcaccggccaccccgtgctgcgccaagatgcactgcgagccactgacggcggacgaggcgcacgtgcacctgcaggaggagggcgccttcgggcacgacccccacctgcacgggtgccttcagggcagaactaagccgccctactttagccggcacccagcagaggagcccgagtacgcctaccacatcccatccagcctggatggcagcccccgcagctcgcgcacagacagcccccccagctctctggatggcccggcggggacacacacgctggcctgctgcacccagggcgaccccttccccatggtcacccagcccgagggcagtgatgggagccctgccctctacagctgccccacgcagccgggcagggaggcagcgctcgggcccggccacttggagatgctgcggaggacacagtccctgccctttggtggccccagccagaacgggctgcccaagggtaaattgctagaaggcctgccgtttggcaccgacgggaccggcaacatccgaacgggaccctggaaaaacgaaactactgtgtagatgggggcagaggacacggtgttcctggaggagcttcagagcagagtggggggcccatctgccacatgaggtcactgggggtaccgaagtgaccccgcctttcagaagccgttcacacccctgccccttccttgtgatcacacccctgccccttccttgtgatcacacccctgccccttccttgtgatcacacccctgccccttccttgtgaaagacctcagcggggaaacgctccgggccacgcccactccccttatcccaattccgcgtgctggtcccgcacacggtcatccggtttctgtcctgtggtctccagtcctggggcaccctagaggcagagcaggggattccatcaaaggacccactgagaccccagcatggccctgcccgagatgccctgctgcccacggagtcctggcttcccctggtgtggccgggcagggccgagatcgcaggagggggctgccctgacctttcccagtgttcaatgtgtgtgtcttgcgttctactccgggggtggcggcggcaggtctgtccccagcattctcgctctgggcagaaccctcgggaccctccgctgtcgtgtgtctgagccacccctgcagcttcacagggcccctgcacacctctgcccactcagtgtgccctgtcagccctgtccttgtcgtagccccagccctgcagggctgagagcaccacagatgctgggggctgctctggactttggggatggctgtcagcctcagagggccaatggggggctttcacgggcccaaggcttgggaaaatgcccagacatcctttagtgaagactcgacttccaaaaccagccaccgctgggactggattccactccagtataggcacttagcaacacgaaggtttattccaaaaagaaaaggggctgacagacgggagattctcatggacaaaatccctttccctttttctcgtctccatgaacatctgggtaccaagccctgactcaaaggacagatgtggatgacagcaagacttctgtgaaagcaagtggcccgtccctaggtgggagggagtccagagggtcatgggtgtgaaactgtgcacagctttccctccctccctcttcctccttgtctgtgacacatgtgcacccacacacacacacacaaacacatgtgcatatcacacacatgcacacacacaaacacatgtgcatatcacacacgcgcacacacccaaacacgtgcatatcacacacatgcacacacacaaacacgtgcatatcacacacatgcacacaaacgtgcatatcacacacacgcacacacacccaaacacgtgcatatcacacacacgcacacacacaaacacgtgcatatcacacacaaacacacgtgcacacatacttaacacacacttgcacctgctgtgcacatgtgcacacacacgtagtagtgtgttttccagccacccacacactgggtttgcattggagattgtttcaccctgcaaacgtcaacgtcagcagactcgtcggtgcgctgtgctatccggttgggaggtctcaccaggagcagagcctccctaacgtgcacctccgagaagaggggtgtcggggagtgttcccagcacctgctcggtggaagggctctccggagactggcactcagtatctgagtatgaggagcctcacttcccggggtgtcggtaaacttgaccgtgactcagtaacccacagcgtgctcctcccagcaaaccccgtgtgtccttacaggtcgaccagacgggccgtcggaggaccaccaggtggctctgcctctgcctcaccttctcacctgcttccatagctgatgtgaacccgaatccccacgctgtgctgtgtacgcactgtaggtgcagaaccgtccacacaaaaatacagtcttggcattgtttgttctttgtgaggctggttaatagcatccccgtgtgtttttctcaccctcgatggggtagaggggcacctgaatgtgtggcccccgtctgtgtcctggatcctggggcagggctgctctccctggcccctgcagcccctcatgaactttccaccctcagtgcccccggctgagcagagaggcgtcccaccattcaaccaaagaaagtcaacattgaacattaaacctctgtgtgtttctatactga

SEQ ID NO: 37792 - DNA, 1395 bp, Artificial Sequence
  derived and/or modified sequence
atgttgtggattggagttaccgcgaggaacatatacaaacaggtgacgaagaaagcacccctttgtcttgataccgaccagcccccatacccaagacagcccctgctgagtcgtttttacctggtaagcgggggcgtgcctttcattatttgtggggtgaccgccgcgactaacattcggaattatggcaccgaagacgaggatacagcgtactgttggatggcttgggaacctagtctgggagccttctatggccccgccgcaataatcactctggtgacttgtgtctactttcttggcacctacgttcagctcagacggcaccccggacggagatatgagttgcgcacccagccggaagagcaacggcgattggctactccagaaggtggcagaggcattcgcccgggcacaccaccagcgcacgacgctcctggggcatcggtcctgcagaatgaacactcctttcaggcccagctgagagctgccgcctttactctgttcctcttcactgcaacatgggctttcggtgcattggcagtctcccaggggcatttcttagatatggtcttctcatgtctgtatggggccttttgcgttactctgggactgttcgttctgatacatcattgcgccaagcgtgaagacgtttggcagtgttggtgggcttgctgccctccacgaaaggacgcgcaccccgctctcgacgccaacggagcagctctgggccgggctgcctgcctgcactctccagggctgggtcaaccgcgcggctttgctcaccccccagggccctgcaagatgacaaacttacaagctgcccagggacatgcgtcatgcctgagtcccgcaacgccctgctgcgccaaaatgcactgcgaacctttgactgctgacgaagcccatgtccacctgcaggaagagggcgctttcgggcacgatccccacctccacgggtgcctgcaagggcgcaccaaaccaccttatttcagccgtcaccccgccgaagaaccggagtatgcttaccacatcccttcaagcctggacggctcgcctaggtcctcacggactgattcaccaccgagtagcctggatggacccgccgggacgcacacacttgcctgctgcacacagggggatccatttcctatggtaacccaacctgaggggtcagatggcagccctgctttgtattcttgtcccactcagcctggccgggaggctgccctcgggcccggacacctcgagatgctgagaagaactcagtccctgcccttcgggggccccagccagaatggcctgccaaaggggaaattacttgaaggcctgccatttgggactgacggtaccggaaacatcaggacgggaccttggaaaaatgaaactactgtttag

SEQ ID NO: 37793 - DNA, 1683 bp, Artificial Sequence
  derived and/or modified sequence
atggatctgaaaactgttttgtccctccccagatacccgggtgagttcctgcacccagtggtatacgcctgtacagccgtaatgctgctgtgtctgctagcatcattcgtgacttatatagtacatcagtctgcaatccgcatcagcagaaaggggagacacaccctgctaaatttttgttttcacgcagcgctcacatttactgtgttcgctggagggattaaccgcacaaagtacccaattctctgtcaggccgttggcatagttctgcactattccaccctgagcaccatgctgtggattggtgtcacagccaggaatatctataagcaagtgacaaagaaagctccactatgtcttgatactgatcagcccccatacccaaggcagcccctgttgcgcttctatctggtgtccggcggagttccattcattatctgcggtgtgactgccgctactaatatccggaactacggaacggaagatgaggataccgcatattgttggatggcctgggagccttctctaggagcattttatggccccgcagccatcattaccctggttacttgcgtttatttcctgggaacgtatgtacagctccggaggcatcccggccgccgctacgagctgagaactcaacccgaggagcaaaggcgattggcaactcccgaaggcggccgtggaattaggcccggcacccctcccgcccatgacgcccctggtgcctcagtattacagaatgaacactctttccaagctcagcttcgtgcagccgccttcactctgtttctgttcaccgcgacctgggcgtttggagcgctcgccgtgtcacagggacattttttggacatggtgtttagctgcctgtatggagctttctgtgtgacactgggcctgttcgtcctcatacatcactgtgccaagcgggaagatgtctggcagtgctggtgggcctgttgccctccaaggaaagacgctcaccctgctctggatgcaaatggggcagcactgggcagagccgcctgcctccactcccccggcctgggtcagcctcgaggattcgcccacccccccggaccttgtaagatgacaaatctacaggccgcacaggggcatgcctcttgcctgtcgcccgcaactccttgctgcgccaagatgcattgcgagccactgacagccgacgaggcccatgtgcacctgcaggaagaaggcgctttcgggcacgacccccacctgcatggatgcttgcaagggcgaactaagccgccctacttttccaggcacccagcggaagaacctgagtacgcctatcacataccaagttctctagatggcagtcctagaagctcaaggaccgatagtccgcccagctccttggacggcccagctggcacacacacattggcctgctgcactcagggggatcctttccctatggttacacagccagaaggtagtgatgggtcccctgccctgtacagttgccctacgcaacccggccgagaagcagcattgggccctggccacctggaaatgctgcggagaacacaatcactgcctttcggcggaccgtcccagaatggtttacccaaaggtaaactgctggagggcctacccttcggaaccgatggaactgggaacattagaactggcccctggaaaaacgagacaactgtgtag

SEQ ID NO: 37794 - DNA, 1395 bp, Artificial Sequence
  derived and/or modified sequence
atgctgtggattggagtgacagccaggaacatctacaagcaggtgaccaagaaggcccccctgtgcctggacacagaccagcccccctacccccggcagcccctgctgagccgcttctacctggtgtctggaggagtgcccttcatcatctgtggggtgacagctgccaccaacatccggaactacggcacagaagatgaggacacagcctactgctggatggcctgggagcccagcctgggcgccttctacggccctgctgccatcatcaccctggtgacctgtgtgtacttcctgggcacctacgtgcagctgcggcggcaccctggaagaagatatgagctgcggacccagcctgaggagcagaggcggctggccaccccagagggcggccggggcatccggcccggcaccccaccagcccatgatgcccctggggcctctgtgctgcagaatgagcacagcttccaggcccagctgcgggctgctgccttcaccctcttcctgttcaccgccacctgggccttcggggccctggccgtgtcccagggccacttcctggacatggtgttcagctgcctgtatggagccttctgtgtgaccctgggcctgtttgtgctgatccaccactgtgccaagagagaagatgtgtggcagtgctggtgggcctgctgcccccccaggaaggatgcccacccagccctggatgccaacggggccgccctgggccgggccgcctgcctgcacagccctggcctgggccagccccggggctttgcccaccccccaggcccctgcaagatgaccaacctgcaggccgcccagggccacgccagctgcctgagccctgccaccccctgctgtgccaagatgcactgtgagcccctgacagcagatgaggcccacgtgcacctgcaggaggagggcgcctttggacatgacccccacctgcacggctgcctgcagggccgcaccaagccaccctacttcagccgccaccctgctgaggagccagaatatgcctaccacatccccagcagcctggatggcagccccaggagcagcaggacagacagcccccccagcagcctggatggccctgctggcacccacaccctggcctgctgcacccagggcgaccccttccccatggtgacccagcctgagggcagtgatggcagccctgccctgtacagctgccccacccagcccggccgggaggccgccctgggccctggccacctggagatgctgcggaggacccagagcctgccctttggaggccccagccagaatggcctgcccaagggcaagctgctggagggcctgccctttggaacagatggcaccggcaacatcagaacaggcccctggaagaatgagaccaccgtgtag

SEQ ID NO: 37795 - DNA, 1683 bp, Artificial Sequence
  derived and/or modified sequence
atggacctgaagacagtgctgagcctgccccgctacccaggagagttcctgcaccctgtggtgtatgcctgcacagctgtgatgctgctgtgcctgctggccagctttgtgacctacatcgtgcaccagagcgccatccgcatcagcaggaagggccgccacaccctgctgaacttctgcttccacgccgccctgaccttcaccgtgtttgctgggggcatcaacagaaccaagtaccccatcctgtgccaggccgtgggcatcgtgctgcactacagcaccctgagcaccatgctgtggattggagtgacagccaggaacatctacaagcaggtgaccaagaaggcccccctgtgcctggacacagaccagcccccctacccccggcagcccctgctgcgcttctacctggtgtctggaggagtgcccttcatcatctgtggggtgacagctgccaccaacatccggaactacggcacagaagatgaggacacagcctactgctggatggcctgggagcccagcctgggcgccttctacggccctgctgccatcatcaccctggtgacctgtgtgtacttcctgggcacctacgtgcagctgcggcggcaccctggaagaagatatgagctgcggacccagcctgaggagcagaggcggctggccaccccagagggcggccggggcatccggcccggcaccccaccagcccatgatgcccctggggcctctgtgctgcagaatgagcacagcttccaggcccagctgcgggctgctgccttcaccctcttcctgttcaccgccacctgggccttcggggccctggccgtgtcccagggccacttcctggacatggtgttcagctgcctgtatggagccttctgtgtgaccctgggcctgtttgtgctgatccaccactgtgccaagagagaagatgtgtggcagtgctggtgggcctgctgcccccccaggaaggatgcccacccagccctggatgccaacggggccgccctgggccgggccgcctgcctgcacagccctggcctgggccagccccggggctttgcccaccccccaggcccctgcaagatgaccaacctgcaggccgcccagggccacgccagctgcctgagccctgccaccccctgctgtgccaagatgcactgtgagcccctgacagcagatgaggcccacgtgcacctgcaggaggagggcgcctttggacatgacccccacctgcacggctgcctgcagggccgcaccaagccaccctacttcagccgccaccctgctgaggagccagaatatgcctaccacatccccagcagcctggatggcagccccaggagcagcaggacagacagcccccccagcagcctggatggccctgctggcacccacaccctggcctgctgcacccagggcgaccccttccccatggtgacccagcctgagggcagtgatggcagccctgccctgtacagctgccccacccagcccggccgggaggccgccctgggccctggccacctggagatgctgcggaggacccagagcctgccctttggaggccccagccagaatggcctgcccaagggcaagctgctggagggcctgccctttggaacagatggcaccggcaacatcagaacaggcccctggaagaatgagaccaccgtgtag

SEQ ID NO: 37796 - DNA, 1395 bp, Artificial Sequence
  derived and/or modified sequence
atgctgtggatcggcgtgaccgcccggaacatctacaagcaggtgactaaaaaggccccactgtgcttagacaccgatcagcctccatatccgcggcagccactcttgtctcggttttaccttgtatcggggggcgtgccgttcatcatctgcggcgtgaccgcggccaccaacatccgaaattacggcaccgaagatgaggataccgcatattgctggatggcttgggagccatccctcggcgcattctacggaccggccgcgatcattacgctcgttacgtgcgtctatttcctgggtacctacgtacagctgagacgccaccctggaaggaggtacgaattgaggactcagcctgaagagcagagacggttggccactcctgagggtgggaggggcattaggcctggaaccccacctgctcacgatgctccaggagcatccgtgttgcagaatgagcactcattccaggcacagctgcgtgccgctgcgttcaccttattcctgttcacagcaacctgggctttcggtgccttagctgtcagccaggggcactttctcgatatggtattctcttgcctttatggagcattctgcgtgacgttagggctttttgtgcttatacaccattgtgcaaaacgcgaagatgtctggcaatgttggtgggcgtgctgcccacctcgtaaggatgcccaccccgcacttgacgccaatggtgctgcactggggagagctgcgtgccttcactcaccagggttaggtcagcctcgcgggttcgctcatcccccggggccttgtaagatgaccaacctgcaagctgcccaggggcacgcatcctgtttgtcacccgcgactccatgttgcgctaaaatgcactgtgaacccctgactgcagatgaagcccatgtgcatctacaagaagagggcgcattcggacatgatccccatttacatggctgtctacagggaaggaccaaacctccctacttcagtcgccaccctgctgaggaaccagaatacgcatatcacataccctcatccctggatgggagtccccggtcttcccgcacagattctccaccttcatccctcgatggccccgccggcacacacactctcgcttgctgtacacagggagaccccttccctatggtaacccagcctgagggatcggacggcagccctgcactgtatagctgcccgacccaaccaggacgcgaagctgcactggggcctggtcatctggaaatgttgagacgaacacagtcactgccctttggtggtcccagccagaatggactgccgaaaggcaagctgctggagggcctgccttttggcactgatggtacaggaaacataagaaccggaccttggaaaaatgagacaacggtgtag

SEQ ID NO: 37797 - DNA, 1683 bp, Artificial Sequence
  derived and/or modified sequence
atggacctgaagaccgtgctgagcctgccccggtaccccggcgagttcctgcacccggttgtctatgcgtgcactgcggtaatgctgctctgcctgttggcttctttcgtgacctatatcgtgcaccaatccgccatcagaatcagcagaaaggggagacacacactcctcaatttctgctttcatgccgctctcacattcactgtgtttgccggaggtatcaacagaaccaagtacccaatcctctgtcaggccgtgggcatcgttctgcattactctactctgtccactatgctgtggattggagtgaccgccaggaacatttataagcaggtcacgaaaaaagcacctctttgcctggataccgatcagcctccatatccgcgtcagccacttctgcgcttttacttggtgagtggcggagtgccttttattatctgtggcgtgacagcagccacaaacatccgaaactatggaacagaagatgaggacacggcctactgctggatggcctgggagcccagcctgggggcattttatggccccgctgcaatcatcactctcgtcacctgcgtctactttttggggacctatgttcagctgcgaaggcacccaggacgccggtacgagctcagaactcagcctgaagagcagcgtaggcttgccacgccagaaggcggtagaggaatccggcccggaacgcctcccgcccacgacgctcctggtgccagcgttttgcagaacgagcactcgtttcaggcccaattgcgcgccgcggcattcaccctgtttctgtttacagcaacttgggcgttcggcgctcttgccgtgtcccaaggccacttcctggatatggtttttagttgcctgtacggcgccttctgtgttacactgggcctgttcgtgcttatccaccattgcgctaagagagaggatgtgtggcagtgctggtgggcctgttgcccaccgagaaaagatgcccatcccgctctcgacgcgaacggggctgctttaggtagagctgcatgtctgcatagccccggcttgggccagcctcgcggtttcgctcatccgccgggaccatgcaagatgactaacttgcaggcagcccagggccacgcaagttgtctgtctcctgcaactccctgctgtgcaaaaatgcactgtgaacctctcaccgctgatgaagcacacgtgcatcttcaggaggaaggcgcttttggtcatgacccccatttgcacggctgtctgcaaggaaggaccaagcccccctacttcagcagacaccccgctgaagagccagaatatgcttatcacattccatcatcactggatgggtctcctcgtagttctcgcacagatagcccaccgtcctccttggatggccctgcgggcacacacacacttgcctgctgtacccagggcgatcccttcccaatggtgactcagccagaaggctctgacggcagtccggcactctatagttgccctacccagccagggcgcgaggcggctcttggcccgggacacctggaaatgctgcggcgcacccaatctctgccctttggtggcccctcccagaacggcctgccaaagggcaagctcctggaagggctgccttttggaaccgacgggacgggcaatatacgtacaggcccttggaagaacgaaactaccgtctag

SEQ ID NO: 37798 - DNA, 1395 bp, Artificial Sequence
  derived and/or modified sequence
atgctgtggataggggttaccgccaggaacatttacaagcaagtaacaaaaaaggctcctctgtgcctcgacaccgaccaacccccatatcccaggcagcctctgttgtccaggttctatctcgtgagcggcggagttcctttcatcatttgtggagtcaccgccgctactaacatccgtaactatggcacagaggacgaagataccgcgtattgctggatggcctgggaacccagtctcggggctttttacggacctgccgctatcataaccctcgttacctgcgtctatttcttaggtacctacgtgcagctgcgcaggcatcccggaagacggtatgagttacgaacccagcctgaggagcagaggagacttgcaacccccgaagggggaagggggatcaggcctgggacccctcccgctcatgatgccccaggcgcatcggtcctgcaaaatgagcatagctttcaggcccagctaagagctgccgctttcacattatttctcttcaccgcgacgtgggccttcggcgctctagctgtgagtcagggacacttccttgacatggtgtttagctgcctgtacggcgcattttgtgtgactctcggtctgttcgtgctgattcaccactgcgcaaaacgggaagacgtttggcagtgttggtgggcgtgctgcccacccaggaaggacgctcacccagccctggacgcaaatggcgctgcattgggacgcgctgcatgcctccactctcctggcctgggccaacccaggggattcgcacatccacccggaccctgtaagatgacaaacctgcaggccgcacagggacacgcgtcatgtctctcaccggcaacgccatgctgcgctaagatgcattgtgagcccctgacagcggacgaggctcacgttcatctgcaggaggaaggcgcttttgggcacgacccccatttacacggttgcctccaggggagaaccaagccaccatacttctcacggcatcccgctgaggagcctgaatacgcctatcatattccctccagtctggatggttccccgcgatcttctagaacagattcaccaccgagcagtctggacggccctgctggaacacataccctggcatgttgcacacagggcgatccatttcccatggtcacacagcccgagggcagtgatgggtcacccgcattatattcctgtcctacacagccagggagggaggccgctctggggccaggacacctggagatgctgagacgtactcaatctctcccgtttgggggacctagccaaaatggtctccccaaggggaaactcctcgagggattaccatttggaactgacgggactggtaacatacgtactggcccatggaagaacgagaccacagtgtag

SEQ ID NO: 37799 - DNA, 1683 bp, Artificial Sequence
  derived and/or modified sequence
atggatctgaaaacagttctgagcctgcccagatacccaggggagtttctccatcctgtggtctatgcctgcacagctgtgatgcttctctgtcttctcgccagtttcgttacctacattgtgcaccagtccgctatacgtatctcacggaaggggagacacaccttgctcaacttttgttttcatgccgcattgaccttcaccgtcttcgccggagggatcaacaggacaaagtacccaattttatgtcaagccgttggcattgtgttacattactctacactgagtaccatgttatggataggagtgacagctcggaatatctataaacaggtaacaaagaaggctcccttgtgtctggacaccgaccagccaccataccccagacaacccctgcttaggttttatttggtctctggaggtgtgccattcatcatttgcggagttaccgccgctacaaacatccgcaactacggaacggaagacgaggataccgcctactgttggatggcgtgggagccctcactgggagcattttacggacctgccgctattatcaccttggttacttgtgtttatttcctgggcacctacgtgcagctgaggaggcacccaggcaggaggtatgagctgcggacacagcccgaagagcaacgcagattggcaacacccgaggggggacggggtattcgcccaggcactcctccagcccatgatgcccctggggcttctgttctgcaaaacgaacacagctttcaagcccagctgcgcgctgccgcattcaccctcttcttattcacagctacgtgggcgtttggagcgttggccgtgagtcagggccatttcttggacatggtgtttagttgcctctatggagccttctgtgtaaccctgggcctgtttgtcctcattcatcactgcgctaaacgcgaggacgtctggcagtgctggtgggcctgttgtcccccaaggaaggacgcccaccctgcccttgacgcgaacggcgctgcacttggtcgggcagcctgtctgcactcccccggtctaggccagccgagagggtttgcccaccctccagggccatgcaaaatgaccaatctgcaagccgcacagggacatgcatcgtgtctttcacctgcgacgccatgttgcgcaaagatgcattgtgaaccactgacggctgacgaggcccacgttcatctgcaggaggagggagcctttggccatgatcctcatttacacggctgtctacagggcaggaccaagcctccttacttcagcaggcaccccgctgaggagcccgagtatgcataccatattccgtcatctctggacggctccccaagatcatctagaacagacagtccacctagcagcttggatggacctgctggcactcatactctggcttgctgtacacagggggatccatttccaatggtgacacagccagaaggctctgatggcagtcccgctttgtacagttgcccaactcagcctggccgagaagcagcgctgggcccaggacacttggagatgcttcgtcgcacacagtccctgcccttcggcggtcctagccagaatggacttcctaaaggtaaactcctggaagggctcccattcggaacagacggcacaggcaacattcgcaccggaccctggaagaacgagaccacggtgtag

SEQ ID NO: 37800 - DNA, 1395 bp, Artificial Sequence
  derived and/or modified sequence
atgctgtggatcggcgtgaccgccagaaacatctacaagcaggtgaccaagaaggcccccctgtgcctggacaccgaccagcccccctaccccagacagcccctgctgagcagattctacctggtgagcggcggcgtgcccttcatcatctgcggcgtgaccgccgccaccaacatcagaaactacggcaccgaggacgaggacaccgcctactgctggatggcctgggagcccagcctgggcgccttctacggccccgccgccatcatcaccctggtgacctgcgtgtacttcctgggcacctacgtgcagctgagaagacaccccggcagaagatacgagctgagaacccagcccgaggagcagagaagactggccacccccgagggcggcagaggcatcagacccggcaccccccccgcccacgacgcccccggcgccagcgtgctgcagaacgagcacagcttccaggcccagctgagagccgccgccttcaccctgttcctgttcaccgccacctgggccttcggcgccctggccgtgagccagggccacttcctggacatggtgttcagctgcctgtacggcgccttctgcgtgaccctgggcctgttcgtgctgatccaccactgcgccaagagagaggacgtgtggcagtgctggtgggcctgctgcccccccagaaaggacgcccaccccgccctggacgccaacggcgccgccctgggcagagccgcctgcctgcacagccccggcctgggccagcccagaggcttcgcccacccccccggcccctgcaagatgaccaacctgcaggccgcccagggccacgccagctgcctgagccccgccaccccctgctgcgccaagatgcactgcgagcccctgaccgccgacgaggcccacgtgcacctgcaggaggagggcgccttcggccacgacccccacctgcacggctgcctgcagggcagaaccaagcccccctacttcagcagacaccccgccgaggagcccgagtacgcctaccacatccccagcagcctggacggcagccccagaagcagcagaaccgacagcccccccagcagcctggacggccccgccggcacccacaccctggcctgctgcacccagggcgaccccttccccatggtgacccagcccgagggcagcgacggcagccccgccctgtacagctgccccacccagcccggcagagaggccgccctgggccccggccacctggagatgctgagaagaacccagagcctgcccttcggcggccccagccagaacggcctgcccaagggcaagctgctggagggcctgcccttcggcaccgacggcaccggcaacatcagaaccggcccctggaagaacgagaccaccgtgtag

SEQ ID NO: 37801 - DNA, 1683 bp, Artificial Sequence
  derived and/or modified sequence
atggacctgaagaccgtgctgagcctgcccagataccccggcgagttcctgcaccccgtggtgtacgcctgcaccgccgtgatgctgctgtgcctgctggccagcttcgtgacctacatcgtgcaccagagcgccatcagaatcagcagaaagggcagacacaccctgctgaacttctgcttccacgccgccctgaccttcaccgtgttcgccggcggcatcaacagaaccaagtaccccatcctgtgccaggccgtgggcatcgtgctgcactacagcaccctgagcaccatgctgtggatcggcgtgaccgccagaaacatctacaagcaggtgaccaagaaggcccccctgtgcctggacaccgaccagcccccctaccccagacagcccctgctgagattctacctggtgagcggcggcgtgcccttcatcatctgcggcgtgaccgccgccaccaacatcagaaactacggcaccgaggacgaggacaccgcctactgctggatggcctgggagcccagcctgggcgccttctacggccccgccgccatcatcaccctggtgacctgcgtgtacttcctgggcacctacgtgcagctgagaagacaccccggcagaagatacgagctgagaacccagcccgaggagcagagaagactggccacccccgagggcggcagaggcatcagacccggcaccccccccgcccacgacgcccccggcgccagcgtgctgcagaacgagcacagcttccaggcccagctgagagccgccgccttcaccctgttcctgttcaccgccacctgggccttcggcgccctggccgtgagccagggccacttcctggacatggtgttcagctgcctgtacggcgccttctgcgtgaccctgggcctgttcgtgctgatccaccactgcgccaagagagaggacgtgtggcagtgctggtgggcctgctgcccccccagaaaggacgcccaccccgccctggacgccaacggcgccgccctgggcagagccgcctgcctgcacagccccggcctgggccagcccagaggcttcgcccacccccccggcccctgcaagatgaccaacctgcaggccgcccagggccacgccagctgcctgagccccgccaccccctgctgcgccaagatgcactgcgagcccctgaccgccgacgaggcccacgtgcacctgcaggaggagggcgccttcggccacgacccccacctgcacggctgcctgcagggcagaaccaagcccccctacttcagcagacaccccgccgaggagcccgagtacgcctaccacatccccagcagcctggacggcagccccagaagcagcagaaccgacagcccccccagcagcctggacggccccgccggcacccacaccctggcctgctgcacccagggcgaccccttccccatggtgacccagcccgagggcagcgacggcagccccgccctgtacagctgccccacccagcccggcagagaggccgccctgggccccggccacctggagatgctgagaagaacccagagcctgcccttcggcggccccagccagaacggcctgcccaagggcaagctgctggagggcctgcccttcggcaccgacggcaccggcaacatcagaaccggcccctggaagaacgagaccaccgtgtag

SEQ ID NO: 37802 - protein, 181 aa, Artificial Sequence
  derived and/or modified sequence
MPVPASWPHLPSPFLLMTLLLGRLTGVAGEDELQVIQPEKSVSVAAGESATLRCAMTSLIPVGPIMWFRGAGAGRELIYNQKEGHFPRVTTVSELTKRNNLDFSISISNITPADAGTYYCVKFRKGSPDDVEFKSGAGTELSVREAALAPTAPLLVALLLGPKLLLVVGVSAIYICWKQKA

SEQ ID NO: 37803 - DNA, 546 bp, Artificial Sequence
  derived and/or modified sequence
atgcccgtgcccgccagctggccccacctgcccagccccttcctgctgatgaccctgctgctgggcagactgaccggcgtggccggcgaggacgagctgcaggtgatccagcccgagaagagcgtgagcgtggccgccggcgagagcgccaccctgagatgcgccatgaccagcctgatccccgtgggccccatcatgtggttcagaggcgccggcgccggcagagagctgatctacaaccagaaggagggccacttccccagagtgaccaccgtgagcgagctgaccaagagaaacaacctggacttcagcatcagcatcagcaacatcacccccgccgacgccggcacctactactgcgtgaagttcagaaagggcagccccgacgacgtggagttcaagagcggcgccggcaccgagctgagcgtgagagaggccgccctggcccccaccgcccccctgctggtggccctgctgctgggccccaagctgctgctggtggtgggcgtgagcgccatctacatctgctggaagcagaaggcctag

SEQ ID NO: 37804 - DNA, 546 bp, Artificial Sequence
  derived and/or modified sequence
atgccagtccccgctagctggcctcacctgccatctcccttccttctcatgaccttgcttcttggacgactgaccggcgtagcaggggaggatgagctgcaggtaattcaaccagaaaagagtgtgagtgtggcggccggagaatcggcgaccttgcgctgcgccatgacaagtctgattccagtaggaccaattatgtggtttaggggggctggggcgggtcgcgagctgatatacaaccaaaaagaaggccactttccacgtgtaactactgtgtcagagctaaccaagagaaacaatctagattttagtatctcgatcagcaatatcacgcctgcagatgctgggacctactactgcgttaaatttcggaagggctcacctgatgacgtggaattcaaaagtggcgcgggcaccgaacttagtgtgcgagaagccgccctggccccgaccgctccccttctagtggcattactccttggccctaagctgctgttggtcgtgggcgtaagcgcgatatacatatgttggaagcagaaagcttag

SEQ ID NO: 37805 - DNA, 546 bp, Artificial Sequence
  derived and/or modified sequence
atgcctgtgcctgcctcctggccccacctgcccagccccttcctgctgatgaccctgctgctgggccgcctgactggagtggccggggaggatgagctgcaggtgatccagcctgagaagtctgtgtctgtggccgccggggagagcgccaccctgcgctgtgccatgaccagcctcatccctgtgggccccatcatgtggttcagaggagctggagctggccgggagctgatctacaaccagaaggagggccacttcccccgggtgaccaccgtgtctgagctgaccaagaggaacaacctggacttcagcatcagcatcagcaacatcaccccagcagatgctggcacctactactgtgtgaagttcaggaagggcagcccagatgatgtggagttcaagtctggagctggaacagagctgtctgtgcgggaggccgccctggcccccacagcccccctgctggtggccctgctgctgggccccaagctgctgctggtggtgggcgtgtctgccatctacatctgctggaagcagaaggcctag

SEQ ID NO: 37806 - DNA, 546 bp, Artificial Sequence
  derived and/or modified sequence
atgcccgtgcccgccagctggccccacctgcccagccccttcctgttgatgactctgcttctcggacgcttgaccggagtagccggcgaagacgagcttcaggtgatccagccagaaaagtcggtctctgtagctgcaggcgagtcagccacactgagatgtgcaatgacaagcctcatcccagtaggtcccattatgtggtttcgcggggccggcgcaggaagggagctgatttacaatcagaaggagggccacttccctcgggtgactaccgtctctgaactgaccaaacggaacaatctcgatttttccatttctattagcaatatcacccccgccgacgccggcacgtattactgcgtcaagttcagaaaagggagcccagatgacgttgagtttaagtccggggccgggaccgagctatctgttagagaagcagctctggctcctactgcccccctgcttgtggcgctacttctcgggcctaagctgctgttggtcgtgggagtctccgcaatctatatctgctggaaacagaaggcttag

SEQ ID NO: 37807 - DNA, 546 bp, Artificial Sequence
  derived and/or modified sequence
atgcctgtacctgcttcatggccccacctcccctcccctttcttacttatgactttgctactcgggagactaactggagtagctggtgaggatgagttgcaggtaatccaacctgagaaatcagtctctgtagcagcgggtgagtccgctaccctccgttgcgcgatgacatctctgatccctgtagggccaataatgtggttcagaggcgcaggcgctggacgagagctaatctacaaccagaaagagggtcacttccctagagtaacaaccgttagcgaactaactaagcgtaataatcttgactttagcatcagcataagtaacatcactcctgctgatgccggaacatactattgcgtgaagtttcgcaaagggtcacctgacgacgtcgagtttaagagcggcgctggcaccgaattaagcgtgcgagaggcggcactcgctccaaccgcgcctctccttgtggcactgttgctgggaccaaaattgctactggtagtgggcgtctccgctatttacatctgttggaagcagaaggcctag

SEQ ID NO: 37808 - DNA, 1715 bp, Artificial Sequence
  derived and/or modified sequence
cgatcttcccagcacagacgtttggacagagcaggctcctaaggtctccagaatgcccgtgccagcctcctggccccaccttcctagtcctttcctgctgatgacgctactgctggggagactcacaggagtggcaggtgaggacgagctacaggtgattcagcctgaaaagtccgtatcagttgcagctggagagtcggccactctgcgctgtgctatgacgtccctgatccctgtggggcccatcatgtggtttagaggagctggagcaggccgggaattaatctacaatcagaaagaaggccacttcccacgggtaacaactgtttcagaactcacaaagagaaacaacctggacttttccatcagcatcagtaacatcaccccagcagacgccggcacctactactgtgtgaagttccggaaagggagccctgacgacgtggagtttaagtctggagcaggcactgagctgtctgtgcgcgaagcagcgctggctcctactgctccactcctcgtagctctcctcctgggccccaagctgctactggtggttggtgtctctgccatctacatctgctggaaacagaaggcctgactgaccctcagtctctgctgcctcctcctttcttgagaagctcagcctgagagaaggagctggcgagaaccttccccacactcagctccaaacgcctcctctcccaggtcatctgcctgcccacacgctcctgttccaccttcacaagaccatgatgccccaaagcagtgtctctattcacggtcctgagcaggggccatgggattgggctctgggcactgactcatggcacctccctagaaggtgagaaacactccaaatctaaacacaccaggacttctcccatccgtcgccttgggactggccataaaccacagactctctccaggctctcaagagttatcctgtcttctggattcctgcctaccccaactcccccagccttgttgaggttctctactgcctcctgaatacacatgaacccctataccaattttaagaaaaaaatgattctctttcctctttgtccaagcatcctatccctcaaacccaaaaagaaagaagctctcccttctctctctgtgatggagacagtatttcttctagtatcctgcagccttcccagtcctgctgcttgtggtagaaatgctgccacagcccaacattgaggagccctcgatgactgccctttacaactcatattcagttctgcctccaaaatgcatgtgtccacttacatgagatggtaaatgtttaacaatggactttctgaaagggaaaaaccaaaagctgttttgcagtgcttgccaatttctctagtgtaataactcccaacctgaccaatttcacactgccaacagttaaacaaccagattgcaagattcctgaaatttaacaattggttttcagggcccagtccaagcctgctgctggaaacctcagagttaaatccctattctccacacctctcacctccaccacccctccctgtcccagccagcatcatctctttggggaccactcctctggctttcatttttcagccacagtgattctttggaaaagtcaaatcatatcacttctctgcttcttccccaacacagctgcatggctcccgctctccctccttcaagtctctgctcaatgtcacttcattaaaggcaccttctataaacta

SEQ ID NO: 37809 - protein, 363 aa, Artificial Sequence
  derived and/or modified sequence
MERRRLLGGMALLLLQALPSPLSARAEPPQDKEACVGTNNQSYICDTGHCCGQSQCCNYYYELWWFWLVWTIIIILSCCCVCHHRRAKHRLQAQQRQHEINLIAYREAHNYSALPFYFRFLPNYLLPPYEEVVNRPPTPPPPYSAFQLQQQQLLPPQCGPAGGSPPGIDPTRGSQGAQSSPLSEPSRSSTRPPSIADPDPSDLPVDRAATKAPGMEPSGSVAGLGELDPGAFLDKDAECREELLKDDSSEHGAPDSKEKTPGRHRRFTGDSGIEVCVCNRGHHDDDLKEFNTLIDDALDGPLDFCDSCHVRPPGDEEEGLCQSSEEQAREPGHPHLPRPPACLLLNTINEQDSPNSQSSSSPS

SEQ ID NO: 37810 - DNA, 1092 bp, Artificial Sequence
  derived and/or modified sequence
atggagaggcggagattgctcggcgggatggcgctacttttacttcaggctctgccgtctcctctgagtgctcgagctgagccaccccaagataaagaggcctgtgtggggactaataatcagtcttacatctgcgatactggtcactgttgtgggcagtcccagtgctgcaactactattatgagctctggtggttttggctcgtatggaccatcattattatactgagctgctgctgtgtatgtcaccacaggagagccaagcatcggctgcaggcccagcagcggcagcatgaaatcaatttgattgcttatagggaggcacacaattattctgcattgcctttctacttcagatttcttccgaactacctgctccctccatacgaggaggtggtgaacaggccccccaccccacctccaccatattcagcgtttcaacttcaacagcaacagctcctgcctccacagtgcggccccgccggcggaagcccccctggtattgatcctacacgaggtagtcaaggcgcacagagcagccctttatcagaaccctctcgttccagtacgcggccaccttctatcgctgaccctgacccctcagaccttccagtcgaccgagccgccacaaaggcaccaggcatggaaccttccggaagtgtggcagggcttggggaattagatccaggcgcttttctagataaggacgctgagtgtagagaggaactgcttaaagatgatagctcagagcatggagcccccgactccaaagagaagactccgggtcgccatcggagatttacaggagacagtggaattgaagtttgcgtgtgcaacagaggccaccatgatgacgaccttaaagaatttaatacccttatcgacgacgctctggacggacctttggatttctgcgacagttgtcatgttagacccccgggagatgaagaggagggattatgccagtcttctgaggaacaggctcgagagcccggccaccctcacttgcctagaccaccagcatgcctgctgctcaacaccataaacgagcaggatagtcctaatagccagagctcctcttccccaagctag

SEQ ID NO: 37811 - DNA, 1092 bp, Artificial Sequence
  derived and/or modified sequence
atggagcggcggcggctgctgggcggcatggccctgctgctgctgcaggccctgcccagccccctgagcgcccgggcagagcccccccaggacaaggaggcctgtgtgggcaccaacaaccagagctacatctgtgacaccggccactgctgcggccagagccagtgctgcaactactactatgagctgtggtggttctggctggtgtggaccatcatcatcatcctgagctgctgctgcgtgtgccaccacagaagagccaagcaccggctgcaggcccagcagaggcagcacgagatcaacctgattgcctaccgggaggcccacaactacagcgccctgcccttctacttccgcttcctgcccaactacctgctgcccccctatgaggaggtggtgaaccggccccccaccccacctccaccctacagcgccttccagctgcagcagcagcagctgctgcccccccagtgtggccctgctgggggcagccccccaggcatcgaccccacccggggcagccagggcgcccagagcagccccctgtctgagcccagccgcagcagcacccggccccccagcattgctgaccctgaccccagcgacctgcctgtggaccgggccgccaccaaggcccctggcatggagcccagcggctctgtggccggcctgggggagctggaccccggggccttcctggacaaggatgctgagtgccgggaggagctgctgaaggatgacagcagcgagcacggggccccagacagcaaggagaagaccccaggccgccaccggcgcttcaccggggacagcggcatcgaggtgtgtgtgtgcaacagaggccaccatgatgatgacctgaaggagttcaacaccctgattgatgatgccctggatggccccctggacttctgtgacagctgccacgtgcggcccccaggagatgaggaggagggcctgtgccagagcagcgaggagcaggcccgggagcccggccacccccacctgccccggcccccagcctgcctgctgctgaacaccatcaatgagcaggacagccccaacagccagagcagcagcagccccagctag

SEQ ID NO: 37812 - DNA, 1092 bp, Artificial Sequence
  derived and/or modified sequence
atggagcggcggcggctgctgggcggcatggccctgctgctgctgcaggccctgccctcccctctttctgctagggctgaacccccgcaggacaaagaagcatgcgtgggtaccaataatcaatcttatatctgtgacaccgggcattgctgtggccagagccagtgctgcaactattattacgagctctggtggttctggcttgtttggaccattatcataattttatcttgttgctgcgtatgccaccaccgccgggcaaagcaccggctgcaagcccaacaaaggcagcacgagatcaatcttatcgcatacagggaagctcataactattcagcactgcctttttactttcggttccttcctaactatctgcttcccccatatgaagaagtggttaatcggcccccaacccctcctcccccatacagtgccttccagctccagcagcagcagcttctgcctccacagtgcggccctgccggtggatcgccaccaggtatcgaccccacacgtggtagccaaggtgcacaatcctcccccctgtccgagccgagcagaagttccacccgcccaccctccatcgccgatccggatcctagtgacctgcctgttgatcgagcggctaccaaagcccctggtatggagcccagcggtagtgtagccggactcggggagttagatcccggggcctttctggataaggacgcagaatgcagagaagagctactgaaggatgactcgtcagagcatggcgcaccggacagtaaagagaagactcctggcaggcataggagattcacaggcgattccgggatcgaggtctgtgtgtgcaatcgggggcaccatgacgacgatctcaaggaattcaacactttgatcgatgacgctctggacggtcccctcgatttttgcgactcctgccacgtcagacctcccggcgatgaagaggagggtctgtgccagtcgagtgaggagcaggctagagagccgggacacccccacctcccgcgccccccggcctgtctgttgctcaacactatcaatgaacaggacagtccaaatagtcagtcctcgtccagcccttcttag

SEQ ID NO: 37813 - DNA, 1092 bp, Artificial Sequence
  derived and/or modified sequence
atggagagaaggcggttactggggggaatggcactgcttctgctgcaagcactgccaagcccgctttcagccagagcagaacctccacaggacaaggaagcttgtgttggaactaacaaccagagctacatttgtgataccgggcattgttgcggccaatcccaatgttgtaattactactatgagctttggtggttctggttggtctggaccattataatcatcttgtcatgctgctgcgtatgccaccaccggagggccaaacacaggctccaggcgcagcagcgacagcatgaaatcaatttgatcgcttatcgggaggcacacaactacagtgccctgcccttctactttcggtttctcccaaattacttgctccccccatatgaagaggtagtgaaccggccacctacaccaccacccccttactccgccttccagcttcaacagcagcaactgctgcctcctcagtgtggacctgcaggcggatctcctcctggtatcgacccaacaagaggtagccaaggcgctcagagtagcccacttagtgagccatcacggtcctccacccgcccaccaagcattgcagacccagacccttcagacctgcctgtggacagagcggcaacaaaagccccaggcatggaacccagcggttctgtcgcgggactcggagagctggaccccggagcatttcttgataaagacgctgaatgtcgagaggaattgctcaaggatgattcctccgagcatggggcaccagactccaaagaaaagactccgggacgtcacaggcgctttaccggagacagtggtattgaggtatgcgtgtgcaaccgcggacaccatgacgacgacttaaaagagttcaataccttgattgatgacgctttggacggtcctctggatttctgtgatagctgccacgttagacccccaggcgacgaagaagaaggactgtgtcaatcatccgaagaacaagctagagagccgggacacccccacttgcctcgcccacctgcctgtctgctcctaaacaccataaacgagcaggactccccgaactctcagtccagctcttcgccctcatag

SEQ ID NO: 37814 - DNA, 4085 bp, Artificial Sequence
  derived and/or modified sequence
gaaggaagaagagggtagaggaggagagggaggaggaggagggaggtggcggcgccgtggcggaggagcaggagcaggagggggatggagaggagaaggctcctgggtggcatggcgctcctgctcctccaggcgctgcccagccccttgtcagccagggctgaacccccgcaggataaggaagcctgtgtgggtaccaacaatcaaagctacatctgtgacacaggacactgctgtggacagtctcagtgctgcaactactactatgaactctggtggttctggctggtgtggaccatcatcatcatcctgagctgctgctgtgtttgccaccaccgccgagccaagcaccgccttcaggcccagcagcggcaacatgaaatcaacctgatcgcttaccgagaagcccacaattactcagcgctgccattttatttcaggtttttgccaaactatttactacctccttatgaggaagtggtgaaccgacctccaactcctcccccaccatacagtgccttccagctacagcagcagcagctgctgcctccacagtgtggccctgcaggtggcagtcccccgggcatcgatcccaccaggggatcccagggggcacagagcagccccttgtctgagcccagcagaagcagcacaagacccccaagcatcgctgaccctgatccctctgacctaccagttgaccgagcagccaccaaagccccagggatggagcccagtggctctgtggctggcctgggggagctggacccgggggccttcctggacaaagatgcagaatgtagggaggagctgctgaaagatgacagctctgaacacggcgcacccgacagcaaagagaagacgcctgggagacatcgccgcttcacaggtgactcgggcattgaagtgtgtgtgtgcaaccggggccaccatgacgatgacctcaaagagttcaacacactcatcgatgatgctctggatgggcccctggacttctgcgacagctgccatgtgcggccccctggtgatgaggaggaaggcctctgtcagtcctctgaggagcaggctcgagagcctgggcacccgcacctgccacggccgcccgcatgcctgctgctgaacaccatcaacgagcaggactctcccaactcccagagcagcagctcccccagctagagcaggtcctgccagcacccagcaacttggcaaagcaaccagggtaggggagaaccacgagagaagcattaagtgactttcaaagactttcagagtacagccacttggttcctttttgtttgttttccttctcctctcctgcattttcctccatctccaggtacagttcggggtgtggatgcctcttcctccacaagggcacagtgttgtggagggctaagttggttctgtgactcattcctcataccctaactccatctcctttctttaaagtcaaatctcacctacctgtttgggtcagagagatgtgttttaaaagcccccaaggaaggaggctgggactgtgccctgacatgattcttggtgatggaataggtttgtgctctgattctagtttaagagaacgttgctgtatctcagtccaggagaggcagcccatcttggccctggatgaagaaggaaacccacagaggcccagggcttgtcattgggctgccagtgtctgccaagccagcattgagctaatcctgtgggaggatgagagctactgggccgttgtatgataggttggtaggggcttgttgatctgtcaaattccaggtgacaagatctatgcaccccatgcgtccttgaggggcctcttccccgcaggctctggctggccgcaggctggttctggtgtgaaaggttatactgccttttctttgtttgtttgtttttttctctaaaaacaaacagcaaaagacagctgaaaacaagaacttcaccggtgggcaggcaagaattctcttctggaaaatgacgtttgtggctctttcccaagttggccttcaaagagcctgcctgctgttgagccagaagatgtctcgtgtgaaggctggggtggcggctgtcttggaacctctgtgagcaggaggccctaagccgcagcagtggatagaggtgcagctctctgcctctctgccctttggtctgtgttcacaggtgacccgtgtcagcctgcatcgcaagcacacaccctgcgggccttcaagtctcactgttccgtatgaggaaacagacagcggactgaggaagcgatggccccagagaaagggcccctgtagcctggctctcacacagtattttatctttgattctgaataaatattttttgtggggttttttttttttttttggtggcagttgtttgttttaaactgaccacttggaagaaacaccttggttatctgtggttttcatgccttgtccctgcctctacccccaccccttttgagtcgggtgactcatttttctgtgtagagactcggtggcccaggcaggaggtgaaagcagccatccggaaggccctggggacccttgtgcctgttgctcgccttcaggtcaccagctgagctgcgataggaaaatctgaatggaggcagcaaacagccaaaacaaacattccccacccggccctgtgcatatgaagtctttcttcccccaactcttgaacgatgatgatattcagacgaagcattgatgttatggaagaaagaaagaaacaaacaaaatatatatatatatgtccaaaaacagacaaatccaagggtgtgaggtaaacgagtgtctgcatttagattccacaaaaccaaaatccatgttgaacaaagttaagtccgtacacagtgactttttgggtgagccgtgtgtgtctgtctgttgtgtgtgtgcctcaagccctgttttcctgtgaagatactttgagtggcagccattctctccacgtgaaccacacgtctggagcacagacaggcctctcaaggtcattgatcttacgcatttactgtttaccgaacaaatgtctgactgtgtactcgggtgtactccgcagcattgtcgactgcagtcccctgtgtttgccagagatactgtgctcgaagtagaggttttactctactcatcactgcgatttgcacattgctccgtggacactcggaggcctgcgttctgttccctataaatggaagcgtgctctgagcctgtctgcctccctcggctgctgctggtcctcagtaccagcgcccgggggtgtccacaaccacttgggacagaagaaggtggaatttcagacagaagcttgactgggtcttcaatgacaggcttggactagctgtggcccagacatcggccctgcccagaattgccaggaggaggctttgcaggctctagaggagccgcagggcctgcctgcctctggtgagtccaacaggcacaagcaagctggcgtgtggccagaggtagccggagtgtgtcacagcccctcagatgcctttccttccacctttttttattttttaagaatcccaaataactcactgaagtgtctcaaaggcgaacaagttttaccaaaatgaatcctttttcagttaacagatcaaatggatgagttctgagcctctcaagttcctttccccagttagagtggggaactgggcaagtgttaactgtgggactcactgcagcgtcctatcctaaaggcacgagaagacggaaatgcaacctgcggagctgggcttggttcccaggtcacagtttggcccccgctacaggatgctgccctgctcagagagagatttaatagggagctgaaggaatcgttagggggccagggagatgtgactgaggctggctttccacgtgaatgagacggggtcggtggagggtttggtgctacagccagtcagaagatttgcaaatgcgaacacattcctgtgtgaggcacgttaccctttgtcagttattgtgaatatgtgtattttaagcaataagattcagctggtcagacttttctgggcagtctcagtgacgcatttcctgtgctgtgattgttctgaagacagagtggctctaaccactgtgagaagccc

SEQ ID NO: 37815 - DNA, 1092 bp, Artificial Sequence
  derived and/or modified sequence
atggagagaagaagactgctgggcggcatggccctgctgctgctgcaggccctgcccagccccctgagcgccagagccgagcccccccaggacaaggaggcctgcgtgggcaccaacaaccagagctacatctgcgacaccggccactgctgcggccagagccagtgctgcaactactactacgagctgtggtggttctggctggtgtggaccatcatcatcatcctgagctgctgctgcgtgtgccaccacagaagagccaagcacagactgcaggcccagcagagacagcacgagatcaacctgatcgcctacagagaggcccacaactacagcgccctgcccttctacttcagattcctgcccaactacctgctgcccccctacgaggaggtggtgaacagaccccccacccccccccccccctacagcgccttccagctgcagcagcagcagctgctgcccccccagtgcggccccgccggcggcagcccccccggcatcgaccccaccagaggcagccagggcgcccagagcagccccctgagcgagcccagcagaagcagcaccagaccccccagcatcgccgaccccgaccccagcgacctgcccgtggacagagccgccaccaaggcccccggcatggagcccagcggcagcgtggccggcctgggcgagctggaccccggcgccttcctggacaaggacgccgagtgcagagaggagctgctgaaggacgacagcagcgagcacggcgcccccgacagcaaggagaagacccccggcagacacagaagattcaccggcgacagcggcatcgaggtgtgcgtgtgcaacagaggccaccacgacgacgacctgaaggagttcaacaccctgatcgacgacgccctggacggccccctggacttctgcgacagctgccacgtgagaccccccggcgacgaggaggagggcctgtgccagagcagcgaggagcaggccagagagcccggccacccccacctgcccagaccccccgcctgcctgctgctgaacaccatcaacgagcaggacagccccaacagccagagcagcagcagccccagctag

SEQ ID NO: 37816 - protein, 308 aa, Artificial Sequence
  derived and/or modified sequence
MNPIVVVHGGGAGPISKDRKERVHQGMVRAATVGYGILREGGSAVDAVEGAVVALEDDPEFNAGCGSVLNTNGEVEMDASIMDGKDLSAGAVSAVQCIANPIKLARLVMEKTPHCFLTDQGAAQFAAAMGVPEIPGEKLVTERNKKRLEKEKHEKGAQKTDCQKNLGTVGAVALDCKGNVAYATSTGGIVNKMVGRVGDSPCLGAGGYADNDIGAVSTTGHGESILKVNLARLTLFHIEQGKTVEEAADLSLGYMKSRVKGLGGLIVVSKTGDWVAKWTSTSMPWAAAKDGKLHFGIDPDDTTITDLP

SEQ ID NO: 37817 - protein, 121 aa, Artificial Sequence
  derived and/or modified sequence
MGVPEIPGEKLVTERNKKRLEKEKHEKGAQKTDCQKNLGTVGAVALDCKGNVAYATSTGGIVNKMVGRVGDSPCLGRTKGCLLPLPLFSRPQAFLTLYSLPLSVSCCVPFLLLVQLQDVWE

SEQ ID NO: 37818 - DNA, 927 bp, Artificial Sequence
  derived and/or modified sequence
atgaatcccattgttgtagtccacgggggtggggctggcccaatcagcaaggacaggaaggagcgggtgcaccaggggatggtccgggctgccacagttggatacggaatactgcgcgagggtggatcagctgtcgatgctgtcgaaggcgcagtggtcgcccttgaagatgatcctgaatttaacgctggctgcgggagcgtgctgaacaccaatggggaggttgagatggatgcttctataatggatggaaaggatctgagcgcaggtgcggtcagtgcagttcagtgtatcgccaacccaattaagctcgctagactcgtgatggaaaaaaccccacactgcttccttacagaccaaggagcagcccagttcgccgcagctatgggggtgcccgagatcccaggtgagaaactagttactgaacgaaataagaaacggttagagaaggaaaagcacgagaagggagcacaaaaaacagattgccagaaaaacctcgggacagtcggggccgtcgccttggattgtaagggcaacgtggcatatgccacctccaccggcggtattgtgaataagatggtgggaagggtgggcgactccccttgtctgggagccgggggctacgccgacaacgatatcggtgctgtttcaactactgggcatggggagagcatcttgaaagttaacctcgccaggctcactctttttcatatcgagcagggcaaaactgtggaggaggccgccgatctgagtttgggctacatgaagagccgcgtgaaaggtttgggaggcctcatcgtagtgtcaaaaactggagactgggtcgctaaatggacatccacctcaatgccctgggctgcggctaaggatgggaaacttcacttcggcattgaccctgatgatacaaccatcaccgacctcccttag

SEQ ID NO: 37819 - DNA, 927 bp, Artificial Sequence
  derived and/or modified sequence
atgaatccaatcgtagttgtacatggcggaggggcgggtcccatctcaaaggatcggaaggagagagttcatcaaggcatggtcagggcagcgacagttggatatggaattctgagagagggggggagcgcggtcgacgctgtggaaggcgcagtggttgcactcgaggacgaccccgaatttaacgctggatgcggttctgtgttaaacactaacggggaagtagaaatggacgctagcataatggatggcaaggatctctctgcaggagcggtgtctgccgtgcagtgtattgctaacccaattaagttggccaggctcgtgatggagaagacccctcactgctttttgacggaccagggggctgcgcagttcgccgcagccatgggtgttcccgagatacctggagaaaagctggtgacagagcggaacaagaagcggcttgagaaagaaaaacatgagaaaggcgcgcaaaaaaccgactgccagaagaatctggggacagtaggcgcagtagccctagactgcaaggggaatgtggcatatgcaacatcaaccggtgggatcgtcaacaaaatggtggggcgggtcggcgactcgccttgcctgggtgctggcggatacgcagataatgatatcggcgctgtgtccacaacgggtcacggcgagagtatacttaaggtgaatctcgctagactgacccttttccacatagagcaaggcaagacagtggaggaagccgccgacctgtcccttgggtatatgaagtctagagtgaaagggctaggaggactgattgtggtgtccaagaccggggactgggtggcgaagtggacatcaacctcaatgccatgggctgccgccaaggatggcaagctgcattttgggatcgatccagacgacacaaccattaccgatctgccttag

SEQ ID NO: 37820 - DNA, 927 bp, Artificial Sequence
  derived and/or modified sequence
atgaaccccatcgtggtggtgcacggcggcggggccggccccatcagcaaggacaggaaggagcgggtgcaccagggcatggtgcgggccgccaccgtgggctacggcatcctgcgggagggcggcagcgctgtggatgctgtggagggcgctgtggtggccctggaggatgatcctgagttcaatgccggctgcggctctgtgctgaacaccaacggggaggtggagatggatgccagcatcatggatggcaaggacctgtctgctggagctgtgtctgctgtgcagtgcatcgccaaccccatcaagctggcccggctggtgatggagaagaccccccactgcttcctgacagaccagggcgccgcccagtttgctgctgccatgggcgtgcctgagatccctggagagaagctggtgacagaaagaaacaagaagaggctggagaaggagaagcatgagaagggggcccagaagacagactgccagaagaacctgggcaccgtgggcgctgtggccctggactgcaagggaaatgtggcctatgccaccagcactggaggcatcgtgaacaagatggtgggccgggtgggggacagcccctgcctgggcgccggcggctatgctgacaatgacattggagctgtgtccaccactggacatggagagagcatcctgaaggtgaacctggcccggctgaccctcttccacatcgagcagggcaagacagtggaggaggccgctgacctgagcctgggctacatgaagagccgggtgaagggcctgggcggcctcatcgtggtgtccaagacaggagactgggtggccaagtggaccagcacctccatgccctgggccgccgccaaggatggcaagctgcactttggaattgatcctgatgacaccaccatcacagacctgccctag

SEQ ID NO: 37821 - DNA, 927 bp, Artificial Sequence
  derived and/or modified sequence
atgaaccccatcgtggtggtgcacggcggcggcgccggccccatctcgaaagacaggaaagaacgtgtgcaccaaggaatggtgcgggctgctacagttggctatggtattctcagggaaggggggtcagctgtggacgccgtagagggcgcagtggtggccctcgaggacgaccccgagttcaatgctggatgtggctccgtgcttaacacgaacggcgaggtagagatggatgcatcaatcatggacgggaaggatctctcagctggtgcagtcagcgcagtgcagtgtattgcaaatcccatcaaattggctagactcgtcatggagaaaacaccacattgttttctaacggatcagggcgccgcgcagtttgcagcagctatgggtgttcctgagattccgggcgagaagcttgtgacagaacgaaataagaaaagattggagaaagagaaacacgaaaagggcgcgcagaagacagactgccagaagaatctggggacagttggcgcagtagccctggactgcaagggaaacgtggcctatgcgacgtcaacaggcgggatcgtgaacaagatggtcggccgcgtgggggatagtccttgcctgggcgccggaggttacgctgacaatgatattggtgccgtgtctacaaccggccacggagagtcaatcctcaaagtgaacctagccagacttaccctgttccacatagagcaagggaagaccgtggaggaggcggctgacctgtcactggggtacatgaagagtcgggtcaaaggcctgggaggcctgattgtggtgtctaagaccggagactgggtcgccaagtggaccagcacaagcatgccctgggctgccgctaaggatggtaaactgcacttcggaatagatcccgatgacaccacaattacagaccttccctag

SEQ ID NO: 37822 - DNA, 927 bp, Artificial Sequence
  derived and/or modified sequence
atgaaccccatcgtggtggtgcacggcggcggcgccggccccatcagcaaggatcggaaggagcgtgtgcatcagggtatggtgcgggcagccacagtcggctacgggattctgagggagggtggcagcgcggtggatgctgtcgagggtgcggtggtcgccctcgaagatgaccctgagttcaatgccggttgcgggagtgtccttaatacaaacggtgaagtcgagatggatgcttctataatggatggcaaagacctatccgcaggggccgtgagtgccgtacaatgcattgctaacccaataaagctcgccaggctcgttatggagaagacccctcattgttttctcaccgaccagggcgcagcccagttcgccgccgcaatgggagtgcccgagattcccggcgagaagctggtaactgagaggaataaaaaacgcctcgaaaaagagaagcacgagaagggtgcccagaaaaccgactgccagaaaaatttaggcaccgtgggagcggtagccctcgactgtaaaggcaacgtcgcctatgcgacaagcactgggggaatagtgaataaaatggttggacgtgtgggagattccccatgtctaggcgccgggggctatgccgacaacgatataggggcagtgtcaacaactggccacggcgagtccatactcaaagtgaatctcgctcggctaacccttttccacattgagcagggcaaaacagtggaagaggctgccgacctttcacttggatacatgaagagtcgggtgaaggggcttggcgggctgatcgtggtatccaagactggagactgggtggctaagtggacttccacctctatgccatgggccgccgccaaagatggaaagcttcattttggcattgaccccgatgacaccaccatcactgatttaccctag

SEQ ID NO: 37823 - DNA, 2268 bp, Artificial Sequence
  derived and/or modified sequence
gttgtgaccagagcggttgcgggctgagcggtttcgagccggcgtcggggagcggcggtaccgggcggctgcggggctggctcgacccagcttgaggtctcggcgtccgcgtcctgcggtgccctggggtctcccgaggaccttgtacccgcgcggcttccttgggctggctttggacgacgctttcgccttcctgctgcctaggatccgccgacatgaatcccatcgtagtggtccacggcggcggagccggtcccatctccaaggatcggaaggagcgagtgcaccagggcatggtcagagccgccaccgtgggctacggcatcctccgggagggcgggagcgccgtggatgccgtagagggagctgtcgtcgccctggaagacgatcccgagttcaacgcaggttgtgggtctgtcttgaacacaaatggtgaggttgaaatggatgctagtatcatggatggaaaagacctgtctgcaggagcagtgtccgcagtccagtgtatagcaaatcccattaaacttgctcggcttgtcatggaaaagacacctcattgctttctgactgaccaaggcgcagcgcagtttgcagcagctatgggggttccagagattcctggagaaaaactggtgacagagagaaacaaaaagcgcctggaaaaagagaagcatgaaaaaggtgctcagaaaacagattgtcaaaaaaacttgggaaccgtgggtgctgttgccttggactgcaaagggaatgtagcctacgcaacctccacaggcggtatcgttaataaaatggtcggccgcgttggggactcaccgtgtctaggagctggaggttatgccgacaatgacatcggagccgtctcaaccacagggcatggggaaagcatcctgaaggtgaacctggctagactcaccctgttccacatagaacaaggaaagacggtagaagaggctgcggacctatcgttgggttatatgaagtcaagggttaaaggtttaggtggcctcatcgtggttagcaaaacaggagactgggtggcaaagtggacctccacctccatgccctgggcagccgccaaggacggcaagctgcacttcggaattgatcctgacgatactactatcaccgaccttccctaagccgctggaagattgtattccagatgctagcttagaggtcaagtacagtctcctcatgagacatagcctaatcaattagatctagaattggaaaaattgtcccgtctgtcacttgttttgttgccttaataagcatctgaatgtttggttgtggggcgggttctgaagcgatgagagaaatgcccgtattaggaggattacttgagcccaggaggtcaaagctgaggtgagccatgattactccactgcactccagcctgggcaacagagccaggccctgtatcaaaaaaaaaaaaaaaaagaaaagggaaaaaagaaagaaagcagcagcatgatcctgacatgacagatgtgggagacccacagcctgcagacactgtgggctggaaggtgggaagggaggggccggtggaggtggagctgtttgaaagtgacacagcagcagtagaagcagtggtgggcgaagcccaggtgaccctcagaacgttgcacaagaacatcagggaaaagaaccagaatcctttaaggaaaatgttcttcatgtatgagagactaaagtgatttttctaagaaagttcagcccttctctgacttacctggacatttctagatacttccaaaggaccctctgggaatccatagcttcctaatctggagatgggaggtcataagggagacgctgtggggttccttgaagtttcttgggttcacagaggagccccctcacttggtgttctcccgtgagccagcctccacctgccaaagacactctggtcctcgtatagtgagtaatggggctcagggcctctccaacaacagagaggagctgatgctgtagggctgaccccgtgacttcctgagtcctcaccctgtccagtgctttgagattcttcccacctccccatcctcaccagccggatcgggcgctgtgcagtgtggtcagcatggtgaagaaagtcatttcctcggtgggcagtattcctctttatctctcattacactggaaatgttatttctgctgtatcatccgtgctcaacgttttagtctgtcaggctcaccttctctctggaaagaatttgcttaacttgacattccatgtgccgctaataaaatatattttgaaag

SEQ ID NO: 37824 - DNA, 927 bp, Artificial Sequence
  derived and/or modified sequence
atgaacccaatagtggtggtgcatggcggaggggcaggacccatctctaaggatcgcaaagaacgagtccaccagggcatggtccgcgcagccacagttggctacgggattcttcgggagggcggatctgccgtagatgccgtggagggcgcagtagtggcactcgaagatgatcctgagttcaatgcagggtgtgggtccgttctgaacacaaacggcgaggtagagatggatgcatccattatggacggcaaagacctgagtgctggcgcagtcagtgctgtgcagtgcatagcaaacccaattaaactcgccagactagtgatggaaaagaccccacactgtttcctgactgatcaaggggcagcccagttcgctgccgcaatgggcgtgcctgagatcccaggggagaagctcgtcacagagcggaacaaaaagagactcgagaaggagaaacacgagaagggcgctcagaaaacggattgtcaaaagaacctaggaaccgtgggggctgtcgccctggattgcaaaggcaatgtggcctacgccacaagcaccggagggattgtcaacaagatggtcggcagggtgggagacagtccctgcttgggcgctggcggatatgcggacaacgatatcggggcagtgtcaaccaccggtcatggagaatccattctgaaagtcaatttagcacgcctgactttgtttcatattgaacaaggaaaaacagtagaggaggccgcagacctgagtctggggtacatgaagtctagagtgaaaggactgggaggcttaatagttgtgtcaaaaaccggggactgggtggccaaatggacaagtacttcgatgccatgggcagctgctaaggacgggaagctccacttcggaattgacccagacgatactacaatcaccgatctgccatag

SEQ ID NO: 37825 - DNA, 927 bp, Artificial Sequence
  derived and/or modified sequence
atgaatcccatagtagtcgtccatggcggaggagctggccctatctcaaaggaccgcaaggaaagagtccaccagggtatggtgagggccgctacagtgggctatgggatcctccgtgaaggaggctcagcagtcgacgccgttgaaggggcagtagtcgctcttgaggatgatcctgaatttaacgcaggctgtggttcagtcttgaacacaaacggcgaagtggaaatggacgcgtctattatggacggtaaggacctgtccgctggggctgtgtcagctgtgcagtgtatcgcaaaccctattaagctggccagactggtcatggaaaaaacaccacactgttttctgactgatcaaggcgcagcccagttcgcagcggcaatgggtgtgcccgagatcccaggggagaaactcgtaaccgaaagaaataagaagcgcctggaaaaagagaagcatgaaaaaggcgctcaaaaaaccgactgccaaaaaaacctgggtaccgtaggcgctgttgccctggattgcaaaggaaatgtggcgtatgctacttccaccggaggaatcgtgaataagatggttggcagagttggagacagtccgtgcctgggcgctggcggttatgctgacaacgacattggagctgtcagcaccaccgggcacggagagtccatactgaaagtcaacctggcccgtcttactctgttccatatcgagcagggcaagacagttgaggaggcggcagacctgtccctgggttacatgaaatccagggtgaaaggtttggggggtctcatcgttgtgtctaaaaccggcgactgggtggccaaatggacaagcactagcatgccatgggctgcagccaaagacggaaaactgcatttcggcattgatccggatgacacaaccataactgacctgccttag

SEQ ID NO: 37826 - DNA, 2182 bp, Artificial Sequence
  derived and/or modified sequence
gaccagagcggttgcgggctgagcggtttcgagccggcgtcggggagcggcggtaccgggcggctgcggggctggctcgacccagcttgaggtctcggcgtccgcgtcctgcggtgccctgggatccgccgacatgaatcccatcgtagtggtccacggcggcggagccggtcccatctccaaggatcggaaggagcgagtgcaccagggcatggtcagagccgccaccgtgggctacggcatcctccgggagggcgggagcgccgtggatgccgtagagggagctgtcgtcgccctggaagacgatcccgagttcaacgcaggttgtgggtctgtcttgaacacaaatggtgaggttgaaatggatgctagtatcatggatggaaaagacctgtctgcaggagcagtgtccgcagtccagtgtatagcaaatcccattaaacttgctcggcttgtcatggaaaagacacctcattgctttctgactgaccaaggcgcagcgcagtttgcagcagctatgggggttccagagattcctggagaaaaactggtgacagagagaaacaaaaagcgcctggaaaaagagaagcatgaaaaaggtgctcagaaaacagattgtcaaaaaaacttgggaaccgtgggtgctgttgccttggactgcaaagggaatgtagcctacgcaacctccacaggcggtatcgttaataaaatggtcggccgcgttggggactcaccgtgtctaggagctggaggttatgccgacaatgacatcggagccgtctcaaccacagggcatggggaaagcatcctgaaggtgaacctggctagactcaccctgttccacatagaacaaggaaagacggtagaagaggctgcggacctatcgttgggttatatgaagtcaagggttaaaggtttaggtggcctcatcgtggttagcaaaacaggagactgggtggcaaagtggacctccacctccatgccctgggcagccgccaaggacggcaagctgcacttcggaattgatcctgacgatactactatcaccgaccttccctaagccgctggaagattgtattccagatgctagcttagaggtcaagtacagtctcctcatgagacatagcctaatcaattagatctagaattggaaaaattgtcccgtctgtcacttgttttgttgccttaataagcatctgaatgtttggttgtggggcgggttctgaagcgatgagagaaatgcccgtattaggaggattacttgagcccaggaggtcaaagctgaggtgagccatgattactccactgcactccagcctgggcaacagagccaggccctgtatcaaaaaaaaaaaaaaaaagaaaagggaaaaaagaaagaaagcagcagcatgatcctgacatgacagatgtgggagacccacagcctgcagacactgtgggctggaaggtgggaagggaggggccggtggaggtggagctgtttgaaagtgacacagcagcagtagaagcagtggtgggcgaagcccaggtgaccctcagaacgttgcacaagaacatcagggaaaagaaccagaatcctttaaggaaaatgttcttcatgtatgagagactaaagtgatttttctaagaaagttcagcccttctctgacttacctggacatttctagatacttccaaaggaccctctgggaatccatagcttcctaatctggagatgggaggtcataagggagacgctgtggggttccttgaagtttcttgggttcacagaggagccccctcacttggtgttctcccgtgagccagcctccacctgccaaagacactctggtcctcgtatagtgagtaatggggctcagggcctctccaacaacagagaggagctgatgctgtagggctgaccccgtgacttcctgagtcctcaccctgtccagtgctttgagattcttcccacctccccatcctcaccagccggatcgggcgctgtgcagtgtggtcagcatggtgaagaaagtcatttcctcggtgggcagtattcctctttatctctcattacactggaaatgttatttctgctgtatcatccgtgctcaacgttttagtctgtcaggctcaccttctctctggaaagaatttgcttaacttgacattccatgtgccgctaataaaatatattttg

SEQ ID NO: 37827 - DNA, 927 bp, Artificial Sequence
  derived and/or modified sequence
atgaaccccatcgtggtggtgcacggcggcggcgccggccccatcagcaaggacagaaaggagagagtgcaccagggcatggtgagagccgccaccgtgggctacggcatcctgagagagggcggcagcgccgtggacgccgtggagggcgccgtggtggccctggaggacgaccccgagttcaacgccggctgcggcagcgtgctgaacaccaacggcgaggtggagatggacgccagcatcatggacggcaaggacctgagcgccggcgccgtgagcgccgtgcagtgcatcgccaaccccatcaagctggccagactggtgatggagaagaccccccactgcttcctgaccgaccagggcgccgcccagttcgccgccgccatgggcgtgcccgagatccccggcgagaagctggtgaccgagagaaacaagaagagactggagaaggagaagcacgagaagggcgcccagaagaccgactgccagaagaacctgggcaccgtgggcgccgtggccctggactgcaagggcaacgtggcctacgccaccagcaccggcggcatcgtgaacaagatggtgggcagagtgggcgacagcccctgcctgggcgccggcggctacgccgacaacgacatcggcgccgtgagcaccaccggccacggcgagagcatcctgaaggtgaacctggccagactgaccctgttccacatcgagcagggcaagaccgtggaggaggccgccgacctgagcctgggctacatgaagagcagagtgaagggcctgggcggcctgatcgtggtgagcaagaccggcgactgggtggccaagtggaccagcaccagcatgccctgggccgccgccaaggacggcaagctgcacttcggcatcgaccccgacgacaccaccatcaccgacctgccctag

SEQ ID NO: 37828 - protein, 432 aa, Artificial Sequence
  derived and/or modified sequence
MLQDPDSDQPLNSLDVKPLRKPRIPMETFRKVGIPIIIALLSLASIIIVVVLIKVILDKYYFLCGQPLHFIPRKQLCDGELDCPLGEDEEHCVKSFPEGPAVAVRLSKDRSTLQVLDSATGNWFSACFDNFTEALAETACRQMGYSRAVEIGPDQDLDVVEITENSQELRMRNSSGPCLSGSLVSLHCLACGKSLKTPRVVGVEEASVDSWPWQVSIQYDKQHVCGGSILDPHWVLTAAHCFRKHTDVFNWKVRAGSDKLGSFPSLAVAKIIIIEFNPMYPKDNDIALMKLQFPLTFSGTVRPICLPFFDEELTPATPLWIIGWGFTKQNGGKMSDILLQASVQVIDSTRCNADDAYQGEVTEKMMCAGIPEGGVDTCQGDSGGPLMYQSDQWHVVGIVSWGYGCGGPSTPGVYTKVSAYLNWIYNVWKAEL

SEQ ID NO: 37829 - DNA, 1299 bp, Artificial Sequence
  derived and/or modified sequence
atgctgcaggaccccgacagcgaccagcccctgaacagcctggacgtgaagcccctgagaaagcccagaatccccatggagaccttcagaaaggtgggcatccccatcatcatcgccctgctgagcctggccagcatcatcatcgtggtggtgctgatcaaggtgatcctggacaagtactacttcctgtgcggccagcccctgcacttcatccccagaaagcagctgtgcgacggcgagctggactgccccctgggcgaggacgaggagcactgcgtgaagagcttccccgagggccccgccgtggccgtgagactgagcaaggacagaagcaccctgcaggtgctggacagcgccaccggcaactggttcagcgcctgcttcgacaacttcaccgaggccctggccgagaccgcctgcagacagatgggctacagcagagccgtggagatcggccccgaccaggacctggacgtggtggagatcaccgagaacagccaggagctgagaatgagaaacagcagcggcccctgcctgagcggcagcctggtgagcctgcactgcctggcctgcggcaagagcctgaagacccccagagtggtgggcgtggaggaggccagcgtggacagctggccctggcaggtgagcatccagtacgacaagcagcacgtgtgcggcggcagcatcctggacccccactgggtgctgaccgccgcccactgcttcagaaagcacaccgacgtgttcaactggaaggtgagagccggcagcgacaagctgggcagcttccccagcctggccgtggccaagatcatcatcatcgagttcaaccccatgtaccccaaggacaacgacatcgccctgatgaagctgcagttccccctgaccttcagcggcaccgtgagacccatctgcctgcccttcttcgacgaggagctgacccccgccacccccctgtggatcatcggctggggcttcaccaagcagaacggcggcaagatgagcgacatcctgctgcaggccagcgtgcaggtgatcgacagcaccagatgcaacgccgacgacgcctaccagggcgaggtgaccgagaagatgatgtgcgccggcatccccgagggcggcgtggacacctgccagggcgacagcggcggccccctgatgtaccagagcgaccagtggcacgtggtgggcatcgtgagctggggctacggctgcggcggccccagcacccccggcgtgtacaccaaggtgagcgcctacctgaactggatctacaacgtgtggaaggccgagctgtag

SEQ ID NO: 37830 - DNA, 1299 bp, Artificial Sequence
  derived and/or modified sequence
atgctgcaggacccagattctgaccagccactgaatagcctcgatgtgaagccccttagaaaaccacggatcccaatggagacattcagaaaggttggaatacccattataattgcactgctcagcctggccagtattatcatagtcgtggttttgattaaagttattctggataagtactatttcctgtgcggacagccccttcacttcatccctcgcaaacagctttgcgatggtgagctggactgccctttgggcgaggacgaagaacattgcgtgaaaagcttcccagaaggacctgccgttgctgtcagactatccaaggatcgctccacactccaagtcttggattccgcaactggcaactggttcagtgcatgcttcgacaactttaccgaagccttagccgagaccgcctgtcgccagatgggctactcccgggctgtcgagatagggcccgatcaggacctagacgtcgtggaaattactgagaacagccaggagctgcgcatgcggaattcgagtggcccttgtctctcaggatctctcgtgagtctgcactgcctggcatgcggcaagtccctaaagacacccagggtggtcggagtggaagaagcctccgtagactcctggccatggcaggtctctattcaatatgacaaacagcacgtctgcgggggatcaatcttggatccacattgggtgctgaccgccgctcactgcttcaggaagcatactgacgtattcaattggaaggtccgagccggaagtgacaaactcgggagtttccccagtctggctgtagcaaaaattatcatcattgagtttaacccaatgtaccctaaagacaatgacatcgctttgatgaagttgcagttcccactcactttttccggaacagtgcgaccaatttgcctgcctttctttgatgaagaactgacgccagcaacgccgctctggatcatcggatggggattcacaaagcagaacggcggtaaaatgtctgacattctgctacaggcttccgttcaggtgatagattctactcgctgcaacgcggacgatgcttaccagggggaagtcacggagaagatgatgtgtgctggaatcccagaagggggggtcgacacctgccagggcgactcggggggccccttaatgtaccagtctgaccagtggcatgtcgtgggtatcgtgtcatgggggtacgggtgcggaggacccagcactcctggcgtgtatacaaaggtgtcggcatatttgaattggatctacaacgtgtggaaggccgagctttag

SEQ ID NO: 37831 - DNA, 1299 bp, Artificial Sequence
  derived and/or modified sequence
atgctgcaggaccctgacagcgaccagcccctgaacagcctggatgtgaagcccctgaggaagccccgcatccccatggagaccttcaggaaggtgggcatccccatcatcatcgccctgctgagcctggccagcatcatcatcgtggtggtgctgatcaaggtgatcctggacaagtactacttcctgtgtggccagcccctgcacttcatccccaggaagcagctgtgtgatggagagctggactgccccctgggagaagatgaggagcactgtgtgaagagcttccctgagggccctgctgtggccgtgcggctgagcaaggacaggagcaccctgcaggtgctggacagcgccaccggcaactggttcagcgcctgctttgacaacttcacagaggccctggccgagacagcctgccggcagatgggctacagcagagctgtggagattggaccagaccaggacctggatgtggtggagatcacagagaacagccaggagctgaggatgaggaacagcagcggcccctgcctgagcggcagcctggtgtccctgcactgcctggcctgtgggaagagcctgaagaccccccgggtggtgggcgtggaggaggcctctgtggacagctggccctggcaggtgtccatccagtatgacaagcagcacgtgtgtggcggcagcatcctggacccccactgggtgctgacagctgcccactgcttcaggaagcacacagatgtgttcaactggaaggtgcgggccggcagtgacaagctgggcagcttccccagcctggccgtggccaagatcatcatcatcgagttcaaccccatgtaccccaaggacaatgacatcgccctgatgaagctgcagttccccctgaccttcagcggcaccgtgcggcccatctgcctgcccttctttgatgaggagctgaccccagccacccccctgtggatcatcggctggggcttcaccaagcagaatggaggcaagatgtctgacatcctgctgcaggcctctgtgcaggtgattgacagcacccgctgcaatgctgatgatgcctaccagggcgaggtgacagagaagatgatgtgtgccggcatccctgagggcggcgtggacacctgccagggcgacagcggcggccccctgatgtaccagagcgaccagtggcacgtggtgggcatcgtgtcctggggctacggctgcggcggccccagcaccccaggagtgtacaccaaggtgtctgcctacctgaactggatctacaacgtgtggaaggccgagctgtag

SEQ ID NO: 37832 - DNA, 1299 bp, Artificial Sequence
  derived and/or modified sequence
atgctgcaggaccccgacagcgaccagcccctgaacagcctggacgtgaagcctttgcgcaagccaaggatcccgatggaaaccttcagaaaggttgggatcccgattattatcgccctgctctctctggcttctatcattattgttgtagtgttgattaaggtgattctcgataagtactatttcctgtgtggtcagcccctacacttcatccccagaaagcagttatgcgacggcgagttagattgccccctaggcgaggacgaggagcattgtgtgaaatcgttcccggagggccctgctgtggcggtccgtctgtctaaggaccgtagtacattgcaggtcctcgacagtgccaccggcaattggttttcagcttgctttgacaacttcaccgaggccctggccgaaacagcctgccggcagatgggttactccagggcagttgaaataggccctgaccaagacctcgacgttgtggagatcacagagaattcacaggagctcagaatgcgtaattcatctggaccttgcttgtccggcagcctggtgtcgctacactgtctggcctgcggcaagagcttaaagacaccacgggttgtgggcgtcgaggaggccagcgttgactcctggccttggcaggtctcgatacagtacgacaaacagcatgtgtgtggcggctctattctggaccctcactgggtactgaccgcagcccactgtttcaggaagcacacggacgtgtttaactggaaggttagagcgggatccgataaacttgggtcatttccatcccttgctgtggccaagatcattattattgagtttaatccgatgtatcccaaagataatgacatcgccttgatgaagttgcagttccctctgacatttagcggaacggtgcgacccatttgcttgccctttttcgacgaagagctcaccccggcaaccccactatggattattggatggggctttacgaagcagaacggtggcaaaatgagtgatatcctgctgcaggccagcgttcaggtgatagacagtactcgctgtaacgctgacgacgcttatcagggggaggtcacagaaaaaatgatgtgcgctggaattccagagggcggagtagacacatgccagggtgactctggcgggcctctcatgtatcagtctgaccagtggcatgtggtgggaattgtgtcctgggggtatggctgcgggggcccctctacacctggcgtctacactaaggtgtccgcatatctgaattggatctacaacgtgtggaaagcggagttgtag

SEQ ID NO: 37833 - DNA, 1299 bp, Artificial Sequence
  derived and/or modified sequence
atgctccaggatccagatagtgaccagccactcaattcccttgacgtcaagcctctgcggaagcccaggatccctatggagactttccggaaagtaggcatccctattattattgccttgctgtcactcgcttcaattatcatcgtggtcgtcttgatcaaagtgatactggacaaatattatttcctctgcggtcaacccctgcactttatccctcgcaaacaactgtgcgatggagagctagactgccctctgggggaggacgaggagcattgtgtcaagtcgtttccagaaggcccagccgtggcggttagactgtccaaagataggagcacactgcaggtgctcgactctgcaacaggcaactggttctccgcctgctttgataatttcaccgaagccttagccgagacagcatgccgtcagatgggttacagccgcgctgttgaaatcgggccagaccaggatctggatgtggtggaaataacggaaaattcccaggaactaaggatgagaaattccagtgggccatgtctaagtggctccctggtgagccttcattgcctggcatgtggcaaatctttaaaaacaccacgggtcgtgggggtggaggaagctagcgtcgactcttggccatggcaggtctccatccagtatgataagcaacacgtgtgtgggggttcaattctggacccccactgggtgctgacagctgcccattgtttcagaaagcacaccgatgtgtttaattggaaagtacgcgctggaagcgataagctgggcagcttccccagtctggctgtggctaaaattattatcatcgagtttaaccctatgtatccgaaagacaacgacattgcgctaatgaaactccagttcccactgacttttagtgggaccgtgcgccctatttgccttccattctttgacgaagagttaaccccggcaacacccctctggattattggatgggggttcaccaaacagaacggagggaaaatgtccgacattttactccaggctagcgtgcaagtgattgactctacacgttgcaacgccgacgatgcctaccaaggggaggtgaccgaaaagatgatgtgtgccggaattccagaagggggagtggatacatgccaaggcgactccggcggtccgcttatgtaccagtcagaccaatggcatgttgtggggatcgtgtcatggggctatgggtgcggcggtccaagcacacccggagtctatacgaaggtgtccgcgtacttaaattggatttacaacgtttggaaggctgagctgtag

SEQ ID NO: 37834 - DNA, 2052 bp, Artificial Sequence
  derived and/or modified sequence
gagagaggcagcagcttgctcagcggacaaggatgctgggcgtgagggaccaaggcctgccctgcactcgggcctcctccagccagtgctgaccagggacttctgacctgctggccagccaggacctgtgtggggaggccctcctgctgccttggggtgacaatctcagctccaggctacagggagaccgggaggatcacagagccagcatgttacaggatcctgacagtgatcaacctctgaacagcctcgatgtcaaacccctgcgcaaaccccgtatccccatggagaccttcagaaaggtggggatccccatcatcatagcactactgagcctggcgagtatcatcattgtggttgtcctcatcaaggtgattctggataaatactacttcctctgcgggcagcctctccacttcatcccgaggaagcagctgtgtgacggagagctggactgtcccttgggggaggacgaggagcactgtgtcaagagcttccccgaagggcctgcagtggcagtccgcctctccaaggaccgatccacactgcaggtgctggactcggccacagggaactggttctctgcctgtttcgacaacttcacagaagctctcgctgagacagcctgtaggcagatgggctacagcagagctgtggagattggcccagaccaggatctggatgttgttgaaatcacagaaaacagccaggagcttcgcatgcggaactcaagtgggccctgtctctcaggctccctggtctccctgcactgtcttgcctgtgggaagagcctgaagaccccccgtgtggtgggtgtggaggaggcctctgtggattcttggccttggcaggtcagcatccagtacgacaaacagcacgtctgtggagggagcatcctggacccccactgggtcctcacggcagcccactgcttcaggaaacataccgatgtgttcaactggaaggtgcgggcaggctcagacaaactgggcagcttcccatccctggctgtggccaagatcatcatcattgaattcaaccccatgtaccccaaagacaatgacatcgccctcatgaagctgcagttcccactcactttctcaggcacagtcaggcccatctgtctgcccttctttgatgaggagctcactccagccaccccactctggatcattggatggggctttacgaagcagaatggagggaagatgtctgacatactgctgcaggcgtcagtccaggtcattgacagcacacggtgcaatgcagacgatgcgtaccagggggaagtcaccgagaagatgatgtgtgcaggcatcccggaagggggtgtggacacctgccagggtgacagtggtgggcccctgatgtaccaatctgaccagtggcatgtggtgggcatcgttagttggggctatggctgcgggggcccgagcaccccaggagtatacaccaaggtctcagcctatctcaactggatctacaatgtctggaaggctgagctgtaatgctgctgcccctttgcagtgctgggagccgcttccttcctgccctgcccacctggggatcccccaaagtcagacacagagcaagagtccccttgggtacacccctctgcccacagcctcagcatttcttggagcagcaaagggcctcaattcctataagagaccctcgcagcccagaggcgcccagaggaagtcagcagccctagctcggccacacttggtgctcccagcatcccagggagagacacagcccactgaacaaggtctcaggggtattgctaagccaagaaggaactttcccacactactgaatggaagcaggctgtcttgtaaaagcccagatcactgtgggctggagaggagaaggaaagggtctgcgccagccctgtccgtcttcacccatccccaagcctactagagcaagaaaccagttgtaatataaaatgcactgccctactgttggtatgactaccgttacctactgttgtcattgttattacagctatggccactattattaaagagctgtgtaacatctctggca

SEQ ID NO: 37835 - protein, 1953 aa, Artificial Sequence
  derived and/or modified sequence
MGVKKKKEMQVAALTICHQDLETLKSFADVEGKNLASLLLHCVQLTDGVSQIHYIKQIVPLLEKADKNGMCDPTIQSCLDILAGIYLSLSLKNPLKKVLASSLNSLPDFFLPEAMHRFTSRLQEELNTTDLYSYRKVTDNISSCMENFNLGRASVNNLLKNVLHFLQKSLIEILEENRKCAGNHIIQTQLMNDLLVGIRVSMMLVQKVQDFQGNLWKTSDSPIWQNMCGLLSIFTKVLSDDDLLQTVQSTSGLAIILFIKTMFHPSEKIPHLISSVLLRSVDCTSVPEWFMSSCRSLCCGDISQSAVLFLCQGTLAMLDWQNGSMGRSGEALLLDTAHVLFTLSSQIKEPTLEMFLSRILASWTNSAIQVLESSSPSLTDSLNGNSSIVGRLLEYVYTHWEHPLDALRHQTKIMFKNLLQMHRLTVEGADFVPDPFFVELTESLLRLEWHIKGKYTCLGCLVECIGVEHILAIDKTIPSQILEVMGDQSLVPYASDLLETMFRNHKSHLKSQTAESSWIDQWHETWVSPLLFILCEGNLDQKSYVIDYYLPKLLSYSPESLQYMVKILQTSIDAKTGQEQSFPSLGSCNSRGALGALMACLRIARAHGHLQSATDTWENLVSDARIKQGLIHQHCQVRIDTLGLLCESNRSTEIVSMEEMQWIQFFITYNLNSQSPGVRQQICSLLKKLFCRIQESSQVLYKLEQSKSKREPENELTKQHPSVSLQQYKNFMSSICNSLFEALFPGSSYSTRFSALTILGSIAEVFHVPEGRIYTVYQLSHDIDVGRFQTLMECFTSTFEDVKILAFDLLMKLSKTAVHFQDSGKLQGLFQAALELSTSTKPYDCVTASYLLNFLIWQDALPSSLSAYLTQQVACDNGDRPAAVVERNTLMVIKCLMENLEEEVSQAENSLLQAAAAFPMYGRVHCITGALQKLSLNSLQLVSEWRPVVEKLLLMSYRLSTVVSPVIQSSSPEGLIPMDTDSESASRLQMILNEIQPRDTNDYFNQAKILKEHDSFDMKDLNASVVNIDTSTEIKGKEVKTCDVTAQMVLVCCWRSMKEVALLLGMLCQLLPMQPVPESSDGLLTVEQVKEIGDYFKQHLLQSRHRGAFELAYTGFVKLTEVLNRCPNVSLQKLPEQWLWSVLEEIKCSDPSSKLCATRRSAGIPFYIQALLASEPKKGRMDLLKITMKELISLAGPTDDIQSTVPQVHALNILRALFRDTRLGENIIPYVADGAKAAILGFTSPVWAVRNSSTLLFSALITRIFGVKRAKDEHSKTNRMTGREFFSRFPELYPFLLKQLETVANTVDSDMGEPNRHPSMFLLLLVLERLYASPMDGTSSALSMGPFVPFIMRCGHSPVYHSREMAARALVPFVMIDHIPNTIRTLLSTLPSCTDQCFRQNHIHGTLLQVFHLLQAYSDSKHGTNSDFQHELTDITVCTKAKLWLAKRQNPCLVTRAVYIDILFLLTCCLNRSAKDNQPVLESLGFWEEVRGIISGSELITGFPWAFKVPGLPQYLQSLTRLAIAAVWAAAAKSGERETNVPISFSQLLESAFPEVRSLTLEALLEKFLAAASGLGEKGVPPLLCNMGEKFLLLAMKENHPECFCKILKILHCMDPGEWLPQTEHCVHLTPKEFLIWTMDIASNERSEIQSVALRLASKVISHHMQTCVENRELIAAELKQWVQLVILSCEDHLPTESRLAVVEVLTSTTPLFLTNPHPILELQDTLALWKCVLTLLQSEEQAVRDAATETVTTAMSQENTCQSTEFAFCQVDASIALALALAVLCDLLQQWDQLAPGLPILLGWLLGESDDLVACVESMHQVEEDYLFEKAEVNFWAETLIFVKYLCKHLFCLLSKSGWRPPSPEMLCHLQRMVSEQCHLLSQFFRELPPAAEFVKTVEFTRLRIQEERTLACLRLLAFLEGKEGEDTLVLSVWDSYAESRQLTLPRTEAAC

SEQ ID NO: 37836 - protein, 1634 aa, Artificial Sequence
  derived and/or modified sequence
MSSCRSLCCGDISQSAVLFLCQGTLAMLDWQNGSMGRSGEALLLDTAHVLFTLSSQIKEPTLEMFLSRILASWTNSAIQVLESSSPSLTDSLNGNSSIVGRLLEYVYTHWEHPLDALRHQTKIMFKNLLQMHRLTVEGADFVPDPFFVELTESLLRLEWHIKGKYTCLGCLVECIGVEHILAIDKTIPSQILEVMGDQSLVPYASDLLETMFRNHKSHLKSQTAESSWIDQWHETWVSPLLFILCEGNLDQKSYVIDYYLPKLLSYSPESLQYMVKILQTSIDAKTGQEQSFPSLGSCNSRGALGALMACLRIARAHGHLQSATDTWENLVSDARIKQGLIHQHCQVRIDTLGLLCESNRSTEIVSMEEMQWIQFFITYNLNSQSPGVRQQICSLLKKLFCRIQESSQVLYKLEQSKSKREPENELTKQHPSVSLQQYKNFMSSICNSLFEALFPGSSYSTRFSALTILGSIAEVFHVPEGRIYTVYQLSHDIDVGRFQTLMECFTSTFEDVKILAFDLLMKLSKTAVHFQDSGKLQGLFQAALELSTSTKPYDCVTASYLLNFLIWQDALPSSLSAYLTQQVACDNGDRPAAVVERNTLMVIKCLMENLEEEVSQAENSLLQAAAAFPMYGRVHCITGALQKLSLNSLQLVSEWRPVVEKLLLMSYRLSTVVSPVIQSSSPEGLIPMDTDSESASRLQMILNEIQPRDTNDYFNQAKILKEHDSFDMKDLNASVVNIDTSTEIKGKEVKTCDVTAQMVLVCCWRSMKEVALLLGMLCQLLPMQPVPESSDGLLTVEQVKEIGDYFKQHLLQSRHRGAFELAYTGFVKLTEVLNRCPNVSLQKLPEQWLWSVLEEIKCSDPSSKLCATRRSAGIPFYIQALLASEPKKGRMDLLKITMKELISLAGPTDDIQSTVPQVHALNILRALFRDTRLGENIIPYVADGAKAAILGFTSPVWASQMTGREFFSRFPELYPFLLKQLETVANTVDSDMGEPNRHPSMFLLLLVLERLYASPMDGTSSALSMGPFVPFIMRCGHSPVYHSREMAARALVPFVMIDHIPNTIRTLLSTLPSCTDQCFRQNHIHGTLLQVFHLLQAYSDSKHGTNSDFQHELTDITVCTKAKLWLAKRQNPCLVTRAVYIDILFLLTCCLNRSAKDNQPVLESLGFWEEVRGIISGSELITGFPWAFKVPGLPQYLQSLTRLAIAAVWAAAAKSGERETNVPISFSQLLESAFPEVRSLTLEALLEKFLAAASGLGEKGVPPLLCNMGEKFLLLAMKENHPECFCKILKILHCMDPGEWLPQTEHCVHLTPKEFLIWTMDIASNERSEIQSVALRLASKVISHHMQTCVENRELIAAELKQWVQLVILSCEDHLPTESRLAVVEVLTSTTPLFLTNPHPILELQDTLALWKCVLTLLQSEEQAVRDAATETVTTAMSQENTCQSTEFAFCQVDASIALALALAVLCDLLQQWDQLAPGLPILLGWLLGESDDLVACVESMHQVEEDYLFEKAEVNFWAETLIFVKYLCKHLFCLLSKSGWRPPSPEMLCHLQRMVSEQCHLLSQFFRELPPAAEFVKTVEFTRLRIQEERTLACLRLLAFLEGKEGEDTLVLSVWDSYAESRQLTLPRTEAAC

SEQ ID NO: 37837 - DNA, 3294 bp, Artificial Sequence
  derived and/or modified sequence
atgagcagctgcagaagcctgtgctgcggcgacatcagccagagcgccgtgctgttcctgtgccagggcaccctggccatgctggactggcagaacggcagcatgggcagaagcggcgaggccctgctgctggacaccgcccacgtgctgttcaccctgagcagccagatcaaggagcccaccctggagatgttcctgagcagaatcctggccagctggaccaacagcgccatccaggtgctggagagcagcagccccagcctgaccgacagcctgaacggcaacagcagcatcgtgggcagactgctggagtacgtgtacacccactgggagcaccccctggacgccctgagacaccagaccaagatcatgttcaagaacctgctgcagatgcacagactgaccgtggagggcgccgacttcgtgcccgaccccttcttcgtggagctgaccgagagcctgctgagactggagtggcacatcaagggcaagtacacctgcctgggctgcctggtggagtgcatcggcgtggagcacatcctggccatcgacaagaccatccccagccagatcctggaggtgatgggcgaccagagcctggtgccctacgccagcgacctgctggagaccatgttcagaaaccacaagagccacctgaagagccagaccgccgagagcagctggatcgaccagtggcacgagacctgggtgagccccctgctgttcatcctgtgcgagggcaacctggaccagaagagctacgtgatcgactactacctgcccaagctgctgagctacagccccgagagcctgcagtacatggtgaagatcctgcagaccagcatcgacgccaagaccggccaggagcagagcttccccagcctgggcagctgcaacagcagaggcgccctgggcgccctgatggcctgcctgagaatcgccagagcccacggccacctgcagagcgccaccgacacctgggagaacctggtgagcgacgccagaatcaagcagggcctgatccaccagcactgccaggtgagaatcgacaccctgggcctgctgtgcgagagcaacagaagcaccgagatcgtgagcatggaggagatgcagtggatccagttcttcatcacctacaacctgaacagccagagccccggcgtgagacagcagatctgcagcctgctgaagaagctgttctgcagaatccaggagagcagccaggtgctgtacaagctggagcagagcaagagcaagagagagcccgagaacgagctgaccaagcagcaccccagcgtgagcctgcagcagtacaagaacttcatgagcagcatctgcaacagcctgttcgaggccctgttccccggcagcagctacagcaccagattcagcgccctgaccatcctgggcagcatcgccgaggtgttccacgtgcccgagggcagaatctacaccgtgtaccagctgagccacgacatcgacgtgggcagattccagaccctgatggagtgcttcaccagcaccttcgaggacgtgaagatcctggccttcgacctgctgatgaagctgagcaagaccgccgtgcacttccaggacagcggcaagctgcagggcctgttccaggccgccctggagctgagcaccagcaccaagccctacgactgcgtgaccgccagctacctgctgaacttcctgatctggcaggacgccctgcccagcagcctgagcgcctacctgacccagcaggtggcctgcgacaacggcgacagacccgccgccgtggtggagagaaacaccctgatggtgatcaagtgcctgatggagaacctggaggaggaggtgagccaggccgagaacagcctgctgcaggccgccgccgccttccccatgtacggcagagtgcactgcatcaccggcgccctgcagaagctgagcctgaacagcctgcagctggtgagcgagtggagacccgtggtggagaagctgctgctgatgagctacagactgagcaccgtggtgagccccgtgatccagagcagcagccccgagggcctgatccccatggacaccgacagcgagagcgccagcagactgcagatgatcctgaacgagatccagcccagagacaccaacgactacttcaaccaggccaagatcctgaaggagcacgacagcttcgacatgaaggacctgaacgccagcgtggtgaacatcgacaccagcaccgagatcaagggcaaggaggtgaagacctgcgacgtgaccgcccagatggtgctggtgtgctgctggagaagcatgaaggaggtggccctgctgctgggcatgctgtgccagctgctgcccatgcagcccgtgcccgagagcagcgacggcctgctgaccgtggagcaggtgaaggagatcggcgactacttcaagcagcacctgctgcagagcagacacagaggcgccttcgagctggcctacaccggcttcgtgaagctgaccgaggtgctgaacagatgccccaacgtgagcctgcagaagctgcccgagcagtggctgtggagcgtgctggaggagatcaagtgcagcgaccccagcagcaagctgtgcgccaccagaagaagcgccggcatccccttctacatccaggccctgctggccagcgagcccaagaagggcagaatggacctgctgaagatcaccatgaaggagctgatcagcctggccggccccaccgacgacatccagagcaccgtgccccaggtgcacgccctgaacatcctgagagccctgttcagagacaccagactgggcgagaacatcatcccctacgtggccgacggcgccaaggccgccatcctgggcttcaccagccccgtgtgggccgtgagaaacagcagcaccctgctgttcagcgccctgatcaccagaatcttcggcgtgaagagagccaaggacgagcacagcaagaccaacagaatgaccggcagagagttcttcagcagattccccgagctgtaccccttcctgctgaagcagctggagaccgtggccaacaccgtggacagcgacatgggcgagcccaacagacaccccagcatgttcctgctgctgctggtgctggagagactgtacgccagccccatggacggcaccagcagcgccctgagcatgggccccttcgtgcccttcatcatgagagtgctgctgtgctgccccggctggagcgccgtggccagaagccagctgaccgccaccagcaccagctgggtgcaggccatcctgctgccccagccccccgagtag

SEQ ID NO: 37838 - DNA, 5862 bp, Artificial Sequence
  derived and/or modified sequence
atgggcgtgaagaagaagaaggagatgcaggtggccgccctgaccatctgccaccaggacctggagaccctgaagagcttcgccgacgtggagggcaagaacctggccagcctgctgctgcactgcgtgcagctgaccgacggcgtgagccagatccactacatcaagcagatcgtgcccctgctggagaaggccgacaagaacggcatgtgcgaccccaccatccagagctgcctggacatcctggccggcatctacctgagcctgagcctgaagaaccccctgaagaaggtgctggccagcagcctgaacagcctgcccgacttcttcctgcccgaggccatgcacagattcaccagcagactgcaggaggagctgaacaccaccgacctgtacagctacagaaaggtgaccgacaacatcagcagctgcatggagaacttcaacctgggcagagccagcgtgaacaacctgctgaagaacgtgctgcacttcctgcagaagagcctgatcgagatcctggaggagaacagaaagtgcgccggcaaccacatcatccagacccagctgatgaacgacctgctggtgggcatcagagtgagcatgatgctggtgcagaaggtgcaggacttccagggcaacctgtggaagaccagcgacagccccatctggcagaacatgtgcggcctgctgagcatcttcaccaaggtgctgagcgacgacgacctgctgcagaccgtgcagagcaccagcggcctggccatcatcctgttcatcaagaccatgttccaccccagcgagaagatcccccacctgatcagcagcgtgctgctgagaagcgtggactgcaccagcgtgcccgagtggttcatgagcagctgcagaagcctgtgctgcggcgacatcagccagagcgccgtgctgttcctgtgccagggcaccctggccatgctggactggcagaacggcagcatgggcagaagcggcgaggccctgctgctggacaccgcccacgtgctgttcaccctgagcagccagatcaaggagcccaccctggagatgttcctgagcagaatcctggccagctggaccaacagcgccatccaggtgctggagagcagcagccccagcctgaccgacagcctgaacggcaacagcagcatcgtgggcagactgctggagtacgtgtacacccactgggagcaccccctggacgccctgagacaccagaccaagatcatgttcaagaacctgctgcagatgcacagactgaccgtggagggcgccgacttcgtgcccgaccccttcttcgtggagctgaccgagagcctgctgagactggagtggcacatcaagggcaagtacacctgcctgggctgcctggtggagtgcatcggcgtggagcacatcctggccatcgacaagaccatccccagccagatcctggaggtgatgggcgaccagagcctggtgccctacgccagcgacctgctggagaccatgttcagaaaccacaagagccacctgaagagccagaccgccgagagcagctggatcgaccagtggcacgagacctgggtgagccccctgctgttcatcctgtgcgagggcaacctggaccagaagagctacgtgatcgactactacctgcccaagctgctgagctacagccccgagagcctgcagtacatggtgaagatcctgcagaccagcatcgacgccaagaccggccaggagcagagcttccccagcctgggcagctgcaacagcagaggcgccctgggcgccctgatggcctgcctgagaatcgccagagcccacggccacctgcagagcgccaccgacacctgggagaacctggtgagcgacgccagaatcaagcagggcctgatccaccagcactgccaggtgagaatcgacaccctgggcctgctgtgcgagagcaacagaagcaccgagatcgtgagcatggaggagatgcagtggatccagttcttcatcacctacaacctgaacagccagagccccggcgtgagacagcagatctgcagcctgctgaagaagctgttctgcagaatccaggagagcagccaggtgctgtacaagctggagcagagcaagagcaagagagagcccgagaacgagctgaccaagcagcaccccagcgtgagcctgcagcagtacaagaacttcatgagcagcatctgcaacagcctgttcgaggccctgttccccggcagcagctacagcaccagattcagcgccctgaccatcctgggcagcatcgccgaggtgttccacgtgcccgagggcagaatctacaccgtgtaccagctgagccacgacatcgacgtgggcagattccagaccctgatggagtgcttcaccagcaccttcgaggacgtgaagatcctggccttcgacctgctgatgaagctgagcaagaccgccgtgcacttccaggacagcggcaagctgcagggcctgttccaggccgccctggagctgagcaccagcaccaagccctacgactgcgtgaccgccagctacctgctgaacttcctgatctggcaggacgccctgcccagcagcctgagcgcctacctgacccagcaggtggcctgcgacaacggcgacagacccgccgccgtggtggagagaaacaccctgatggtgatcaagtgcctgatggagaacctggaggaggaggtgagccaggccgagaacagcctgctgcaggccgccgccgccttccccatgtacggcagagtgcactgcatcaccggcgccctgcagaagctgagcctgaacagcctgcagctggtgagcgagtggagacccgtggtggagaagctgctgctgatgagctacagactgagcaccgtggtgagccccgtgatccagagcagcagccccgagggcctgatccccatggacaccgacagcgagagcgccagcagactgcagatgatcctgaacgagatccagcccagagacaccaacgactacttcaaccaggccaagatcctgaaggagcacgacagcttcgacatgaaggacctgaacgccagcgtggtgaacatcgacaccagcaccgagatcaagggcaaggaggtgaagacctgcgacgtgaccgcccagatggtgctggtgtgctgctggagaagcatgaaggaggtggccctgctgctgggcatgctgtgccagctgctgcccatgcagcccgtgcccgagagcagcgacggcctgctgaccgtggagcaggtgaaggagatcggcgactacttcaagcagcacctgctgcagagcagacacagaggcgccttcgagctggcctacaccggcttcgtgaagctgaccgaggtgctgaacagatgccccaacgtgagcctgcagaagctgcccgagcagtggctgtggagcgtgctggaggagatcaagtgcagcgaccccagcagcaagctgtgcgccaccagaagaagcgccggcatccccttctacatccaggccctgctggccagcgagcccaagaagggcagaatggacctgctgaagatcaccatgaaggagctgatcagcctggccggccccaccgacgacatccagagcaccgtgccccaggtgcacgccctgaacatcctgagagccctgttcagagacaccagactgggcgagaacatcatcccctacgtggccgacggcgccaaggccgccatcctgggcttcaccagccccgtgtgggccgtgagaaacagcagcaccctgctgttcagcgccctgatcaccagaatcttcggcgtgaagagagccaaggacgagcacagcaagaccaacagaatgaccggcagagagttcttcagcagattccccgagctgtaccccttcctgctgaagcagctggagaccgtggccaacaccgtggacagcgacatgggcgagcccaacagacaccccagcatgttcctgctgctgctggtgctggagagactgtacgccagccccatggacggcaccagcagcgccctgagcatgggccccttcgtgcccttcatcatgagatgcggccacagccccgtgtaccacagcagagagatggccgccagagccctggtgcccttcgtgatgatcgaccacatccccaacaccatcagaaccctgctgagcaccctgcccagctgcaccgaccagtgcttcagacagaaccacatccacggcaccctgctgcaggtgttccacctgctgcaggcctacagcgacagcaagcacggcaccaacagcgacttccagcacgagctgaccgacatcaccgtgtgcaccaaggccaagctgtggctggccaagagacagaacccctgcctggtgaccagagccgtgtacatcgacatcctgttcctgctgacctgctgcctgaacagaagcgccaaggacaaccagcccgtgctggagagcctgggcttctgggaggaggtgagaggcatcatcagcggcagcgagctgatcaccggcttcccctgggccttcaaggtgcccggcctgccccagtacctgcagagcctgaccagactggccatcgccgccgtgtgggccgccgccgccaagagcggcgagagagagaccaacgtgcccatcagcttcagccagctgctggagagcgccttccccgaggtgagaagcctgaccctggaggccctgctggagaagttcctggccgccgccagcggcctgggcgagaagggcgtgccccccctgctgtgcaacatgggcgagaagttcctgctgctggccatgaaggagaaccaccccgagtgcttctgcaagatcctgaagatcctgcactgcatggaccccggcgagtggctgccccagaccgagcactgcgtgcacctgacccccaaggagttcctgatctggaccatggacatcgccagcaacgagagaagcgagatccagagcgtggccctgagactggccagcaaggtgatcagccaccacatgcagacctgcgtggagaacagagagctgatcgccgccgagctgaagcagtgggtgcagctggtgatcctgagctgcgaggaccacctgcccaccgagagcagactggccgtggtggaggtgctgaccagcaccacccccctgttcctgaccaacccccaccccatcctggagctgcaggacaccctggccctgtggaagtgcgtgctgaccctgctgcagagcgaggagcaggccgtgagagacgccgccaccgagaccgtgaccaccgccatgagccaggagaacacctgccagagcaccgagttcgccttctgccaggtggacgccagcatcgccctggccctggccctggccgtgctgtgcgacctgctgcagcagtgggaccagctggcccccggcctgcccatcctgctgggctggctgctgggcgagagcgacgacctggtggcctgcgtggagagcatgcaccaggtggaggaggactacctgttcgagaaggccgaggtgaacttctgggccgagaccctgatcttcgtgaagtacctgtgcaagcacctgttctgcctgctgagcaagagcggctggagaccccccagccccgagatgctgtgccacctgcagagaatggtgagcgagcagtgccacctgctgagccagttcttcagagagctgccccccgccgccgagttcgtgaagaccgtggagttcaccagactgagaatccaggaggagagaaccctggcctgcctgagactgctggccttcctggagggcaaggagggcgaggacaccctggtgctgagcgtgtgggacagctacgccgagagcagacagctgaccctgcccagaaccgaggccgcctgctag

SEQ ID NO: 37839 - DNA, 4905 bp, Artificial Sequence
  derived and/or modified sequence
atgagcagctgcagaagcctgtgctgcggcgacatcagccagagcgccgtgctgttcctgtgccagggcaccctggccatgctggactggcagaacggcagcatgggcagaagcggcgaggccctgctgctggacaccgcccacgtgctgttcaccctgagcagccagatcaaggagcccaccctggagatgttcctgagcagaatcctggccagctggaccaacagcgccatccaggtgctggagagcagcagccccagcctgaccgacagcctgaacggcaacagcagcatcgtgggcagactgctggagtacgtgtacacccactgggagcaccccctggacgccctgagacaccagaccaagatcatgttcaagaacctgctgcagatgcacagactgaccgtggagggcgccgacttcgtgcccgaccccttcttcgtggagctgaccgagagcctgctgagactggagtggcacatcaagggcaagtacacctgcctgggctgcctggtggagtgcatcggcgtggagcacatcctggccatcgacaagaccatccccagccagatcctggaggtgatgggcgaccagagcctggtgccctacgccagcgacctgctggagaccatgttcagaaaccacaagagccacctgaagagccagaccgccgagagcagctggatcgaccagtggcacgagacctgggtgagccccctgctgttcatcctgtgcgagggcaacctggaccagaagagctacgtgatcgactactacctgcccaagctgctgagctacagccccgagagcctgcagtacatggtgaagatcctgcagaccagcatcgacgccaagaccggccaggagcagagcttccccagcctgggcagctgcaacagcagaggcgccctgggcgccctgatggcctgcctgagaatcgccagagcccacggccacctgcagagcgccaccgacacctgggagaacctggtgagcgacgccagaatcaagcagggcctgatccaccagcactgccaggtgagaatcgacaccctgggcctgctgtgcgagagcaacagaagcaccgagatcgtgagcatggaggagatgcagtggatccagttcttcatcacctacaacctgaacagccagagccccggcgtgagacagcagatctgcagcctgctgaagaagctgttctgcagaatccaggagagcagccaggtgctgtacaagctggagcagagcaagagcaagagagagcccgagaacgagctgaccaagcagcaccccagcgtgagcctgcagcagtacaagaacttcatgagcagcatctgcaacagcctgttcgaggccctgttccccggcagcagctacagcaccagattcagcgccctgaccatcctgggcagcatcgccgaggtgttccacgtgcccgagggcagaatctacaccgtgtaccagctgagccacgacatcgacgtgggcagattccagaccctgatggagtgcttcaccagcaccttcgaggacgtgaagatcctggccttcgacctgctgatgaagctgagcaagaccgccgtgcacttccaggacagcggcaagctgcagggcctgttccaggccgccctggagctgagcaccagcaccaagccctacgactgcgtgaccgccagctacctgctgaacttcctgatctggcaggacgccctgcccagcagcctgagcgcctacctgacccagcaggtggcctgcgacaacggcgacagacccgccgccgtggtggagagaaacaccctgatggtgatcaagtgcctgatggagaacctggaggaggaggtgagccaggccgagaacagcctgctgcaggccgccgccgccttccccatgtacggcagagtgcactgcatcaccggcgccctgcagaagctgagcctgaacagcctgcagctggtgagcgagtggagacccgtggtggagaagctgctgctgatgagctacagactgagcaccgtggtgagccccgtgatccagagcagcagccccgagggcctgatccccatggacaccgacagcgagagcgccagcagactgcagatgatcctgaacgagatccagcccagagacaccaacgactacttcaaccaggccaagatcctgaaggagcacgacagcttcgacatgaaggacctgaacgccagcgtggtgaacatcgacaccagcaccgagatcaagggcaaggaggtgaagacctgcgacgtgaccgcccagatggtgctggtgtgctgctggagaagcatgaaggaggtggccctgctgctgggcatgctgtgccagctgctgcccatgcagcccgtgcccgagagcagcgacggcctgctgaccgtggagcaggtgaaggagatcggcgactacttcaagcagcacctgctgcagagcagacacagaggcgccttcgagctggcctacaccggcttcgtgaagctgaccgaggtgctgaacagatgccccaacgtgagcctgcagaagctgcccgagcagtggctgtggagcgtgctggaggagatcaagtgcagcgaccccagcagcaagctgtgcgccaccagaagaagcgccggcatccccttctacatccaggccctgctggccagcgagcccaagaagggcagaatggacctgctgaagatcaccatgaaggagctgatcagcctggccggccccaccgacgacatccagagcaccgtgccccaggtgcacgccctgaacatcctgagagccctgttcagagacaccagactgggcgagaacatcatcccctacgtggccgacggcgccaaggccgccatcctgggcttcaccagccccgtgtgggccagccagatgaccggcagagagttcttcagcagattccccgagctgtaccccttcctgctgaagcagctggagaccgtggccaacaccgtggacagcgacatgggcgagcccaacagacaccccagcatgttcctgctgctgctggtgctggagagactgtacgccagccccatggacggcaccagcagcgccctgagcatgggccccttcgtgcccttcatcatgagatgcggccacagccccgtgtaccacagcagagagatggccgccagagccctggtgcccttcgtgatgatcgaccacatccccaacaccatcagaaccctgctgagcaccctgcccagctgcaccgaccagtgcttcagacagaaccacatccacggcaccctgctgcaggtgttccacctgctgcaggcctacagcgacagcaagcacggcaccaacagcgacttccagcacgagctgaccgacatcaccgtgtgcaccaaggccaagctgtggctggccaagagacagaacccctgcctggtgaccagagccgtgtacatcgacatcctgttcctgctgacctgctgcctgaacagaagcgccaaggacaaccagcccgtgctggagagcctgggcttctgggaggaggtgagaggcatcatcagcggcagcgagctgatcaccggcttcccctgggccttcaaggtgcccggcctgccccagtacctgcagagcctgaccagactggccatcgccgccgtgtgggccgccgccgccaagagcggcgagagagagaccaacgtgcccatcagcttcagccagctgctggagagcgccttccccgaggtgagaagcctgaccctggaggccctgctggagaagttcctggccgccgccagcggcctgggcgagaagggcgtgccccccctgctgtgcaacatgggcgagaagttcctgctgctggccatgaaggagaaccaccccgagtgcttctgcaagatcctgaagatcctgcactgcatggaccccggcgagtggctgccccagaccgagcactgcgtgcacctgacccccaaggagttcctgatctggaccatggacatcgccagcaacgagagaagcgagatccagagcgtggccctgagactggccagcaaggtgatcagccaccacatgcagacctgcgtggagaacagagagctgatcgccgccgagctgaagcagtgggtgcagctggtgatcctgagctgcgaggaccacctgcccaccgagagcagactggccgtggtggaggtgctgaccagcaccacccccctgttcctgaccaacccccaccccatcctggagctgcaggacaccctggccctgtggaagtgcgtgctgaccctgctgcagagcgaggagcaggccgtgagagacgccgccaccgagaccgtgaccaccgccatgagccaggagaacacctgccagagcaccgagttcgccttctgccaggtggacgccagcatcgccctggccctggccctggccgtgctgtgcgacctgctgcagcagtgggaccagctggcccccggcctgcccatcctgctgggctggctgctgggcgagagcgacgacctggtggcctgcgtggagagcatgcaccaggtggaggaggactacctgttcgagaaggccgaggtgaacttctgggccgagaccctgatcttcgtgaagtacctgtgcaagcacctgttctgcctgctgagcaagagcggctggagaccccccagccccgagatgctgtgccacctgcagagaatggtgagcgagcagtgccacctgctgagccagttcttcagagagctgccccccgccgccgagttcgtgaagaccgtggagttcaccagactgagaatccaggaggagagaaccctggcctgcctgagactgctggccttcctggagggcaaggagggcgaggacaccctggtgctgagcgtgtgggacagctacgccgagagcagacagctgaccctgcccagaaccgaggccgcctgctag

SEQ ID NO: 37840 - DNA, 3294 bp, Artificial Sequence
  derived and/or modified sequence
atgagctcttgcaggtccctgtgttgcggcgatatcagtcagtcggcagtgctattcctgtgtcagggcactctggccatgctggattggcagaacggttctatgggccgtagtggggaagccttgttgctggataccgcacatgttctctttacccttagctcccagataaaagagcctactctggagatgttcttaagcaggattctggccagctggacgaatagtgctattcaggtgctagaatcctcctcaccgagcctaacagactccctcaacggcaactcgtcaatcgttggtaggcttctcgaatatgtgtatacccactgggaacacccactcgatgccctgagacaccagacaaagatcatgttcaagaacctgctgcaaatgcacagactgacagtggagggcgcggactttgtccccgatcccttctttgttgagctgacggagtctttgttgaggctcgagtggcacataaaggggaagtacacctgcctaggttgtctcgtggagtgtattggtgttgagcacattctagccatcgataagactattccttcccagattcttgaagtgatgggggaccaatcactggtcccatacgccagcgatctgctggagaccatgttcagaaatcacaaaagccatttaaagagccaaacagccgaatcatcgtggatagatcagtggcacgaaacctgggtaagtccgctactcttcatcctttgcgaggggaatctcgatcaaaagagctacgtgattgattattatctgccaaagttgctctcatattcccctgagtcattgcagtatatggtcaagatattgcagactagcatagatgcgaagactgggcaggaacagagcttcccgagcctgggcagttgtaatagccgcggcgcattaggcgccctaatggcatgtctgcggattgccagagcccacggccatctccagtccgctactgatacatgggagaacctcgtttctgatgcccgtatcaagcaggggcttatacatcaacactgccaggtacgaatcgacacgctggggctcttgtgtgaaagcaatcgttcaacagaaattgtcagcatggaagaaatgcagtggattcagttcttcattacctataatttgaacagccaatctcctggagtacgacagcagatctgctctttactaaaaaagcttttctgccggattcaggagtcttctcaggtgctgtataaattggaacagtccaaaagcaaaagggagccagagaacgaactgaccaaacaacacccctccgtttctctccagcaatataaaaactttatgtcttcaatatgcaattcgttatttgaagctcttttccccgggagttcgtattccacacgcttcagcgccctaactatactgggtagcatcgccgaggtctttcacgtgcccgaaggccggatatatactgtgtaccagctgtcccatgatatcgatgtgggacggtttcaaactctcatggagtgcttcacatctaccttcgaggacgtgaaaatccttgccttcgatctgctcatgaaactgtctaagaccgcagtccatttccaagattcaggcaagcttcaggggctattccaggcggcactggaactttccactagtaccaagccgtatgactgcgtgaccgcatcctatctgctgaactttctgatttggcaagatgctcttcctagttcactgagcgcctacctaactcaacaggtcgcctgcgataacggcgatcgccccgctgcagtggtggagcgcaatacgttgatggtgatcaaatgcctgatggaaaatcttgaagaagaagtgtcccaagccgagaattcccttttacaggccgccgcagcatttcccatgtatggccgggtgcattgcattactggagcactacagaagctgtcccttaattctctgcagctcgtgtctgaatggcgcccagtggtggaaaaactgttgttgatgtcctacagactatccacggtggtaagtcctgtgatacagtcaagtagtccagaaggcctgatacccatggataccgatagtgaatccgcttccagattgcagatgatcttgaatgaaattcagccccgggacactaatgattatttcaatcaggctaagattctgaaagaacatgattcgttcgatatgaaggacctcaacgctagtgtcgtgaacatcgatacgtccactgagatcaagggaaaggaggtcaagacatgcgacgtgacggctcagatggttcttgtgtgttgttggcgttccatgaaagaggtggccctccttctcggaatgttgtgccagttattgccgatgcagcccgtcccagaatcgtctgatggactcctgaccgtcgagcaagtaaaggagataggcgattacttcaaacaacatctcctgcagtctagacaccgcggggcctttgagctcgcctatacaggatttgtcaaactcaccgaggtgctcaataggtgtccaaatgtgtcactgcagaagcttccagagcagtggctttggtctgttctggaagaaatcaagtgttcggacccttcctcgaagctctgtgccaccagacgaagtgcgggtatacctttctacatccaggcactgctcgcctctgaaccaaagaagggccgaatggatctgttgaagatcactatgaaggagctgatcagcctggccgggcctaccgacgacattcagagcaccgtgccccaggtgcacgctttgaatatactgcgagccttgttcagagacaccagactgggggagaacattataccttatgtggccgatggcgccaaagccgcaattctggggttcacttcccctgtgtgggctgtccggaacagctccacactgctcttcagcgcactgatcactaggattttcggagttaagagggccaaagatgaacatagtaagacgaatcggatgaccggacgggaatttttcagcaggtttccggaattatacccttttctgttaaagcaattggagaccgtcgccaacacagttgattccgacatgggagagcctaatcgccatccttcaatgtttttactccttctcgtgctcgaaagattatatgcttcccctatggacggcacaagttcagctctgtccatgggccctttcgtgccgtttatcatgcgcgtcctgctgtgctgccccgggtggtctgccgtcgcaagatcccagcttaccgccacttctacctcatgggtgcaggcaatcctcttaccccagccaccagaatag

SEQ ID NO: 37841 - DNA, 5862 bp, Artificial Sequence
  derived and/or modified sequence
atgggggtcaaaaagaaaaaagagatgcaggtagcggcattgacaatctgccaccaggatctagaaaccttaaagtcattcgccgatgtggaggggaagaatctcgctagtctcttgctacactgcgtgcagcttacagacggagtttcccaaatccactatataaagcagatagttccactgctggagaaagccgacaagaatgggatgtgcgaccctaccatccaatcctgcttggacatccttgctggaatttatctgagtctgtccttgaaaaatcctttgaagaaggtgttagctagctcgctaaactccctgccggatttttttctgccagaagcaatgcacaggttcacaagtaggctgcaggaagagctgaacacaactgatctctactcatatcgaaaggtgactgacaatataagctcctgtatggaaaactttaacttgggccgggcctcagttaacaatctgctgaaaaacgttctgcatttccttcagaagtccctaatcgagattcttgaggagaatcgcaaatgcgccgggaaccatataattcagacacaactgatgaatgacctgctggtcggaatcagggtgtctatgatgttggtgcaaaaggtgcaggattttcagggcaacctgtggaagacctctgactctccaatatggcagaatatgtgtggcctgttatctatttttacaaaagtcctgtcagatgatgaccttctccagaccgttcagagtacatccggactggctatcattttgtttatcaaaaccatgttccaccctagtgagaagatcccacatttgatcagctctgtcttactgcgctccgttgattgtaccagcgttcccgaatggttcatgtctagctgccggagtctgtgttgtggcgatatatcccagagtgctgttctgtttttatgccaaggaaccttagctatgctggactggcaaaacggctcaatgggaaggagcggcgaggcattactgctcgataccgcacacgtactgtttactctaagctcacagattaaggagcctacgctggagatgtttctgagccggatccttgccagctggacaaattctgccatccaagtcctcgagtcttcctccccctcgctcactgactccctcaatggcaactcaagcatcgtgggccgcctgttagagtacgtatatacacattgggaacaccccctcgacgcgctccgccaccaaacgaaaattatgtttaagaatttactccagatgcacaggctgaccgtagagggggcggattttgtgccagacccgttttttgtcgaactcaccgaaagcctcctgcggctcgagtggcatatcaagggaaagtacacatgcctgggatgcctggtggagtgtatcggggttgagcacatcttggcaattgataaaacgattccctcacagatactagaagtcatgggcgatcagtctctcgtgccgtacgcatccgacttgttagagaccatgttccgtaatcataagtctcatctcaagtctcaaactgcagagtcctcttggatcgaccaatggcatgaaacgtgggtgtccccgttattattcatcctttgcgagggaaacctcgaccagaaaagctacgtgatagattactatcttcccaagctgctgagctatagtcccgagtctctgcagtatatggtgaagattctccagaccagtatcgacgctaaaacagggcaggagcagagcttccctagtctcggcagctgcaactcccggggcgcattaggggctctgatggcttgcctgagaatagccagagctcacggacatctacagtcggcaaccgatacttgggaaaacctggtgtctgacgctcgtattaagcaggggctgattcaccagcattgccaggtgcgaattgacacgctcggcctgctctgcgagagcaaccgctctaccgagatagtttctatggaggaaatgcagtggattcagttctttattacatataacctgaacagccagagtcctggcgtgcggcagcaaatttgcagtctactcaaaaagctcttttgtcgaattcaggagagcagccaggttctgtacaagcttgagcagagtaaatcgaagagggaaccagagaatgagctcaccaaacagcacccttctgtctcactgcagcagtacaaaaatttcatgtcttcgatttgtaattctctgtttgaggccctcttccctgggagcagctattccacccgctttagcgctctgaccatcttgggatccatcgccgaggtcttccacgtacccgagggaaggatttatactgtttaccagctgagccacgacatcgacgtggggagatttcagactctcatggagtgtttcacatcgaccttcgaggacgtgaagatactcgcctttgaccttttgatgaagctgtcaaaaactgcagtgcactttcaggattcaggaaagctgcagggtctgttccaggcggctctggagctgagcaccagtacaaaaccatatgactgtgtcacagctagttacctgctcaatttcttgatttggcaagatgcgttgcccagttccctcagtgcttacttaacccaacaagtagcttgcgacaacggggaccgccctgcagcagtcgtagagcggaatacactgatggtgatcaagtgtctgatggagaatctggaggaggaagtgtctcaggcagaaaattccctactgcaagcggccgccgccttccctatgtatggaagagtgcactgtattacaggcgccctgcagaagctatccctgaactcactccagcttgtctccgagtggaggccggtcgtcgaaaagctcctgctgatgtcctaccgactgagtacagttgtgtcccctgtgatccagagctctagtccagaaggcttaatcccaatggacacagacagtgagagtgcatctagactgcagatgattctcaatgagattcaacctcgagacaccaacgattattttaaccaggctaaaattctcaaggagcacgactcctttgacatgaaggacctgaacgcgtcagtcgtaaacattgacaccagcactgagatcaaagggaaagaggtcaaaacctgcgacgtgaccgctcagatggtgcttgtctgctgttggcgcagtatgaaggaggtggccctgttgctcgggatgctgtgtcagctgctgcctatgcagccagtacccgagtcttctgacggactactgactgtggagcaggtcaaagaaataggcgactacttcaagcagcatctcctgcagagcagacatagaggagccttcgaattggcctacacgggcttcgtcaagctcacagaggtcctgaacagatgcccaaatgtcagcctgcagaaattaccggagcagtggctatggtccgtcttagaagagatcaaatgcagcgaccctagctctaaactatgcgcgacccggcgctctgccggcatcccattctacatccaggccctcctcgcgagcgagcctaagaaaggaagaatggacctgcttaaaatcaccatgaaagagctgatttccctcgctggcccgaccgacgacattcagagtacagtgccgcaggttcacgctctgaacattctgagggcccttttccgggatacacgtctaggcgagaacatcatcccctacgtggccgatggcgccaaggccgcaatcctgggcttcacctcccctgtatgggccgtaagaaacagctctacgctgctgtttagtgctctgatcaccaggatcttcggggtgaaaagagccaaagacgaacactctaaaaccaatagaatgaccggcagggagttcttcagcaggttcccagaactatacccgtttctccttaaacaactggagacggttgccaatactgtggactctgatatgggggagccgaaccgtcacccctcaatgtttttactgctcctggtcctggagcgactttacgcaagtcctatggacggaacctcttctgcactttctatgggaccttttgtcccttttatcatgaggtgcggtcacagccccgtctaccactcacgagagatggcagctagagccttggtaccattcgtgatgattgatcacatccccaatacaatacgaacactcctgtcgaccctgcctagctgcacagatcagtgcttccgccagaaccatattcacggcacgctccttcaagtgttccacctgttgcaggcgtacagcgattccaaacatggtacgaattccgatttccagcacgagctcactgatattacagtgtgcacaaaagcgaagttgtggctcgccaagcggcagaatccatgcctcgtcactcgcgccgtgtacatcgacattctctttttactgacatgctgccttaatcgatcagctaaggacaaccagccggtcctggaatccctcggcttttgggaggaggtgcgtgggatcatctcgggctctgagctgattactggctttccctgggctttcaaagtccccggactcccccaataccttcaaagcttaacccggttggcgattgccgcagtatgggcagctgcagccaagtccggggaacgggagaccaacgtgccaatttcgttcagtcagctgctggaatcagccttccctgaggtgcggtccctgaccctagaagccctgctcgagaagttcctcgccgccgcttcagggctgggagaaaagggcgtcccaccacttctatgcaatatgggcgagaagtttctgttgctggccatgaaggaaaatcacccagagtgcttctgtaaaatccttaagatactccattgcatggaccccggcgagtggttgccacagacagagcattgtgtccacctcaccccaaaggagtttctgatctggacaatggacatcgcctccaatgagcgctccgagatccagtctgtggctctgcggttggcttcgaaagtgatttcccaccacatgcaaacatgtgtggaaaaccgggaactcattgccgccgagttaaaacagtgggttcagcttgtgattctatcatgcgaggaccacctcccaactgaaagtaggctggcagtggtcgaagttttgacatccaccactccgctctttctgaccaaccctcacccgatcttggagctgcaggacacactcgctctgtggaaatgtgtgttgaccctgctccagagtgaagaacaggctgtgagagacgcagcaacagagacagtcaccacagcgatgtcacaggaaaacacctgtcaatccacagagttcgctttctgtcaggttgatgccagcatcgctctggccttggccctggctgttctgtgcgatttgttgcagcagtgggaccaattagcaccggggttacccatcctgctgggatggctcctgggcgaaagcgatgacctggtggcctgtgtggagtctatgcaccaggtcgaggaggactacctgttcgagaaggccgaggttaacttctgggccgaaactctgatctttgtgaaatacctctgcaagcatctgttttgcctgctgagcaagagtgggtggaggccaccatccccagaaatgctttgtcacctgcagcgcatggtatccgagcagtgtcacctcctctcacagtttttccgtgaactccccccagcagctgaattcgtgaagaccgtggagtttacgcggttaaggattcaagaggagaggactctggcttgcttaagattgctggccttcctcgaggggaaagaaggtgaggacacgttagtgctctccgtttgggatagttacgcggagtcaaggcagctaacccttccccgcaccgaagcagcttgttag

SEQ ID NO: 37842 - DNA, 5862 bp, Artificial Sequence
  derived and/or modified sequence
atgggtgtgaagaagaaaaaggagatgcaggtcgctgcccttacgatatgtcaccaggacttagagaccctgaagagtttcgccgacgtggagggcaaaaacctggcgtcactgcttttacactgtgtgcaactaacagatggggtttctcagatccactacattaaacagatcgtgccccttctggaaaaagccgataaaaacggcatgtgtgatcccaccatccagtcttgtttggacattctagcaggaatctacctatctctctccctcaagaaccctttaaaaaaagtgctcgccagtagcttgaattcacttcctgacttttttctgccagaggctatgcacaggttcacgtcccgcttgcaggaggagcttaacactactgacctttattcctatagaaaggtaaccgataacatctcttcttgtatggaaaatttcaacttaggtagggcctccgtcaacaacctgctcaaaaatgtcctgcattttctccagaagagtctgattgaaattttggaagaaaaccgtaaatgtgcaggtaatcacattattcagacacagctgatgaatgatctgttggtcggtattcgcgtttccatgatgctagtgcaaaaggttcaggatttccaggggaacctgtggaagacgagcgatagtcccatttggcagaacatgtgcggactgctctcaatcttcacaaaagtgctgtcagatgacgacctgctccaaactgtccaatcaactagcggccttgccataattttgttcattaagaccatgttccatcctagtgagaaaatcccgcatctcatctcatccgtgctgctccggagtgttgactgcacatcagtcccagagtggtttatgagctcatgcaggtccctatgctgcggagacatctcccagtctgcagtattgttcctgtgtcagggcactcttgctatgcttgactggcagaacgggtccatggggcgaagcggcgaggcactgcttctggacactgcccatgtgttattcaccctgagctcccagatcaaggagcccactctggagatgttcctgagcagaatcctggccagctggaccaattcagccattcaggtcctggaatcctctagcccgtccttaacagattcactgaacggcaacagttcgatcgttggcagattgcttgagtacgtatacacacactgggagcacccattggacgccctccggcatcagaccaaaatcatgtttaagaatctgttgcagatgcatcgtctgaccgtcgagggggcggactttgttccagacccctttttcgtagaactcaccgagtcactgcttaggctagagtggcatataaagggaaaatacacgtgcctgggatgtctggttgaatgcataggagtcgagcacatcctggcgatcgataaaaccatccctagccaaatcctggaggtgatgggtgaccagagcctagttccatacgcgtcagatctgctggaaaccatgttccgaaatcacaagagccatctaaagagtcaaactgccgagtcctcatggattgatcaatggcacgagacctgggtgagcccgctgctgtttattctctgcgagggcaacctggatcaaaaatcatacgttatagactattacttgccaaagttactctcttactcacccgagtcactacagtatatggtaaaaatacttcagactagtatcgatgctaagacaggccaggagcaatcctttccaagcctgggctcctgcaactcacggggtgcccttggcgcgctcatggcgtgcctgcggattgcccgcgctcacggacatctgcagtccgccacggacacctgggagaatctggtgtcagacgcgaggattaaacaggggctgatacatcaacattgtcaagtcaggatcgacacactaggactactgtgcgaatcgaaccggtctacggagatcgtctctatggaggaaatgcaatggatccagttttttatcacatataacctgaattctcagtcccccggtgtgcgacagcagatctgttcactgttgaaaaagctcttctgcaggatccaggagagctcacaggtcctctataagctggagcagtcaaaaagcaagagggagccagaaaatgagttgacaaaacagcacccctccgtgtccttgcagcaatataagaacttcatgtcttcaatctgtaattcgctatttgaggccctatttcctgggagcagctactcaacacgattcagtgccctcacgattctgggttccatcgcggaagtattccatgtgccagagggcaggatctatacggtgtaccagctctctcacgacatcgacgtcgggaggtttcagaccttaatggagtgcttcacctccacatttgaggacgttaagatcctggctttcgacctgctgatgaaactgagcaagacagcagtccacttccaggattctggtaaattgcagggcctgttccaggcggccctcgagctctccaccagcactaagccatatgactgcgtgactgcctcatatctcctgaacttcttgatttggcaagatgccctgcctagcagcctttccgcttatctcacacagcaggtcgcgtgtgataacggcgacaggcctgcggcagttgtggagagaaataccctgatggtcatcaaatgcctaatggagaacctggaggaagaagtcagccaagcagaaaacagtctgctccaagccgctgccgcctttcccatgtatggacgagtccattgtataactggggcactgcaaaagctttcactgaatagccttcagctggtgagtgagtggcgaccagtggtggagaagctgttattaatgagctaccggctatccaccgttgtatcccctgtcatccaatcctcttctccagaaggacttattccgatggataccgattccgaatcagccagcagactccagatgatattgaacgagatccagccccgcgataccaacgactactttaaccaggccaagatcctgaaagagcacgattccttcgatatgaaagacctcaacgctagcgtggtaaatatcgacaccagcacagagataaagggcaaagaagtgaaaacttgtgatgtgaccgcccagatggtgctggtttgttgttggcgctcaatgaaggaggtggcactattactaggcatgctgtgtcagttgttgccaatgcaacctgtaccagaaagctccgatggactgttaacagttgagcaagtgaaagagatcggagactattttaagcaacacctcctgcagtcaaggcacagaggcgcgtttgagttggcatacaccggattcgtcaaactgactgaggtccttaatcgctgtcctaacgtgtctcttcagaagttacccgaacagtggctatggagtgtactagaggagattaaatgcagcgatccatcaagcaagttatgtgccacacgcagatctgccggaattcctttctacatccaagcgcttctggcctccgaacctaaaaaggggagaatggacctgctgaaaatcacaatgaaagagctcatctcactcgcagggcctacagacgatatccagagcactgtgcctcaggtacacgcgctaaatatccttcgggcccttttcagggacacacggttgggtgagaacattatcccttacgtggctgatggcgccaaagctgctatcctcggcttcacttcgcccgtttgggcagtgcggaattcttccacattgctcttcagcgccctgattacccgaatctttggagtgaagcgggctaaagatgaacattccaagactaatcgcatgaccggcagagaattcttttctcgatttcctgagctgtacccatttctgctaaagcagctcgaaacagtcgctaacaccgttgactctgacatgggtgaacccaacagacacccctcgatgttcttgctactgctcgtgctcgagaggttgtacgccagtccaatggacgggacatcaagtgctctgtccatgggcccattcgtgccttttattatgagatgtgggcacagtccggtgtatcattcccgagagatggcagctcgggccctggtgccatttgttatgattgaccacattcccaacacaattcgcacactgctctctactcttcctagctgcaccgatcaatgcttcaggcagaatcacattcacggcacacttctccaggtattccatctgctgcaagcatacagcgactccaagcatgggacgaattccgactttcagcacgaactaacagatataacagtgtgtacaaaagctaaattatggctcgcaaagcgccagaacccttgcttagtgacaagggcagtctacatcgatatcctttttcttctgacctgctgtcttaaccgtagcgccaaggataaccagccagtgctcgaatcccttgggttttgggaggaggtgcgaggaatcatcagtgggagtgaactgattacaggatttccttgggcattcaaagtccctgggttaccacagtatctccagtcacttacacgactggctatagccgcggtgtgggcagcagctgccaagagtggtgaaagagagaccaacgtgccaatttctttctctcagcttctggagagcgcttttcccgaagtgaggtccctgactctggaggcactgctggaaaagttccttgcggctgcgagtggccttggagagaaaggggtccctcccctcttgtgcaacatgggcgagaagttcctcctgctagctatgaaggagaaccaccccgaatgtttttgcaagattctgaaaatcttgcattgtatggaccccggcgagtggctgccacagacagagcattgcgtgcatctgacccccaaggagtttctcatctggacaatggatattgccagcaacgagcgctcggaaattcagagcgtcgcactgcgtttggcctccaaggtgatctcccatcatatgcagacatgcgtcgagaatcgtgaactcatagctgctgagctgaagcagtgggtgcagttggtgattctgtcttgcgaggaccatttgcccacagaatctcgtctggccgtggtggaggtgctgacttctaccacccctctattcctgacgaatccacatcctattcttgaactccaggatactctggccctgtggaagtgtgttctcacactcctgcagtccgaggagcaggccgtccgtgacgctgccactgaaactgtgaccacggctatgtcacaggagaatacatgtcagagtacagagttcgccttttgccaggtggacgcgtccatcgcactagctttagcgttagcggttctgtgtgatctcctccagcagtgggatcagttggcccccggcctgcccatcctgctcgggtggctgctaggagaatctgacgatttagtagcctgtgtggaaagcatgcaccaagtggaggaagattatctatttgagaaagccgaagtgaacttctgggccgaaaccctgattttcgtcaaatacctgtgcaagcacctgttctgtcttcttagcaaaagtggatggaggcccccaagtcccgagatgctctgccatcttcagcgaatggtctcagaacagtgccacctgctgtcccaattcttccgtgagctccccccagccgccgaatttgtgaaaaccgttgagtttacccgtctgagaatccaagaggagagaacacttgcttgtttgagactcctagcctttctggaaggaaaggagggcgaagatacactggttctctccgtgtgggattcatacgcggaatcgcggcagctaaccctgcctaggaccgaagctgcttgctag

SEQ ID NO: 37843 - DNA, 4905 bp, Artificial Sequence
  derived and/or modified sequence
atgagcagttgtagatctttgtgctgcggagacatcagccagagcgcagtgttattcctgtgccagggaacgctggcaatgttagactggcaaaacggcagcatgggcaggtccggtgaggctttgctgctcgatacggcacatgttctgttcaccctgtccagtcaaataaaggagcccaccttggagatgttcctgtctcggatactggcgagctggactaactctgccatacaggtcctggagagctcatcaccttcactgactgactctctcaacggaaactcaagcattgtcggtcgattactcgagtacgtttatactcactgggagcacccacttgacgctttaagacaccagactaaaataatgttcaaaaatctgctccaaatgcaccgcctaaccgtggagggagccgattttgtccctgatcctttttttgtagagctcacagagtctctgttgaggctagaatggcatatcaaaggtaagtatacctgcctagggtgcctagtggagtgcataggcgtggagcatatcctggctatagataaaacaatcccctcacagattctggaagtcatgggtgatcaaagtctcgtgccatacgcaagcgacttgttggaaactatgttcagaaaccacaaaagtcacttgaagtctcagaccgcagagtcatcctggatcgaccagtggcatgagacttgggtgagccctctcttgtttatactttgcgagggcaatctcgatcaaaaatcttatgtcattgactactatcttccaaagctcctgagctacagtcctgaaagccttcagtacatggtcaagatcctgcagacttctatcgatgcaaagacaggccaggagcaatccttccccagcctggggagctgcaactctcgaggggcacttggtgctctaatggcctgtctcagaatcgcccgcgcacatgggcatctgcagtcggctactgatacatgggagaacctggtatcggatgcaagaattaagcagggcctgatacaccagcattgccaagtccgcattgacacactgggtctgctctgcgaaagtaatagatccaccgagattgtatccatggaggaaatgcagtggatacagttttttattacatacaacctgaactcccagtctccgggggtgcggcaacagatttgctctctgctgaagaaattgttctgcaggatccaggagtcttcccaagtgctctacaaacttgagcagtcaaagagcaaacgtgagccagagaatgagctgacaaaacagcatccttcagtgagtctgcagcagtacaaaaactttatgagctccatttgtaattctctcttcgaagcactctttcctggttcatcttactccacgcggttcagcgcattaaccatcctgggatcgatagcggaagtcttccatgtgcccgaggggcgcatttatacagtctatcagctgtcccatgatattgatgtgggaaggttccagactctgatggagtgtttcactagcactttcgaagatgtgaagatcttggcctttgatctgttaatgaaactgtctaagacggcggttcacttccaggatagcggcaagttgcagggacttttccaggccgccttggagctgagtactagcaccaaaccgtatgactgcgtcacagcaagctatttattaaactttctgatctggcaggatgccctgcccagctccctatcggcctatctaacccagcaggtggcgtgcgataatggcgatcggcctgctgccgtggttgagcgcaacacgctcatggtcattaagtgccttatggagaatctggaggaggaggtgagccaggcagagaactctctgttacaagctgccgccgctttcccaatgtacgggagggtacactgcatcactggcgctcttcaaaaactgtccctgaatagcctgcagctggtgtctgaatggaggcctgttgtagagaagctgctactaatgtcctatagactaagcaccgtcgtctctccagtgatccagagttcgtcaccagagggcttgatcccaatggatactgattctgagtctgcatccagattacagatgatcctcaatgagattcaacctagagacacgaatgattacttcaaccaagccaagattctcaaggaacacgacagcttcgatatgaaagatctgaatgcctcagtggtcaacatcgatacttcaacagagatcaaaggaaaagaagtaaagacatgcgacgtgacagctcaaatggtgcttgtttgttgctggcgatctatgaaggaagtcgcgctcctattgggcatgctctgccaactccttccaatgcagccagtgcccgaatcatcggacgggctccttaccgtcgagcaggttaaggagattggtgactattttaagcagcacctactgcaaagccggcatcgcggggcttttgagctggcctatacaggcttcgtaaaactgacggaggttttgaaccggtgtcccaacgtgagtctgcaaaagctccctgagcagtggctgtggagcgtgttggaagagatcaaatgtagcgatccttcttctaaattatgtgctacccgcaggtctgccgggatccctttttacatccaggcccttctagcctccgagccgaagaagggcagaatggacctgctgaagatcactatgaaggagttaataagcttagccggtccgactgacgatattcagtcgaccgtccctcaggttcacgccctgaatatccttagggccttgttccgtgacactcgtctgggcgaaaatattattccctatgtcgccgatggggcaaaagcagcaatactgggatttacttcaccagtttgggcttcccagatgacgggacgggagtttttctcacgattcccagagctttatcccttccttctcaagcagctcgaaaccgtggctaatactgtggattccgatatgggtgagcctaatcgccacccctccatgtttctactcttattagtactcgagcgactctacgcatctcctatggatggtacatcctcggccctgagcatgggacctttcgtgcctttcatcatgagatgtgggcatagcccggtttaccactctcgcgagatggcggcccgcgccctcgttccctttgttatgatcgatcatattcctaatactatccgaacccttctgagcacgctaccttcctgcacagaccagtgcttccggcaaaatcatatccacggtactctgctccaggtattccatctactgcaggcctatagcgattccaagcatggcaccaatagcgactttcagcatgaactcaccgatatcaccgtgtgcacgaaggctaagctctggctggccaagcgccagaacccatgccttgtgaccagggccgtgtacatcgacatcttgttcctactgacttgttgccttaatcgtagcgcaaaggacaatcaaccagttcttgagtcgctcgggttttgggaagaagtccggggaatcatttccgggtccgaattgatcacaggcttcccttgggccttcaaggtacctggccttcctcaatacctgcaaagtctgaccaggctcgccattgctgccgtatgggctgcggccgccaaatccggtgagcgggagaccaacgttcccatttctttttcacagctgttagagtccgcttttcccgaggtccgctccctcactctggaggccctcctggagaagtttctggccgctgcaagtggccttggtgagaaaggagtgcctcctttattatgtaacatgggagagaagtttctcctactggccatgaaggagaaccacccagagtgcttttgcaagatattaaagatcctccactgcatggaccccggtgagtggctgccccagacggagcactgtgtgcacctaacaccaaaagagtttttaatctggactatggacattgcctcgaatgaacgctccgagatacagtccgtcgcattgcggctggcaagcaaagttatttcccaccatatgcaaacctgtgtggaaaatagagagcttatcgcagccgaactgaaacagtgggtccagttggtgatactgagctgtgaagaccacctccccacggaatctcggctcgcagttgttgaagtcctcactagcaccacccccctgtttctgacaaatcctcaccctattctggagctccaggacaccctcgcgctgtggaaatgcgtgttgaccctgctgcagtccgaggaacaagccgtgagggatgccgccaccgagactgtaacaactgccatgagtcaagagaatacctgtcagtcaaccgagttcgccttctgtcaggtcgacgctagcattgctttagcgctcgccctggccgtgctgtgcgacctgctgcaacagtgggatcagctggcacctgggctgcccatcctactgggatggctgcttggggaatccgatgacctggtggcatgtgtggaaagtatgcatcaggtggaagaagactacctcttcgagaaggctgaagtgaatttttgggcagaaacgctgatcttcgttaagtacctgtgtaagcacctgttttgcctcctgagtaagagcgggtggcgccccccctcgcccgaaatgctctgccatctgcagcggatggtgtccgagcaatgtcatctgctttcacagttctttcgggagctgccgcccgccgcagaattcgtgaagacggtcgagttcactaggctgcggatccaggaggaaagaacactggcatgcctccgcctgctggctttcttggaaggaaaggagggagaggacactcttgttctttctgtatgggactcttatgctgaaagccgccaattgactcttccccggacggaggcagcatgctag

SEQ ID NO: 37844 - DNA, 3294 bp, Artificial Sequence
  derived and/or modified sequence
atgagcagctgccgcagcctgtgctgcggggacatcagccagagcgctgtgctcttcctgtgccagggcaccctggccatgctggactggcagaatggctccatgggccgcagcggggaggccctgctgctggacacagcccacgtgctcttcaccctgagcagccagatcaaggagcccaccctggagatgttcctgagccgcatcctggcctcctggaccaacagcgccatccaggtgctggagagcagcagccccagcctgacagacagcctgaatggaaacagcagcatcgtgggccgcctgctggagtatgtgtacacccactgggagcaccccctggatgccctgcggcaccagaccaagatcatgttcaagaacctgctgcagatgcaccggctgactgtggagggcgctgactttgtgcctgaccccttctttgtggagctgacagagagcctgctgcggctggagtggcacatcaagggcaagtacacctgcctgggctgcctggtggagtgcattggagtggagcacatcctggccatcgacaagaccatccccagccagatcctggaggtgatgggagaccagagcctggtgccctatgccagtgacctgctggagaccatgttcaggaaccacaagagccacctgaagagccagacagctgagagctcctggattgaccagtggcatgagacctgggtgagccccctgctcttcatcctgtgtgagggcaacctggaccagaagagctatgtgattgactactacctgcccaagctgctgagctacagccctgagagcctgcagtacatggtgaagatcctgcagaccagcattgatgccaagacaggccaggagcagagcttccccagcctgggcagctgcaacagcagaggagccctgggcgccctgatggcctgcctgagaattgcccgggcccacggccacctgcagagcgccacagacacctgggagaacctggtgtctgatgcccgcatcaagcagggcctcatccaccagcactgccaggtgagaattgacaccctgggcctgctgtgtgagagcaacagaagcacagagatcgtgtccatggaggagatgcagtggatccagttcttcatcacctacaacctgaacagccagagccctggggtgcggcagcagatctgcagcctgctgaagaagctgttctgccgcatccaggagagcagccaggtgctgtacaagctggagcagagcaagagcaagcgggagccagaaaatgagctgaccaagcagcaccccagcgtgtccctgcagcagtacaagaacttcatgagcagcatctgcaacagcctgtttgaggccctcttccctggcagcagctacagcacccgcttcagcgccctgaccatcctgggcagcattgctgaggtgttccacgtgcctgagggccgcatctacacagtgtaccagctgagccatgacattgatgtgggccgcttccagaccctgatggagtgcttcaccagcacctttgaagatgtgaagatcctggcctttgacctgctgatgaagctgagcaagacagctgtgcacttccaggacagcggcaagctgcagggcctcttccaggccgccctggagctgagcaccagcaccaagccctatgactgtgtgacagccagctacctgctgaacttcctgatctggcaggatgccctgcccagcagcctgagcgcctacctgacccagcaggtggcctgtgacaatggagacaggcctgctgctgtggtggagaggaacaccctgatggtgatcaagtgcctgatggagaacctggaggaggaggtgtcccaggccgagaacagcctgctgcaggccgccgccgccttccccatgtatggccgggtgcactgcatcaccggggccctgcagaagctgagcctgaacagcctgcagctggtgtctgagtggaggcctgtggtggagaagctgctgctgatgagctaccgcctgagcacagtggtgtcccctgtgatccagagcagcagccctgagggcctcatccccatggacacagacagcgagagcgccagccggctgcagatgatcctgaatgagatccagccccgggacaccaatgactacttcaaccaggccaagatcctgaaggagcatgacagctttgacatgaaggacctgaatgcctctgtggtgaacatcgacaccagcacagagatcaagggcaaggaggtgaagacctgtgatgtgacagcccagatggtgctggtgtgctgctggaggtccatgaaggaggtggccctgctgctgggcatgctgtgccagctgctgcccatgcagcctgtgcctgagagcagtgatggcctgctgactgtggagcaggtgaaggagatcggggactacttcaagcagcacctgctgcagagccgccacagaggagcctttgagctggcctacacaggctttgtgaagctgacagaggtgctgaaccgctgccccaacgtgtccctgcagaagctgcctgagcagtggctgtggagcgtgctggaggagatcaagtgcagcgaccccagcagcaagctgtgtgccaccaggagatctgctggcatccccttctacatccaggccctgctggccagcgagcccaagaagggccgcatggacctgctgaagatcaccatgaaggagctgatcagcctggccggccccacagatgacatccagagcacagtgccccaggtgcacgccctgaacatcctgcgggccctcttccgggacacccggctgggggagaacatcatcccctacgtggctgatggagccaaggccgccatcctgggcttcaccagccctgtgtgggccgtgaggaacagcagcaccctgctcttcagcgccctgatcacccgcatctttggagtgaagagggccaaggatgagcacagcaagaccaacaggatgacaggccgggagttcttcagccgcttccctgagctgtaccccttcctgctgaagcagctggagaccgtggccaacacagtggacagcgacatgggagagcccaacagacaccccagcatgttcctgctgctgctggtgctggagcggctgtatgccagccccatggatggcaccagcagcgccctgtccatgggcccctttgtgcccttcatcatgagggtgctgctgtgctgccccggctggagcgctgtggcccggagccagctgacagccaccagcacctcctgggtgcaggccatcctgctgccccagcccccagagtag

SEQ ID NO: 37845 - DNA, 5862 bp, Artificial Sequence
  derived and/or modified sequence
atgggcgtgaagaagaagaaggagatgcaggtggccgccctgaccatctgccaccaggacctggagaccctgaagagctttgctgatgtggagggcaagaacctggccagcctgctgctgcactgtgtgcagctgacagatggagtgtcccagatccactacatcaagcagatcgtgcccctgctggagaaggctgacaagaatggcatgtgtgaccccaccatccagagctgcctggacatcctggccggcatctacctgagcctgagcctgaagaaccccctgaagaaggtgctggccagcagcctgaacagcctgcctgacttcttcctgcctgaggccatgcaccgcttcaccagccggctgcaggaggagctgaacaccacagacctgtacagctacaggaaggtgacagacaacatcagcagctgcatggagaacttcaacctgggccgggcctctgtgaacaacctgctgaagaatgtgctgcacttcctgcagaagagcctgattgagatcctggaggagaacagaaaatgtgccggcaaccacatcatccagacccagctgatgaatgacctgctggtgggcatccgggtgtccatgatgctggtgcagaaggtgcaggacttccagggcaacctgtggaagaccagtgacagccccatctggcagaacatgtgtggcctgctgagcatcttcaccaaggtgctgagtgatgatgacctgctgcagacagtgcagagcaccagcggcctggccatcatcctcttcatcaagaccatgttccaccccagcgagaagatcccccacctgatcagctctgtgctgctgcggtctgtggactgcacctctgtgcctgagtggttcatgagcagctgccgcagcctgtgctgcggggacatcagccagagcgctgtgctcttcctgtgccagggcaccctggccatgctggactggcagaatggctccatgggccgcagcggggaggccctgctgctggacacagcccacgtgctcttcaccctgagcagccagatcaaggagcccaccctggagatgttcctgagccgcatcctggcctcctggaccaacagcgccatccaggtgctggagagcagcagccccagcctgacagacagcctgaatggaaacagcagcatcgtgggccgcctgctggagtatgtgtacacccactgggagcaccccctggatgccctgcggcaccagaccaagatcatgttcaagaacctgctgcagatgcaccggctgactgtggagggcgctgactttgtgcctgaccccttctttgtggagctgacagagagcctgctgcggctggagtggcacatcaagggcaagtacacctgcctgggctgcctggtggagtgcattggagtggagcacatcctggccatcgacaagaccatccccagccagatcctggaggtgatgggagaccagagcctggtgccctatgccagtgacctgctggagaccatgttcaggaaccacaagagccacctgaagagccagacagctgagagctcctggattgaccagtggcatgagacctgggtgagccccctgctcttcatcctgtgtgagggcaacctggaccagaagagctatgtgattgactactacctgcccaagctgctgagctacagccctgagagcctgcagtacatggtgaagatcctgcagaccagcattgatgccaagacaggccaggagcagagcttccccagcctgggcagctgcaacagcagaggagccctgggcgccctgatggcctgcctgagaattgcccgggcccacggccacctgcagagcgccacagacacctgggagaacctggtgtctgatgcccgcatcaagcagggcctcatccaccagcactgccaggtgagaattgacaccctgggcctgctgtgtgagagcaacagaagcacagagatcgtgtccatggaggagatgcagtggatccagttcttcatcacctacaacctgaacagccagagccctggggtgcggcagcagatctgcagcctgctgaagaagctgttctgccgcatccaggagagcagccaggtgctgtacaagctggagcagagcaagagcaagcgggagccagaaaatgagctgaccaagcagcaccccagcgtgtccctgcagcagtacaagaacttcatgagcagcatctgcaacagcctgtttgaggccctcttccctggcagcagctacagcacccgcttcagcgccctgaccatcctgggcagcattgctgaggtgttccacgtgcctgagggccgcatctacacagtgtaccagctgagccatgacattgatgtgggccgcttccagaccctgatggagtgcttcaccagcacctttgaagatgtgaagatcctggcctttgacctgctgatgaagctgagcaagacagctgtgcacttccaggacagcggcaagctgcagggcctcttccaggccgccctggagctgagcaccagcaccaagccctatgactgtgtgacagccagctacctgctgaacttcctgatctggcaggatgccctgcccagcagcctgagcgcctacctgacccagcaggtggcctgtgacaatggagacaggcctgctgctgtggtggagaggaacaccctgatggtgatcaagtgcctgatggagaacctggaggaggaggtgtcccaggccgagaacagcctgctgcaggccgccgccgccttccccatgtatggccgggtgcactgcatcaccggggccctgcagaagctgagcctgaacagcctgcagctggtgtctgagtggaggcctgtggtggagaagctgctgctgatgagctaccgcctgagcacagtggtgtcccctgtgatccagagcagcagccctgagggcctcatccccatggacacagacagcgagagcgccagccggctgcagatgatcctgaatgagatccagccccgggacaccaatgactacttcaaccaggccaagatcctgaaggagcatgacagctttgacatgaaggacctgaatgcctctgtggtgaacatcgacaccagcacagagatcaagggcaaggaggtgaagacctgtgatgtgacagcccagatggtgctggtgtgctgctggaggtccatgaaggaggtggccctgctgctgggcatgctgtgccagctgctgcccatgcagcctgtgcctgagagcagtgatggcctgctgactgtggagcaggtgaaggagatcggggactacttcaagcagcacctgctgcagagccgccacagaggagcctttgagctggcctacacaggctttgtgaagctgacagaggtgctgaaccgctgccccaacgtgtccctgcagaagctgcctgagcagtggctgtggagcgtgctggaggagatcaagtgcagcgaccccagcagcaagctgtgtgccaccaggagatctgctggcatccccttctacatccaggccctgctggccagcgagcccaagaagggccgcatggacctgctgaagatcaccatgaaggagctgatcagcctggccggccccacagatgacatccagagcacagtgccccaggtgcacgccctgaacatcctgcgggccctcttccgggacacccggctgggggagaacatcatcccctacgtggctgatggagccaaggccgccatcctgggcttcaccagccctgtgtgggccgtgaggaacagcagcaccctgctcttcagcgccctgatcacccgcatctttggagtgaagagggccaaggatgagcacagcaagaccaacaggatgacaggccgggagttcttcagccgcttccctgagctgtaccccttcctgctgaagcagctggagaccgtggccaacacagtggacagcgacatgggagagcccaacagacaccccagcatgttcctgctgctgctggtgctggagcggctgtatgccagccccatggatggcaccagcagcgccctgtccatgggcccctttgtgcccttcatcatgagatgtggccacagccctgtgtaccacagccgggagatggccgcccgggccctggtgccctttgtgatgattgaccacatccccaacaccatccgcaccctgctgagcaccctgcccagctgcacagaccagtgcttccggcagaaccacatccacggcaccctgctgcaggtgttccacctgctgcaggcctacagcgacagcaagcacggcaccaacagcgacttccagcacgagctgacagacatcaccgtgtgcaccaaggccaagctgtggctggccaagaggcagaacccctgcctggtgaccagggctgtgtacatcgacatcctcttcctgctgacctgctgcctgaacagaagtgccaaggacaaccagcctgtgctggagagcctgggcttctgggaggaggtgcggggcatcatcagcggcagcgagctgatcaccggcttcccctgggccttcaaggtgcccggcctgccccagtacctgcagagcctgacccggctggccatcgctgctgtgtgggccgctgctgccaagagcggggagcgggagaccaacgtgcccatctccttcagccagctgctggagagcgccttccctgaggtgcgcagcctgaccctggaggccctgctggagaagttcctggccgccgccagcggcctgggggagaagggcgtgccccccctgctgtgcaacatgggagagaagttcctgctgctggccatgaaggagaaccaccctgagtgcttctgcaagatcctgaagatcctgcactgcatggaccccggggagtggctgccccagacagagcactgtgtgcacctgacccccaaggagttcctgatctggaccatggacatcgccagcaatgaaagaagtgagatccagagcgtggccctgcggctggccagcaaggtgatcagccaccacatgcagacctgtgtggagaaccgggagctgattgctgctgagctgaagcagtgggtgcagctggtgatcctgagctgtgaggaccacctgcccacagagagccggctggccgtggtggaggtgctgaccagcaccacccccctcttcctgaccaacccccaccccatcctggagctgcaggacaccctggccctgtggaagtgtgtgctgaccctgctgcagagcgaggagcaggccgtgagagatgctgccacagaaacagtgaccacagccatgagccaggagaacacctgccagagcacagaatttgccttctgccaggtggatgccagcatcgccctggccctggccctggccgtgctgtgtgacctgctgcagcagtgggaccagctggcccctggcctgcccatcctgctgggctggctgctgggggagagtgatgacctggtggcctgtgtggagagcatgcaccaggtggaggaggactacctgtttgagaaggccgaggtgaacttctgggccgagaccctcatctttgtgaagtacctgtgcaagcacctgttctgcctgctgagcaagagcggctggaggcctcccagccctgagatgctgtgccacctgcagaggatggtgtctgagcagtgccacctgctgagccagttcttccgggagctgcccccagctgctgagtttgtgaagacagtggagttcacccggctgcgcatccaggaggagaggaccctggcctgcctgcggctgctggccttcctggagggcaaggagggggaggacaccctggtgctgtctgtgtgggacagctatgcagagagccggcagctgaccctgcccaggacagaagctgcctgctag

SEQ ID NO: 37846 - DNA, 4905 bp, Artificial Sequence
  derived and/or modified sequence
atgagcagctgccgcagcctgtgctgcggggacatcagccagagcgctgtgctcttcctgtgccagggcaccctggccatgctggactggcagaatggctccatgggccgcagcggggaggccctgctgctggacacagcccacgtgctcttcaccctgagcagccagatcaaggagcccaccctggagatgttcctgagccgcatcctggcctcctggaccaacagcgccatccaggtgctggagagcagcagccccagcctgacagacagcctgaatggaaacagcagcatcgtgggccgcctgctggagtatgtgtacacccactgggagcaccccctggatgccctgcggcaccagaccaagatcatgttcaagaacctgctgcagatgcaccggctgactgtggagggcgctgactttgtgcctgaccccttctttgtggagctgacagagagcctgctgcggctggagtggcacatcaagggcaagtacacctgcctgggctgcctggtggagtgcattggagtggagcacatcctggccatcgacaagaccatccccagccagatcctggaggtgatgggagaccagagcctggtgccctatgccagtgacctgctggagaccatgttcaggaaccacaagagccacctgaagagccagacagctgagagctcctggattgaccagtggcatgagacctgggtgagccccctgctcttcatcctgtgtgagggcaacctggaccagaagagctatgtgattgactactacctgcccaagctgctgagctacagccctgagagcctgcagtacatggtgaagatcctgcagaccagcattgatgccaagacaggccaggagcagagcttccccagcctgggcagctgcaacagcagaggagccctgggcgccctgatggcctgcctgagaattgcccgggcccacggccacctgcagagcgccacagacacctgggagaacctggtgtctgatgcccgcatcaagcagggcctcatccaccagcactgccaggtgagaattgacaccctgggcctgctgtgtgagagcaacagaagcacagagatcgtgtccatggaggagatgcagtggatccagttcttcatcacctacaacctgaacagccagagccctggggtgcggcagcagatctgcagcctgctgaagaagctgttctgccgcatccaggagagcagccaggtgctgtacaagctggagcagagcaagagcaagcgggagccagaaaatgagctgaccaagcagcaccccagcgtgtccctgcagcagtacaagaacttcatgagcagcatctgcaacagcctgtttgaggccctcttccctggcagcagctacagcacccgcttcagcgccctgaccatcctgggcagcattgctgaggtgttccacgtgcctgagggccgcatctacacagtgtaccagctgagccatgacattgatgtgggccgcttccagaccctgatggagtgcttcaccagcacctttgaagatgtgaagatcctggcctttgacctgctgatgaagctgagcaagacagctgtgcacttccaggacagcggcaagctgcagggcctcttccaggccgccctggagctgagcaccagcaccaagccctatgactgtgtgacagccagctacctgctgaacttcctgatctggcaggatgccctgcccagcagcctgagcgcctacctgacccagcaggtggcctgtgacaatggagacaggcctgctgctgtggtggagaggaacaccctgatggtgatcaagtgcctgatggagaacctggaggaggaggtgtcccaggccgagaacagcctgctgcaggccgccgccgccttccccatgtatggccgggtgcactgcatcaccggggccctgcagaagctgagcctgaacagcctgcagctggtgtctgagtggaggcctgtggtggagaagctgctgctgatgagctaccgcctgagcacagtggtgtcccctgtgatccagagcagcagccctgagggcctcatccccatggacacagacagcgagagcgccagccggctgcagatgatcctgaatgagatccagccccgggacaccaatgactacttcaaccaggccaagatcctgaaggagcatgacagctttgacatgaaggacctgaatgcctctgtggtgaacatcgacaccagcacagagatcaagggcaaggaggtgaagacctgtgatgtgacagcccagatggtgctggtgtgctgctggaggtccatgaaggaggtggccctgctgctgggcatgctgtgccagctgctgcccatgcagcctgtgcctgagagcagtgatggcctgctgactgtggagcaggtgaaggagatcggggactacttcaagcagcacctgctgcagagccgccacagaggagcctttgagctggcctacacaggctttgtgaagctgacagaggtgctgaaccgctgccccaacgtgtccctgcagaagctgcctgagcagtggctgtggagcgtgctggaggagatcaagtgcagcgaccccagcagcaagctgtgtgccaccaggagatctgctggcatccccttctacatccaggccctgctggccagcgagcccaagaagggccgcatggacctgctgaagatcaccatgaaggagctgatcagcctggccggccccacagatgacatccagagcacagtgccccaggtgcacgccctgaacatcctgcgggccctcttccgggacacccggctgggggagaacatcatcccctacgtggctgatggagccaaggccgccatcctgggcttcaccagccctgtgtgggccagccagatgacaggccgggagttcttcagccgcttccctgagctgtaccccttcctgctgaagcagctggagaccgtggccaacacagtggacagcgacatgggagagcccaacagacaccccagcatgttcctgctgctgctggtgctggagcggctgtatgccagccccatggatggcaccagcagcgccctgtccatgggcccctttgtgcccttcatcatgagatgtggccacagccctgtgtaccacagccgggagatggccgcccgggccctggtgccctttgtgatgattgaccacatccccaacaccatccgcaccctgctgagcaccctgcccagctgcacagaccagtgcttccggcagaaccacatccacggcaccctgctgcaggtgttccacctgctgcaggcctacagcgacagcaagcacggcaccaacagcgacttccagcacgagctgacagacatcaccgtgtgcaccaaggccaagctgtggctggccaagaggcagaacccctgcctggtgaccagggctgtgtacatcgacatcctcttcctgctgacctgctgcctgaacagaagtgccaaggacaaccagcctgtgctggagagcctgggcttctgggaggaggtgcggggcatcatcagcggcagcgagctgatcaccggcttcccctgggccttcaaggtgcccggcctgccccagtacctgcagagcctgacccggctggccatcgctgctgtgtgggccgccgccgccaagtctggagagcgggagaccaacgtgcccatctccttcagccagctgctggagagcgccttccctgaggtgcgcagcctgaccctggaggccctgctggagaagttcctggccgccgccagcggcctgggggagaagggcgtgccccccctgctgtgcaacatgggagagaagttcctgctgctggccatgaaggagaaccaccctgagtgcttctgcaagatcctgaagatcctgcactgcatggaccctggagagtggctgccccagacagagcactgtgtgcacctgacccccaaggagttcctgatctggaccatggacatcgccagcaatgaaagaagtgagatccagagcgtggccctgcggctggccagcaaggtgatcagccaccacatgcagacctgtgtggagaaccgggagctgattgctgctgagctgaagcagtgggtgcagctggtgatcctgagctgtgaggaccacctgcccacagagagccggctggccgtggtggaggtgctgaccagcaccacccccctcttcctgaccaacccccaccccatcctggagctgcaggacaccctggccctgtggaagtgtgtgctgaccctgctgcagagcgaggagcaggccgtgagagatgctgccacagagaccgtgaccacagccatgagccaggagaacacctgccagagcacagaatttgccttctgccaggtggatgccagcatcgccctggccctggccctggccgtgctgtgtgacctgctgcagcagtgggaccagctggcccctggcctgcccatcctgctgggctggctgctgggggagagtgatgacctggtggcctgtgtggagagcatgcaccaggtggaggaggactacctgtttgagaaggccgaggtgaacttctgggccgagaccctcatctttgtgaagtacctgtgcaagcacctgttctgcctgctgagcaagagcggctggaggcctcccagccctgagatgctgtgccacctgcagaggatggtgtctgagcagtgccacctgctgagccagttcttccgggagctgcccccagctgctgagtttgtgaagacagtggagttcacccggctgcgcatccaggaggagaggaccctggcctgcctgcggctgctggccttcctggagggcaaggagggggaggacaccctggtgctgtctgtgtgggacagctatgcagagagccggcagctgaccctgcccaggacagaggccgcctgctag

SEQ ID NO: 37847 - DNA, 3294 bp, Artificial Sequence
  derived and/or modified sequence
atgagcagctgccggagcctgtgctgcggcgacatcagccagagcgcagtgttgtttctgtgtcaggggactttggctatgctggactggcaaaacgggtctatgggaagaagcggtgaagcactcctgctcgacaccgcccacgtgctctttacactgtcttctcagattaaggagcccacccttgagatgttcctgtcaagaatcctggcgagctggacaaatagtgcgatccaggtactagagtcctcatccccctctttaacggatagtctgaatgggaactcctccatcgtcggaagattgctcgagtacgtgtatactcactgggagcaccccctggacgccctcagacatcagactaagatcatgtttaagaacctgcttcagatgcacaggcttacagtggagggggctgacttcgttcctgaccccttctttgtggaacttactgaatcccttctgaggctggaatggcatattaaaggtaaatacacttgcctcggctgcctcgtggaatgcataggagtcgagcacatcctcgctatagataaaaccatcccatcccagatcctggaagtgatgggtgatcaaagcctagtgccctacgcaagcgatctgctggagaccatgttcagaaaccataaatcacatctcaagtcccagactgcagaatcaagctggatagaccaatggcacgagacttgggtttcacctttgctgtttatcctgtgtgaagggaatctggaccaaaaaagttatgtgatcgattattatctgcctaaactgctgtcctattccccggaatctttgcagtacatggtcaagatcctccagacatctattgacgccaagaccggtcaggaacagagttttccttcactgggttcgtgtaactctcggggagcgctgggggccctcatggcctgtttgcggattgcacgtgcccatggccacctgcagagtgcaacagacacatgggagaacctggtctctgatgcaaggatcaagcaagggctgattcaccagcactgccaggtgcgcatcgacacactagggctgctgtgtgagtcaaatcgctcaaccgagatcgtgagtatggaggagatgcaatggattcagtttttcatcacatataatctcaactcacagtccccgggggtgagacagcaaatctgctcactcttgaaaaaactgttctgtcgcattcaagaatctagccaggtgttgtacaaactggagcagtctaaatctaagcgggagcctgaaaatgagttgacgaagcagcatccaagtgtctcgttgcaacagtataagaactttatgagctctatctgcaacagcctcttcgaggctctcttcccggggtcgagctatagcacaaggtttagcgctctcactatcctgggatctatcgcagaagtgtttcacgttccggagggccgcatttacaccgtgtatcaactcagtcatgatattgacgtggggaggttccagactctgatggagtgttttacatcaacctttgaggacgttaagatattggctttcgatctgctgatgaaactgagtaaaactgcagtgcacttccaggacagtggaaagttgcagggcctgtttcaagcagccctggaactgagtacaagcacaaagccctatgactgtgtgacagcgagctaccttctcaacttcttgatctggcaagatgcgctgccctcctccctctcggcatacttaacacagcaggtcgcgtgtgataatggagatcggccggccgctgtggtggagagaaatacactcatggtgataaaatgtctcatggagaatctagaggaggaggtttcacaggcagagaacagcttattgcaggccgcagcggcattcccaatgtacgggcgggtacactgcatcacgggcgccctccagaagttaagcctgaattcacttcagctggtgtctgaatggcgtcctgttgtggaaaagttgctgttgatgtcctatcgccttagcacagtggtgagtccagtcatccagtccagtagccctgaaggacttattccaatggacacagatagcgagtcagcctccagattgcagatgatcctgaatgaaatccagccaagggataccaatgactattttaaccaggcaaagattctcaaggaacatgattccttcgatatgaaggaccttaacgcaagtgttgtaaatatagacacctccactgagattaaaggaaaggaggtgaaaacttgcgacgtaaccgcccagatggtgctggtgtgctgttggcgaagtatgaaagaggttgcacttctcctgggaatgctatgccagcttctccccatgcagcccgttccggaaagcagcgatggcctgttgactgtcgagcaggtcaaagagatcggagattattttaaacagcacttattgcagagtcgccacagaggtgcgtttgagctcgcttatacagggtttgtgaagctgacagaggttctgaatagatgccctaacgtcagtctgcagaaactcccagagcaatggctgtggtccgtgctggaggagatcaaatgcagtgacccatctagcaagttgtgcgccacccggcgctctgccggcatcccgttctacattcaggccctccttgcgtcagagcctaagaaggggcgaatggatctgctgaagattaccatgaaggaactgatttctctggccgggccgacagatgacatccagagtacagtaccacaggttcacgccctgaatattctacgggccttgttccgagatacaaggcttggcgaaaatatcatcccttacgtggcagatggagccaaagcagctatattaggctttacaagccctgtgtgggccgtgcgcaacagcagtaccctcctcttcagtgcactaatcacacgtatttttggggttaagcgcgccaaggacgagcactcaaaaaccaaccgaatgactggacgcgaattcttctcaaggttccccgagttataccctttcctcttgaaacagctggaaaccgtcgctaatacagtggattctgatatgggggaacccaatcgccacccatcaatgttcttactcctcctggttcttgagcggctctacgcatccccaatggacggcacatcttctgcgctcagcatgggaccttttgtgccatttattatgcgcgtgctcctctgttgcccaggttggagcgctgtagcgcggagccagcttaccgcaacctctacctcatgggtgcaggccattctccttccccagccccccgagtag

SEQ ID NO: 37848 - DNA, 5862 bp, Artificial Sequence
  derived and/or modified sequence
atgggcgtgaagaagaagaaggagatgcaggtggccgccctgaccatctgtcatcaggatctcgagacactcaaatctttcgccgacgtggaggggaaaaacctagctagtctgctgctgcactgcgtccagctgacggacggtgtgtcccagatccattacattaaacaaatcgttcccctgctggagaaagccgataaaaatggtatgtgtgatcctaccattcagtcttgcctggatatactcgcggggatctacctttccctgagcttaaaaaacccactgaaaaaggtgctggcgagctccttgaatagcctccccgactttttcctgccagaggcaatgcatagatttactagtcggcttcaagaagagctcaatactacagacctctacagttaccgaaaagtgaccgacaacatctcatcctgtatggaaaattttaacctcggaagggcaagtgttaataacctgctcaaaaacgtgttgcattttcttcagaagtccctgatagagatcctcgaggagaataggaagtgcgctgggaaccatataattcaaacgcagcttatgaatgaccttctcgttggcatacgcgtatccatgatgctggtccagaaggtccaggattttcagggaaatctgtggaaaacttctgactcacccatttggcagaatatgtgtggacttctgtccatttttactaaagtgctgagcgacgatgatctccttcagaccgtacagtccacatccggtctcgctatcatacttttcataaaaactatgttccatccctctgagaagatcccccacttaatctcaagtgttttgcttcgatctgtggattgcaccagcgtacctgagtggttcatgtcctcttgtaggagcttatgctgtggggacatctctcagtccgcggtgttgttcctttgccagggaactctggcaatgctggattggcaaaacggctcgatgggaaggagcggagaggcactgctgctggacacagcccatgtgctgttcactctaagttcacagataaaagaaccgacattggagatgtttctgagcagaatccttgctagctggacaaactctgccattcaggtgctggagtcctcctccccatcactgacggactccctgaacggcaactcttccatagttggaagactgctcgaatacgtttacacacattgggagcatccactcgacgctctgcgccaccagaccaaaatcatgtttaagaacttgttgcagatgcatcgccttaccgtagagggcgcggatttcgtaccagacccgttctttgtcgaattgaccgaaagccttctgcgtctggagtggcacataaaggggaagtacacttgtctcggctgtttagtggagtgcattggcgtggaacatattctggcaattgacaaaaccattcctagccagatcctagaggtcatgggcgaccaatctcttgttccttatgcgtccgatcttttggagaccatgtttcgaaaccacaagagccatctgaagtcgcagaccgccgagagttcatggattgatcaatggcacgaaacctgggtctctccactcctttttatattgtgtgagggcaacctcgaccaaaagtcctatgtcattgattactacctcccaaagcttctctcctacagccctgagtccctccagtatatggttaagattcttcagacctcaatcgacgccaagaccgggcaggagcagtcttttcctagccttggatcctgtaattcgcggggcgcgcttggagctctaatggcctgccttaggatcgccagagcgcacggacatctgcaaagcgctacagatacatgggaaaacttagtgtccgatgcccgcatcaaacaggggcttatccatcagcactgtcaagtgcgtatagataccctggggcttctctgtgagagcaatcggtccacagaaatcgtgagcatggaggaaatgcagtggatccagttttttattacatacaatttgaatagccagagtccaggagtgcgtcaacaaatatgcagcctactcaaaaaactgttttgcaggattcaggaaagcagccaagttttgtacaaactggaacaatctaagtccaagcgagagcctgagaacgaactcacgaagcagcaccctagcgtgagcctgcaacagtacaaaaactttatgtccagcatttgtaacagtctcttcgaagctctgtttccaggatcaagttacagcacacggttctccgccctcacgatcctgggatccatcgctgaggtctttcatgtgcccgaaggaaggatttatacggtataccaactgtctcatgacatcgacgttgggaggtttcaaactttaatggagtgcttcacatctacattcgaggatgtgaagatcttagcttttgacttgttgatgaagttgtctaagaccgctgttcacttccaggactccggtaagctccaggggctgttccaggccgctctcgagctctctacttcgacaaaaccatatgattgtgttaccgcatcctacctgttgaacttcctcatctggcaagatgcactgccctccagcctttcggcatacctgacacagcaagttgcttgcgataacggcgatcggcctgccgctgtggttgagcggaatactttgatggtgattaagtgtcttatggagaacttggaggaagaggtatcccaggccgagaattctctcctgcaggccgctgccgcttttcccatgtacggccgcgttcactgcataactggtgccttgcagaagctgtccctaaacagtctgcaactggtcagcgagtggcgccctgtcgtcgaaaaactgctcttaatgtcctatagactgtctactgtcgtgagcccagtgatacagtccagcagcccagaggggctcatcccaatggatacggactctgagtcagcaagccgcctgcagatgattcttaacgaaatccagcctagggatactaacgattatttcaaccaggcaaaaatcctgaaggaacacgactcgttcgatatgaaagatctcaacgcgagcgtagtgaatatcgacaccagcacggagatcaagggcaaggaggtcaaaacctgtgatgtgacagctcagatggtcttagtgtgctgctggcgctctatgaaggaagtggctctgttactgggcatgttatgtcagctgctcccaatgcagcctgtccccgagagttctgatgggttgctgacagttgaacaggtcaaggagatcggagattacttcaaacagcacctgctgcaatctaggcacagaggggctttcgagctcgcttacaccggctttgttaagttgactgaagtgctcaaccgatgccctaatgtttcactacagaaactgcccgaacagtggttatggagcgtcctagaagagattaagtgctccgatccatcctccaaactgtgcgctacaaggcgtagcgccgggattccattttatattcaagctctgttggcttcagagcctaagaagggtcggatggatctattgaagattacaatgaaagaactcatctcactcgcaggacctaccgatgatattcagtccaccgttccacaagtccatgccctaaatattctgagagcacttttcagagatacgaggcttggtgaaaatattataccatatgtggctgacggcgctaaggctgcgattttaggcttcacctcaccagtctgggcggtgcggaatagctcaactcttctcttctccgcactcatcacacgtatcttcggtgtgaagcgggctaaggatgagcattctaaaactaacagaatgacaggcagggagttctttagccggtttccagaactgtatccgtttctgctgaaacaattggagaccgtggccaacaccgtggattcagatatgggcgagcctaatagacatccctcaatgtttctgttattgctggtgttggagagactgtatgcctcccctatggatggcacctcttctgccttatccatgggaccctttgtgccattcattatgagatgtggccatagtcctgtctaccattcccgcgagatggccgcaagagcactggtacctttcgtcatgatcgaccacattcccaacactatacgcacattgctgtccaccttgccatcctgcacagaccagtgttttaggcaaaatcacatccacggaacactgttacaggtgttccatctgctgcaagcctacagcgattcgaaacatggaacgaattcggacttccaacacgaacttacggacattaccgtctgcactaaagccaagctctggttagccaagcggcagaacccatgtttggtgacccgggcggtgtacatcgacatacttttcctgcttacttgctgtcttaacaggtctgctaaagataaccagccagtcctggaatcgctgggattctgggaggaagtgcgaggaatcatctccggtagcgaactgatcaccgggttcccttgggctttcaaagtacccgggctgccccaatacctgcagtcattgacacggctagctattgcagccgtctgggcagccgcagctaagtcaggggaacgcgagacaaacgttccaatctccttttctcagctgttggagagtgcttttccagaggtgcggagtctcactctggaggctctgctggagaagtttctggccgcagcttccggacttggcgagaaaggggtgccccctctgctgtgtaatatgggggaaaagttcctcctcctggccatgaaagagaaccatccggagtgcttttgcaaaatcttgaagatactgcactgcatggatcccggcgagtggctgccacagaccgagcattgcgtgcacttgactccaaaagaattcttaatatggaccatggacattgccagtaatgagcgcagtgagatccagagcgtggccctcaggctggcctctaaagtgattagccatcatatgcagacctgcgtagaaaatagggaactgattgctgctgagctcaagcaatgggtccaacttgtgatcttgtcgtgcgaggaccacctgccaacagaaagtcggctcgcggtcgtagaggtgcttacttcaacaacccctctcttcctaacgaatcctcatcctatcctcgagctgcaggataccctggccctttggaaatgcgtcctaactctgctacagtcggaagagcaggcggtccgcgacgccgcgaccgagaccgtgacaacagcgatgtctcaggagaacacttgccaatcgacagagttcgcattctgccaagttgacgcctctattgcactcgccctggccttggccgtgctttgcgatctgctgcagcagtgggaccagctggcccctgggcttcctattctgctaggatggttgctgggagaaagtgacgatttggttgcttgtgtggaaagtatgcaccaggttgaggaggactacttgttcgaaaaggccgaggtcaacttttgggccgagactctgatcttcgtcaagtatctgtgcaagcatctgttttgtttgttgtcaaaatccggatggcggcccccatctccagagatgttatgccacctacagcggatggtgagtgagcagtgccacttgctgtcgcagtttttccgggagctgcctccagcagccgagtttgtgaagaccgtcgaatttactcgcctccgaattcaggaagaaagaaccctggcttgtctacggctcttggcatttctcgaagggaaagaaggcgaggacacactggtgctgagtgtctgggattcttatgccgaatctcggcaactgaccttgcctagaaccgaagcagcttgttag

SEQ ID NO: 37849 - DNA, 5862 bp, Artificial Sequence
  derived and/or modified sequence
atgggcgtgaagaagaagaaggagatgcaggtggccgccctgaccatttgtcatcaagacctggagactttgaaatcatttgcagatgtcgaaggcaaaaacctcgccagcctgctgctccactgcgttcagctcactgacggagttagtcagatccactatatcaagcaaatcgtacccctactagaaaaggctgacaaaaatggaatgtgcgaccccacgatccaaagttgtctggatatccttgccggcatctacctgtctctcagtttgaaaaacccactcaaaaaagtgctcgcatcctctttaaatagcctacccgatttttttttgccggaggctatgcacaggttcacttcaagactgcaggaagagcttaatacaactgatctgtatagttatcgaaaggtgactgacaacatatcttcctgtatggagaatttcaatctggggagagcctcggtaaacaaccttctaaagaatgtgcttcactttctgcagaagtccttgatagaaattctggaagagaaccggaaatgcgccgggaatcatatcattcagacacagctgatgaacgaccttctggtaggcatcagagtctccatgatgctagtccagaaagtacaggatttccaggggaacctttggaagacatcggactccccgatatggcagaacatgtgcgggttactgagtatattcaccaaagtcctgtccgatgacgacctgctgcagactgtccagtcaacaagtggcctcgcgatcatacttttcattaaaacgatgttccaccccagcgaaaagattccccacctaatatcttctgtcctcctgagatctgtggattgcacatcagttcccgagtggttcatgagttcttgtcggagcctgtgttgcggtgacatttctcagtccgcagtgttgttcctgtgccagggcacactggccatgctggattggcagaacggcagcatgggtcggtccggagaagccctgctcctagatacagctcacgtgctctttacactatcctctcagatcaaggaacccactctagagatgttcctgtctaggatattggcctcttggaccaactctgcaattcaggtcttggagtcctcgtccccttctcttaccgattccctgaacggaaatagtagcattgtgggacggctcctcgagtatgtgtacacacactgggaacatcctcttgatgccctcaggcaccagaccaagattatgttcaagaatctgctgcagatgcataggctcacagtggagggagccgattttgtacccgatcctttcttcgtcgaacttacggaatccttattgcgtttggagtggcacattaaggggaaatatacctgcctaggctgcctggtggaatgcatcggtgtcgagcatatcctggcaatagataaaacgatcccgagccagattttggaagtaatgggagaccagtctttagtgccctacgcctcagatcttcttgagacaatgttccggaatcataagtcccacctcaaatcccaaaccgctgagagctcctggatcgaccagtggcacgaaacctgggtctctccactgcttttcattctctgtgaaggtaacctggatcagaagtcatacgtgattgattactacctgcccaagctgctcagttactccccagagtctttgcaatacatggtaaagatcctgcagacctctatcgacgcaaagactggtcaggaacagagcttcccgagcctgggctcatgtaatagtagaggagctctgggtgccctcatggcatgccttcgcatcgcgagagcccacgggcacttacagagtgcaacagatacatgggagaacttagtctccgacgcaagaatcaaacagggactcatccatcagcactgtcaggttcggatcgacactcttggtttactgtgcgagtccaatcggagcacagagattgtatctatggaggaaatgcagtggatccagttcttcatcacttacaacttgaactcccaatcccccggcgtcagacagcagatctgctcattacttaagaaactgttctgccggattcaggaatcatcacaagtgctgtacaagttagagcagtccaagtctaagagagagcctgaaaacgagctcactaaacagcacccttcagtgagcctacagcagtacaaaaactttatgtcatcaatctgtaatagcctttttgaagcgctgtttccaggatcctcttatagcacacgcttttccgctctgactatcttggggtccattgccgaagtgtttcacgtccctgagggtcggatatatacagtgtaccagctctcccatgatattgatgtggggcggttccagacactgatggaatgtttcacctcgacattcgaggacgtgaagattcttgctttcgatctgttaatgaagcttagcaagactgcagtccatttccaggactcaggaaaactgcaagggttgtttcaggctgccctcgaactgtcaacttctacgaagccttacgactgcgtcactgcttcttacttgctgaacttcttgatttggcaggacgccctgccgtcctctctctctgcgtatctcacccagcaagtggcttgtgacaacggggaccgcccagctgcagtggtggaaagaaacaccctcatggtgataaaatgtctgatggaaaatctcgaggaggaggtcagtcaggcagagaacagcttactgcaggccgcagcggccttcccaatgtacgggcgcgtgcattgcatcacaggagcactgcagaagttgagcttgaatagcttacaacttgtctctgagtggcgtcccgttgtagaaaaactactcctcatgtcatatcgactgtccaccgtcgtgtctcccgtgattcagagcagctcacccgagggactgataccgatggacaccgacagcgagagtgccagcagacttcagatgatcctgaatgaaattcagccacgagatacgaacgactacttcaatcaggctaagattctgaaggagcatgactcttttgatatgaaggatctgaatgcatcggtggtgaacatcgacacaagtaccgagatcaaaggaaaggaggtgaaaacctgtgacgtcacagcacaaatggtgctggtgtgctgttggagatccatgaaagaagttgcgctcttgcttggaatgctgtgccagctgctaccgatgcaaccagtgcctgaatctagtgatgggctgctaactgtcgaacaggtaaaggagattggcgattacttcaagcagcatctcttgcagtccagacaccgaggagccttcgaactggcttacacaggttttgtgaaactgacagaggtgctgaacaggtgtccgaatgtgagcttgcagaaattacctgaacagtggttgtggtccgtactggaggaaattaaatgttctgatccatctagcaagttgtgcgccactcgcagatctgctggaatccctttttatatccaggctctactagctagcgagcccaagaaaggtcgcatggatcttctcaaaattaccatgaaagaactcatatccctcgccggcccaacagacgatatccagtccactgtgccgcaggtacacgccttgaacatcctcagggcgctctttcgcgatactcgcttgggcgaaaatatcatcccttacgtggccgacggtgcaaaagctgccatactggggttcacaagcccggtgtgggctgttcgaaattcgtcaacgctactcttcagcgcactcatcacgagaattttcggggtgaagcgcgcaaaagacgagcactccaagaccaaccggatgacagggcgcgagttcttctctcggtttcctgagctgtatccatttctgctcaaacaattagagaccgttgctaacaccgtcgattcagacatgggagagccgaatcgccatccatctatgttcctccttttactcgtgctggagcggctttacgcttcccccatggacggcactagctcagccttgtctatgggccctttcgtaccgttcatcatgcgctgcgggcattcccccgtgtatcactctcgtgaaatggctgctagagctctggtgcccttcgtaatgatcgatcatatccccaacactatcaggacattgctgtcaacactccccagctgcacagatcagtgctttcgtcagaaccatatccacgggacactcctgcaggtgttccacctgctgcaggcttatagcgactctaaacatggcactaattctgacttccagcacgagctgacggatatcactgtgtgtacaaaggcaaaactatggctcgcaaaaaggcaaaatccatgtcttgtgaccagggccgtctacatcgatatcttatttctgctgacatgttgcctcaatagatctgcgaaagacaaccagccagtgctcgaaagcttgggcttctgggaggaagtcagggggataattagtggatccgagttaattacagggttcccttgggcatttaaggtgcccggtttgccacagtatttgcagagcctgacaaggttagccatagccgccgtgtgggccgccgccgctaaatcgggagagagggaaactaacgtacctatctccttttcacagctcctggagtctgcattccccgaggttaggtccttaacgctggaggcgctactggaaaagttcttggcagccgccagcggcctcggagagaaaggcgtgccacccctattgtgcaatatgggtgaaaaattccttcttctggctatgaaggagaatcaccccgaatgtttctgcaagattctcaagattctgcattgcatggaccccggagagtggctcccgcagactgagcactgtgtccatctgaccccaaaggaatttctgatctggacaatggacatcgcctccaacgaaagatcagaaatccagagtgtggccttacgcctcgcctccaaagtgatctctcatcatatgcaaacctgcgtggagaacagggaacttatcgctgctgaactcaagcagtgggttcagctggtgatcttgagttgtgaggaccacctgccgactgaatcaagactggctgtcgtagaggtgcttacctccacgaccccactgtttctcactaatcctcatcctatactggagctccaggatacccttgctctgtggaaatgtgtgctcacgctcttacagtcagaggaacaggccgttcgggatgcggcaaccgaaacagttaccactgccatgtcacaggagaatacatgccagagcacagaatttgcattctgtcaagtggacgcatccattgctctcgccctagccctggctgtgttgtgtgacttgctgcagcagtgggatcaattagcccccggcctgccaattctcctgggctggcttttgggcgagagtgacgatcttgtcgcctgcgtggagagcatgcaccaagtggaagaggactaccttttcgagaaggcagaggttaatttctgggctgaaacattaattttcgtgaagtatctgtgtaagcacctcttctgtttattgtcaaagtccggttggcgccctccgtcgccagagatgctgtgccacctccagcggatggtgagcgagcagtgtcacctactctcacaattttttcgcgagctgccccccgctgctgagttcgtaaagaccgttgagttcacccgactgaggatccaagaggagagaaccctggcatgtctgagacttctggcatttttggaaggtaaagagggcgaggataccttggtcctcagcgtgtgggattcatacgctgagtcccgtcaactcactttaccgaggaccgaggctgcttgttag

SEQ ID NO: 37850 - DNA, 4905 bp, Artificial Sequence
  derived and/or modified sequence
atgagcagctgccggagcctgtgctgcggcgacatcagccagagcgcagtgctcttcctatgtcagggaaccttagctatgctcgactggcaaaacggttctatggggcgcagtggcgaagccctcttactcgacactgcccatgttctgtttacattgagttcccagattaaggagcctactctggaaatgttcctgtccagaatccttgcctcctggactaactcagctatccaggtacttgagtcctcctctccctctttgactgacagcttgaatggaaacagttcaatcgtcggccgcttattggagtatgtgtacacacactgggaacaccctcttgatgcccttaggcaccaaaccaagattatgttcaagaaccttctgcagatgcacaggctcaccgtcgagggcgcagactttgtccccgaccctttttttgtcgagctcacagagagccttcttagattggagtggcatatcaaaggcaaatacacatgcctgggctgtctggttgaatgcattggcgtggagcacattctcgccatcgataaaactatacctagccagatcctcgaggtcatgggcgatcagagcctcgtgccctatgctagcgacctcctggagaccatgtttcgcaaccacaaaagccacctcaagtctcagaccgctgaatccagctggattgaccagtggcacgagacgtgggtgagccctcttctgtttatcctgtgtgaagggaacctggaccagaaaagctatgtcatcgattactacctacctaagctcttgtcttactctccagagagtttacaatatatggtgaaaatcctgcagaccagcatcgatgcaaaaacaggccaggaacagagcttccccagtctcgggagttgcaattctaggggggctctcggcgccctgatggcctgtttgaggatagcgcgcgcccacggacaccttcaatccgccaccgacacatgggaaaacttggtttcagatgcccgaatcaagcagggtctcattcaccagcattgccaagtacgcatagacacattgggtctgttgtgcgagagcaacaggagtacggagattgtgagtatggaggagatgcaatggatccaatttttcatcacatacaatcttaatagtcaatcccctggggtgcggcaacagatttgctccctcctcaagaaattattctgccgtatccaggaatcctcacaagtgttgtacaagcttgaacagagcaaaagtaagagagaacctgaaaacgagttgacaaagcagcatccttccgttagtctgcagcaatataagaatttcatgagctcaatctgtaattccctgttcgaggccctctttcctggatccagttattcaacccgcttttccgctcttaccatattgggtagcattgctgaggtcttccacgtccccgagggacgtatatacaccgtttaccagttatctcatgacatcgacgtcggaaggttccagactctcatggaatgctttacttccacgttcgaagatgttaagatcctcgccttcgatctgctgatgaagctgtcaaagacggctgtccacttccaggactccgggaaactacagggcctgtttcaagccgcactggagctgtcaacctctaccaagccgtatgactgcgtgactgcctcctatctgctgaatttcctaatttggcaagatgccctgccctcttcactttccgcctacctgacacaacaggtggcgtgcgataacggcgacagacctgctgctgtggtggagaggaacacactgatggtgatcaaatgtctgatggaaaacctggaagaagaagtcagccaagctgagaactctctgctgcaggctgccgccgctttccccatgtatggccgagtacactgtattacaggggcccttcagaagctcagcctgaactctctacagctagtgtctgagtggagaccggtggtcgaaaaattgctgctcatgtcctacagactgtcgacagtggtgtcccccgtgatccagtccagtagccccgaggggctcatacccatggacactgattccgagtctgcttcaaggctccagatgattctcaacgagattcagccccgtgataccaatgactacttcaaccaggcaaagattctgaaagaacacgattccttcgatatgaaggatctgaacgcttcagtggtgaatattgacacgtcgaccgagattaaaggcaaggaggtgaaaacctgcgatgttacagcccaaatggttcttgtgtgctgctggcggtctatgaaagaggttgcccttctgttagggatgctatgccaactgctgccaatgcagcctgtgcccgagtcttccgatggtctgctaactgtagagcaggtcaaagagatcggcgactacttcaaacagcatctgctgcagtctcgccataggggagcattcgaactggcctacactgggttcgttaaacttactgaagtgcttaaccgttgcccaaatgtgtcgctacaaaaacttcctgagcaatggctgtggagcgtgctggaggagattaaatgcagcgaccccagttcgaagctgtgcgccacgagaagaagtgcaggcatcccattctatatccaggctctgctggcaagtgaacctaagaaaggacgcatggatctgctgaaaatcacgatgaaggaattgatttcactcgcaggccccactgacgatattcagtccaccgtgccacaggtacatgccttgaacatcctgcgggcactgtttcgggataccagacttggcgagaacatcattccgtacgtggcagacggggcaaaagcggccatactgggcttcacttcccccgtgtgggcttcacagatgacagggagagaattcttttctcgatttcccgaattgtatcctttcttactgaagcaattggagactgttgcgaacacggtggactccgacatgggcgaacctaatagacacccttctatgttcttgctgttactggtgctcgaaaggctgtatgcaagtcccatggacggtaccagttcagccttgtccatgggcccttttgtgccctttattatgcgttgcggacactcacctgtgtaccactctcgcgaaatggccgctcgcgcactggtaccttttgtgatgatagaccacattcccaacaccattagaaccttgctgtccactctgccatcgtgcaccgaccagtgttttcgccagaaccacattcatggaacactgctccaggtgttccacctactgcaagcatacagcgactccaaacacggcactaacagcgattttcagcatgagctgactgacattacagtttgcacaaaggccaagctgtggttggccaagcgccagaacccgtgtctggtgacccgggcggtgtacatagacatcttgtttctactcacatgttgtctgaataggtctgccaaggacaatcagcctgtgctggaatccctgggattttgggaagaagtgcgagggatcatttctggatccgagctgattacggggtttccttgggcattcaaagtgcctggcctcccccagtatttgcaatcccttactagacttgcgatcgccgccgtgtgggccgctgccgccaaaagcggtgagcgggagaccaatgtgccaatctccttttctcagttgctggagtctgcttttccagaggtcagatctttgactttggaagcactgttagaaaagtttctcgccgctgcctcgggtttgggggaaaaaggagtaccaccactcttatgcaatatgggcgaaaaatttctgctcttggctatgaaggagaatcatcccgagtgtttttgtaagattctgaaaatcctccactgcatggatcccggggagtggcttcctcagaccgagcactgtgtccaccttacacccaaagaattcttaatttggacaatggacatcgcctccaacgagcgcagcgagattcagagcgtggccctccgtctggcttccaaagtgatatcacaccacatgcagacctgcgttgagaaccgagaactcatagccgccgagctaaagcaatgggtccagctagtgattttatcgtgtgaggaccatctgccaactgagagccgcctggctgtggtggaggtcctcacgagcactaccccactgttcttaaccaatcctcatcccatccttgagctgcaagacaccctagctctgtggaaatgtgtgcttaccctgctgcagagtgaggagcaggcagtgagagacgcggccaccgagaccgtgacgacggccatgagccaggagaacacatgccagtcaaccgaatttgctttttgtcaagttgatgcaagtatcgcgctcgcactcgctttggctgtgttgtgcgacctgttgcagcaatgggaccagttagcccccggtctgccaatactcctgggatggctgttgggggagtcagatgacttggtggcgtgcgtcgaaagtatgcatcaggtggaagaagattacctctttgagaaagccgaggttaatttttgggccgagactctgatctttgtgaaatacctttgtaaacatctcttttgtctgcttagtaagtccggatggaggcctcctagcccagaaatgctgtgccatttacaacggatggtgtccgagcagtgccatctgctgagccagtttttccgagagctgccacctgcagcggagtttgtaaagacggtcgaatttacaaggctgaggatccaggaggagcgaactttggcctgtttgaggttactggcttttctggaagggaaagagggcgaggatacactggtgctgagcgtttgggatagctacgccgaatcacgccaactcacactgccgcgcactgaggccgcctgctag

SEQ ID NO: 37851 - DNA, 3294 bp, Artificial Sequence
  derived and/or modified sequence
atgtcatcatgtcgctccctatgctgtggagatataagccagtcagcagtcctgtttttgtgccagggtaccctggcaatgctggattggcagaacggatccatggggcgatctggggaggccctcctcctggacacagcccatgtgctgtttaccctctcgtcacaaatcaaggagcctacacttgaaatgtttctgtctaggattttggcctcctggactaacagcgctattcaggtactggagagtagttcccccagtctgacagactcactgaatggtaatagctctatagtcggacgcctcctggaatacgtctatacccactgggagcaccctctcgatgcccttaggcatcaaaccaagattatgttcaaaaatctgttgcaaatgcaccgtctgaccgtggaaggtgctgattttgtccccgacccattcttcgtagaactgacagagtcattactgagactcgagtggcacataaaagggaagtacacttgcctgggatgccttgtcgagtgtattggcgtggagcatatcttggcgattgacaagactattccctcacagatactagaggttatgggcgatcagtcactggtgccatacgcgagcgacctgctggaaactatgttccgaaaccacaaaagccatctcaaatctcagaccgctgaaagcagttggattgatcagtggcacgagacatgggtaagtcccctgctattcattctctgtgaaggcaacctggatcagaaaagctacgtgatagattactatctcccaaagctgctatcgtattcccccgaatcactccaatacatggttaagatcctccaaaccagcatcgacgctaaaaccggccaggagcagtctttcccttccttgggctcttgtaatagcaggggggctctgggggctttgatggcctgcctccgtattgcccgtgcacacggacacctgcagtctgctacagacacctgggagaacctcgtatcggatgcacgcattaagcaaggcctgattcaccagcattgccaggtcaggatcgacacgctcggtctcctatgtgaatccaaccggagcacggaaatcgtaagtatggaagagatgcagtggatacagtttttcataacctataacctcaattctcaatcacccggagtgcgtcagcaaatctgcagtctgctcaagaaactcttctgccgaatccaggagtccagccaagtgctatacaaactggaacagtcaaaatccaaacgcgaacccgagaatgagctgaccaaacagcatccttccgtgtcgcttcagcagtacaagaattttatgtcctccatctgtaacagcctctttgaggccttgtttccaggctccagttacagcacccgctttagtgctctgacgatccttgggtccatcgccgaggtgttccatgtgccagagggacgaatctataccgtgtaccagctttcacatgacatcgacgtgggtcggttccagaccctgatggagtgctttactagcacctttgaggatgtgaaaattctggcattcgacctgctaatgaaactgagcaaaacagcagttcacttccaagactccgggaagctgcaggggctgtttcaggcagcactggaactgtctacatctacaaaaccgtacgattgtgtgaccgcctcatacctgttgaatttcctcatttggcaggatgccctgccgtcgtctctttcagcgtatcttactcaacaagtcgcctgcgacaacggggacaggccggcagcagtggttgaaagaaatactttgatggtgattaaatgcttgatggagaatctggaagaagaagtctcccaggcggaaaattccctgctgcaagcggcagccgcttttcccatgtacgggagagtacactgcataaccggcgctcttcagaaactgagcctcaactctttacagttggtgtctgagtggcggccagtggtcgaaaagctgttactgatgtcgtacagactgtcaaccgtggtgagcccagtgatccaatcctcttccccagaaggcctaatcccaatggatactgattctgaatccgccagtaggctgcagatgattcttaatgaaatccagcctcgcgacaccaacgattattttaatcaggctaagatactgaaggaacacgactcctttgacatgaaagacctaaacgcctcagtggtgaatattgacaccagtactgagataaagggcaaggaggtgaaaacatgcgatgttaccgcccagatggtcctcgtatgttgctggcggtcaatgaaagaggtcgccctgctcctggggatgctctgccaactactgcctatgcagcctgtgcccgagagcagcgacgggttgcttaccgtggagcaggttaaggagatcggggactatttcaagcagcacctgttacagagtcgccatcggggtgcctttgagcttgcatacacagggtttgtcaagcttactgaggtccttaatcgatgtcctaatgtgtcactgcagaaactccctgagcaatggttgtggagtgtgctagaagagatcaagtgttctgatccttcatctaaactatgcgctacaaggcggagtgcaggcattccattttacatccaggcccttttagcctctgagcccaagaagggacggatggatttgctgaaaatcacaatgaaggaactgatcagtctggcaggccctaccgacgacattcaatcaacggtgccccaagttcatgccctgaacatccttcgagccctgtttagggatacgcggctcggtgagaatattatcccctatgtagctgacggggctaaagcagccatcctgggttttaccagtcccgtgtgggcggtgaggaatagtagcaccctgctctttagtgctctgatcacaagaatttttggtgtgaagagagcaaaggacgaacattccaagacaaatagaatgacaggacgagaattctttagtcgcttcccggagctgtatccttttttactgaaacagcttgaaaccgttgccaacacggtggactcagacatgggggagccaaatcgacatcctagcatgttcctgctacttctggtacttgaacgcctctacgcttctcccatggatggaacaagcagcgccctgagtatgggccctttcgtaccctttataatgcgggtactgctgtgctgtcctggctggtccgccgtggccagatctcaactgacagccacaagtacgtcttgggtgcaggctatactccttcctcagcctcctgagtag

SEQ ID NO: 37852 - DNA, 5861 bp, Artificial Sequence
  derived and/or modified sequence
atgggtgtcaagaaaaagaaggagatgcaagtagccgcactaacaatttgccatcaggacttagagacactgaaatcttttgctgatgtcgagggcaaaaacctcgcctccttgctactgcactgtgttcaattgacagacggagtgagccagattcactacatcaagcagatcgtccctcttctggaaaaggctgacaagaatggaatgtgtgaccctacaatccagagctgcctggatatccttgccggaatctacctctcactttctttgaagaatcccttaaaaaaggtgctggcctcttctctcaacagcttgcccgatttcttcttgccggaagctatgcaccgctttacaagccgactccaggaagaactgaatacaaccgacctttacagctatcggaaagtgactgataacatctcaagttgcatggagaatttcaaccttggccgtgccagcgttaataacctactcaaaaatgttttacattttctgcaaaaatcccttatcgagattttggaggagaaccgaaagtgcgcgggtaatcacatcatccagacacagcttatgaacgatctcttagtggggataagagtctcaatgatgttagtacagaaagtgcaggatttccaaggcaatttgtggaaaacctctgacagtcctatttggcagaacatgtgcgggttactttccatctttacgaaggtgctttctgacgatgatcttttgcagactgtccagagtacctcaggcctcgccatcatcttatttataaagactatgttccacccttctgaaaaaatcccacaccttattagcagtgtgttattgaggtcagtggactgtacctccgtgcccgaatggttcatgtcctcatgccgctcactctgctgcggtgacatatctcaaagcgccgtcttgttcctgtgccagggcacactcgcaatgctggattggcagaacggctctatgggtcgctccggtgaggccctgcttttggacacagctcacgtactgttcactctcagcagtcagattaaagaacccaccctggagatgtttctctcaaggattctggcgagttggaccaactccgctattcaggtgctcgaatcttcctctcctagtctgactgattctctgaatggtaattcttcaatcgtgggcagactcctagaatacgtctacacacattgggagcacccacttgatgccctgcgacaccagacaaaaattatgtttaaaaacctgctgcagatgcatcgtttaacggtagaaggcgcagacttcgtgcctgatccattctttgtggaactcaccgaatcgcttctgcgccttgaatggcacattaagggcaagtacacctgcctggggtgcttggttgagtgcatcggggtggaacacatcctggcgatcgacaagacaattccaagccagatcctggaggtgatgggcgatcagtcgttagtgccgtacgcctctgacctgctcgaaaccatgtttagaaaccacaagagccacctgaagagtcagactgccgagtcctcctggatcgatcagtggcacgagacttgggtctccccccttctgttcattctgtgcgaaggaaacttggaccaaaagtcttatgtcattgattattacttgccgaagttgctgtcctacagcccagaaagcctccagtacatggttaagattcttcagacctctatcgacgcaaaaactgggcaggagcagagtttcccatccttgggttcatgtaactcccgtggagctctgggagcccttatggcctgcctgaggattgccagggcgcacggtcacctgcagtccgcaactgacacctgggagaatttagtttccgacgctagaattaaacagggtctgattcaccaacattgtcaggtgcggatcgacacgctaggcctactgtgcgaatcgaaccggagtacggagatcgtgtcaatggaggagatgcagtggattcaattcttcatcacctacaatctgaatagccagagtccgggagtgaggcagcagatttgctcattgctgaaaaaactgttctgccgcatccaggaatcctctcaagtactgtataaattagaacagagcaaaagcaagcgagagcccgagaacgagttgacaaagcagcacccctctgtcagcttgcaacaatacaagaatttcatgagcagcatttgtaacagcttgttcgaggcactctttccaggcagctcttattctaccagattctcagccctgacgattcttgggtcaatagccgaggtctttcatgttccggaaggaaggatctacacggtttaccagttgagccacgacatcgacgtcggtcggtttcagacgctgatggagtgtttcaccagcacgttcgaggacgtcaagatccttgctttcgacctgctgatgaagctgagcaagacggcagtgcacttccaggattccggaaaactccaaggcctgtttcaggccgctttggagctctcaacaagtacgaaaccatacgattgcgtcacggcttcatatctcctgaacttcctcatatggcaggatgcattaccatccagcctaagcgcatatctgacccagcaggtggcgtgtgacaatggggacaggccagcggctgtcgtcgagcgaaataccttgatggtaattaaatgtttgatggagaatcttgaagaagaagtttcccaggcagagaattccctgttgcaggcagcggcagcattccctatgtatggccgagtacactgcatcaccggcgcactgcagaaactgagtttgaacagcctgcagttggtaagcgaatggcggcctgttgtggagaagcttttgctaatgagctaccggttatccactgtggtgagtccagtgattcaaagcagcagccctgagggtttgattcccatggacaccgattcagaatctgccagtaggctgcagatgatcctcaacgaaattcaaccgagagacactaatgattactttaatcaagctaaaattctgaaggagcatgactccttcgacatgaaggatctgaacgcatccgtcgtcaatatcgacaccagtacggaaataaaggggaaggaagtgaaaacctgcgacgtgactgctcagatggtcctggtttgctgttggaggtcgatgaaggaggtagcattactgctaggcatgctgtgccagctattgcccatgcaacccgtacccgagagctctgacggcctcttaactgtcgagcaggtcaaagagatcggggactactttaagcagcatttactgcagtctaggcaccggggtgctttcgaattggcctatacaggatttgttaaactcacagaggttctaaatcggtgcccgaatgtgtccctgcagaagctcccagagcagtggttatggagtgtgctcgaagaaatcaagtgttccgacccctccagcaagctgtgtgctacacggcgtagcgctgggatacctttctatatccaggctttacttgccagcgaacccaagaaggggagaatggatctgttgaagatcaccatgaaggagctgatcagccttgctggcccaactgatgacatccagtccactgtcccccaagtgcatgctctcaacatcttgcgcgcactcttcagggacacacgtttgggcgagaatatcatcccttacgttgcagacggcgctaaggcagccattctgggcttcacatcccctgtttgggcagtcagaaactctagcactttgctcttctctgccctgataacaaggatcttcggggtgaagagagctaaagatgagcattctaaaaccaaccggatgactgggagggaattcttctcaagatttccagagctatatcctttcctgcttaaacagctcgaaacagtcgccaacacagtggactcagacatgggagaacccaacaggcacccatccatgtttttgttgctcttagtcctcgaacgactgtacgcatctcccatggacggcacctcaagtgctttgagcatgggcccttttgtcccctttatcatgagatgcgggcacagcccagtataccactcccgcgaaatggccgcacgtgcgttggtgccattcgtgatgatcgatcacattccaaacaccatcagaaccctgctctctacgctgcccagttgcactgatcagtgttttcggcagaatcatatacacggaacgctgttgcaagtgtttcacctcttgcaggcctatagcgattccaagcatggcacaaatagcgactttcagcacgaactaactgacataacagtgtgcactaaagcaaagctgtggctggctaagcggcagaatccgtgtctagtgacgcgcgcagtgtacatcgatattctcttcctgctgacttgctgcctgaacaggtctgccaaggacaatcaacctgtacttgagagccttggcttctgggaggaagtaagaggcatcatatccggctccgagctgatcacagggtttccgtgggctttcaaagttccaggcctccctcaatatctacagagcctcaccagactcgcgattgccgctgtgtgggcagccgctgcgaaatcaggggaaagggagacaaatgtgcctatttccttcagccaactgctggaatccgcctttcctgaagtcaggtctttgacactggaagcccttctggagaagttcctagccgctgcctccggtttgggggagaaaggggtgcccccactgctctgcaatatgggggaaaaattcctcctgttggccatgaaagaaaatcaccctgagtgcttttgtaaaattttgaaaatcctgcactgcatggacccaggggaatggcttcctcagaccgaacactgcgttcatcttacccccaaggaattcctcatctggacaatggatattgcgtccaacgaacgcagcgagattcagagcgtggctctgaggttggcctctaaggttatttctcaccatatgcaaacctgcgtcgagaatagggagttgatagcagcggaactcaaacaatgggtgcagttggtaatactatcttgtgaagatcacctgccgactgaaagtcgtctggcggtggtagaggtgctcacttctactacaccactgtttttgactaacccacatcctatcctggagcttcaggacacactcgccctctggaaatgtgtcctaaccttgctgcaaagcgaggaacaggcggttcgcgatgcagcgactgaaacagtaactaccgctatgtcccaggaaaatacttgtcagagcaccgagttcgccttttgtcaggtggatgcctcaattgcactagcgctcgcattggcggtcttgtgtgacctgttacaacagtgggatcagctggcccctggcctcccaattctgctgggttggctgctgggggaaagtgatgacctcgttgcctgcgtcgaaagcatgcaccaggtggaggaggactacctctttgaaaaggctgaggtgaacttctgggctgaaactttgatattcgtgaaatacttgtgtaaacacctcttctgcctgctttctaagagcggatggcggcctccgtctccggagatgctctgccatctccagcgaatggtgtccgaacagtgtcatctgttgtcccagttcttccgggagctgccgcctgcagctgagtttgtgaagaccgttgagttcacccgtctaagaattcaggaggaacggacactcgcatgtttacggctactcgcctttctcgaggggaaggagggagaggataccttggtcctgtcagtgtgggacagctacgccgaatcaaggcagctgaccctgccacggaccgaggctgcctgcta

SEQ ID NO: 37853 - DNA, 5861 bp, Artificial Sequence
  derived and/or modified sequence
atgggcgttaaaaaaaaaaaggagatgcaggtggccgcattgacgatttgtcaccaagacctggaaacattgaaatcattcgcagatgtggagggcaaaaacctggcttccctgctcctccattgcgtccagctcaccgatggcgtgtcccagattcattacataaaacagattgtacctctgttggagaaggctgacaagaatgggatgtgcgacccaacgatccaatcctgtctggatattttggcgggtatctatctatcactctccctcaagaatcccctcaaaaaggtgttggcaagctcactgaactccctgccggattttttcctccccgaagccatgcaccgtttcaccagcaggctgcaggaagagcttaacactacagatctgtactcttatcgaaaggtgaccgacaatatctcttcttgcatggagaattttaaccttggtcgcgctagcgtgaacaatctactgaagaatgtgctgcatttccttcagaagagcctcatcgagattctggaggaaaacaggaagtgcgccggaaatcatattatccagacccagctgatgaatgatttgctagtaggtatcagagtgtctatgatgctggtgcagaaagtccaggattttcagggcaatctgtggaagacatctgactctcccatatggcagaatatgtgtggtttactctcaatcttcacaaaggtgctgagtgatgatgatctgttgcagactgtgcagtccaccagcggtctggctattatcttgtttatcaagaccatgttccatccaagcgaaaaaataccccatttgatcagcagtgtcctactgcgatccgtcgattgtacttccgtccccgagtggttcatgagctcgtgccgctctttgtgctgtggcgatatcagccaatctgcagtgctattcctgtgtcaggggacgctagcaatgctggattggcagaacggctcaatggggagaagtggcgaggcacttttgctcgacacagctcatgtgctctttaccctcagtagtcagatcaaggagcccaccctagaaatgttcctgagtagaatcctggctagctggaccaactctgctatccaggtactggaatcttcttcaccaagtcttacagactccttgaacggcaacagttctatcgtaggccgtctcctcgagtacgtttacacacattgggagcaccctttagacgcattgagacatcaaacaaagattatgttcaaaaatctcttgcagatgcataggctgacagtggagggcgcagacttcgtgccggatccattcttcgtcgaactgaccgagtcgctgctgaggctggagtggcacataaaggggaagtatacctgcctgggctgtctagtagagtgtatcggagtggagcatattctcgcaattgacaaaacaatccccagccaaattttggaggtaatgggtgatcagtctctggttccgtatgcttctgatctcctggagactatgttccgcaaccataagtcgcacctgaagtctcagacggcggagtctagctggatcgaccagtggcacgagacctgggtgtcccctctcctcttcatactttgcgaaggtaatctcgaccaaaagtcatatgtcatcgattattatctgccgaaactgttaagttactcacccgagtcattgcagtacatggtcaagatactgcagacgtccatcgatgcgaaaacaggccaggagcaatctttccctagcctgggatcttgcaattcgagaggcgcactcggagctctcatggcttgtttgcgaatcgccagggcccacggccatctgcaatcggccaccgatacatgggaaaacctggtcagcgacgccagaataaaacaaggtctgatacaccagcactgccaggtccgaatcgataccttaggactgctttgcgaatccaaccgaagcactgagatagtgagcatggaagagatgcaatggattcagttttttatcacctataaccttaattcccaatctcccggagtaaggcagcaaatatgctctctgctgaagaaattattctgccgaattcaggaatcaagtcaggtcctctataagttagagcagtccaagagcaagagagagcctgagaacgagctaacgaagcagcacccaagcgtatcactccaacagtacaagaacttcatgagcagtatctgcaatagcttatttgaagctctcttcccaggctcctcttattccacaagattttctgcattaactattctgggctcaatagcggaagtgttccatgttcccgaggggaggatttatacagtctaccaactgtcccatgatatagacgtgggtcgtttccaaaccctgatggaatgctttacatcaacttttgaagacgtcaaaattctagcattcgacttactgatgaagctcagcaaaacagcggtccacttccaggattccgggaagctccaggggctgttccaagccgctcttgagctgagcacctccacgaaaccctatgattgcgtcacagcttcctatctgcttaacttcctgatctggcaggacgctctgccttccagcctgtctgcataccttacacaacaagtggcgtgcgacaatggagacagacccgctgccgtggtggagagaaacacgttgatggtgatcaaatgtttaatggagaacttagaggaagaggtatctcaggcagagaactctttgctgcaggcggctgctgcattcccaatgtacgggagagttcactgcatcaccggagccctccagaaactgagtcttaatagcttacagttggtttcagagtggcgcccagtcgtggaaaagttactgcttatgtcctaccgcctgtcaaccgtggtgtctcctgtgatccagtccagctcccccgaggggctgataccaatggacactgattcggagtcagccagcaggctgcagatgattctcaacgagattcagcctcgtgataccaacgattactttaatcaggcgaaaattttgaaagagcacgactcattcgatatgaaggaccttaatgcttccgtcgttaacattgacacatccactgagatcaaggggaaggaggtgaagacttgtgatgtaaccgcacaaatggtgctcgtgtgctgttggagatccatgaaggaagttgccttgctgctaggtatgctttgccagcttcttcctatgcagccagtgcccgaatcaagtgatggcctgctgaccgtcgaacaggttaaagaaatcggcgactattttaagcagcacctgctccagagtcggcatagaggggcattcgaactcgcctacacaggattcgtgaagttgacggaggtcctaaacaggtgcccaaatgtgtccctgcagaaactccccgaacaatggctctggtccgttctagaggagatcaaatgcagtgatccctcatctaagctctgcgccactcggaggtccgcagggatcccgttttatatccaagccctcctcgcctcagaaccgaagaagggccgtatggaccttctcaaaatcacaatgaaagaactgatttctctggccggtcccactgacgatatccagtccactgtccctcaggtgcacgccctgaacatactgagggccttattccgggataccagattgggagaaaacataattccttacgtcgccgacggcgctaaagccgcaatactcggtttcacttcccccgtttgggccgtgcgaaatagttccacccttctgttctcagcccttataactcgcatctttggggtgaagagggctaaagacgagcactctaagaccaatagaatgactgggcgagagttcttttcccgcttccctgagttatatccctttctcttgaaacaactggaaacagttgcaaatacagtcgactctgatatgggggaaccaaatcgccatccatccatgttcctgctcctactggtgctggagaggctgtatgcttcccctatggacggtacatcctctgccctctcgatgggtccattcgttcctttcatcatgcgatgcggacatagtcctgtctatcacagccgagaaatggccgcacgcgctctggtgcctttcgtaatgatcgaccacatccctaataccattcgcactctccttagcacactcccgtcatgcactgatcagtgcttcagacagaaccacatccatgggaccttgctgcaggtcttccacctccttcaggcttacagtgattctaaacatggtaccaacagtgattttcagcacgagttgaccgacattacagtgtgcactaaggctaagctgtggctggccaagcggcagaatccctgcctcgtgactagagctgtttatatcgatatcttattcttactaacttgctgtcttaataggtctgccaaggataatcagccagtgttggaaagtttgggcttttgggaagaggtgaggggcatcataagtggttccgagctgatcactggatttccatgggcatttaaggttcccggtctgcctcagtatctccagagcctgacacggcttgcgattgctgcagtgtgggcagccgcagcgaagtctggagaaagagagaccaacgtgcccatcagctttagccagttgctcgaatctgccttcccagaagtgcggagccttactttggaggcgctcctggagaagtttctagccgctgcctcgggcctcggtgaaaaaggggtccctcctctgctgtgcaatatgggcgagaaattcctcctcttggcgatgaaggagaatcatccggaatgcttttgtaagattctaaaaatcctccattgtatggaccctggggaatggcttcctcaaaccgagcattgcgtgcacctgacgccaaaagagttccttatctggaccatggatatagcgtccaatgagagaagcgaaatccagagcgtcgctttgcgactcgcaagtaaggtgatctcccatcatatgcagacttgcgtcgaaaatcgggagttgattgccgctgagctgaagcagtgggtgcaattggtaatcctttcgtgtgaggaccacctcccaacggagagcagattggccgttgtcgaggtgctcacatcgaccactcccctttttctcacaaatccacaccctattctggagctccaagacacgcttgctctgtggaagtgtgtgctcacattgctgcagagcgaagaacaggctgtcagggatgccgcaaccgagaccgttacaacagcgatgtcccaggagaatacatgccagtccacggagtttgccttttgtcaggttgatgcttctattgccctcgccctggcgttggctgtgctctgtgatctactgcaacaatgggatcagctagccccaggccttcccatacttctggggtggcttctgggggagagtgacgatctcgtggcttgtgtcgaatccatgcaccaggttgaggaagattatctatttgaaaaagctgaagttaatttttgggcggaaactctgatcttcgtgaaatatttatgcaaacacctattctgcctactgtcgaagagcggatggcgacctccctctcccgaaatgctctgtcatctgcagagaatggtgtcggagcagtgtcacttactgagccagtttttccgtgagcttccgcctgcagcagaattcgtcaagacagtggagttcacccggctgcggatccaggaggagcggaccctggcttgtctgaggctgttagcctttttagaggggaaggaaggcgaggacaccctggtgctttcagtgtgggattcttatgctgaaagccgtcagcttactctcccacggacagaagctgcttgtta

SEQ ID NO: 37854 - DNA, 4905 bp, Artificial Sequence
  derived and/or modified sequence
atgagttcgtgccgatccctctgttgcggagacatcagccaatccgcagttctgtttctctgccagggtactctggcaatgcttgattggcagaacggtagcatggggagatccggcgaggcacttctcctggacaccgctcacgttctcttcaccctaagcagtcaaattaaggaaccaacactggaaatgtttctttctcggatcctggcaagttggacaaattccgcaattcaagttcttgagtcttcatctccttctctgaccgacagcctgaacggaaattcttccattgtgggcagactccttgagtacgtatacacacactgggagcatcctctggatgctctgagacaccaaaccaaaattatgttcaagaatctgctgcagatgcatcgtttgactgtggaaggggctgatttcgtgcccgacccttttttcgtggaacttaccgagagccttctccgactggaatggcatataaaggggaagtacacatgcctggggtgcttggtggaatgcataggcgtagaacacatcctagctatcgacaagacgatcccttctcagattctggaggttatgggggaccagagcctggtcccttatgcaagcgacctgctggagactatgttcaggaaccataagtctcatctgaagagccaaaccgcagagtcttcatggattgatcagtggcacgaaacttgggtgtcccccctgttattcatcctgtgcgagggaaatctcgatcagaaatcttatgtgattgactactacctccctaaactgttgagttatagtcctgagtctctgcagtacatggttaaaatcctacagacaagcatcgatgcaaaaacgggacaggagcaatcctttcctagtttgggatcatgtaacagccgaggagccctcggcgcattgatggcttgtttacggatcgcgagagctcatggacacctccagtcagccactgatacctgggaaaaccttgtctcagatgccagaattaaacagggactcatccaccaacactgtcaagtacgaattgacacccttggcctgttgtgcgaaagtaatcgaagcacggagatcgttagtatggaagagatgcagtggatccaattcttcatcacgtataacctgaatagtcagtcaccaggggttaggcagcaaatatgttcccttttgaagaagcttttttgtaggatccaagaatcctctcaggtgctatataagttggagcagtcaaaatctaaaagagagccagaaaacgagttgacaaaacagcacccatcagtgtccctacaacagtataagaattttatgtcatctatatgcaactcactgtttgaggcattatttccaggaagttcatatagcacacgattctctgcgttaacaattctgggatctattgcagaggttttccatgttccggaaggcaggatctacacagtgtaccagctttcccatgatattgatgtgggccgatttcaaaccctgatggagtgtttcacatctacgttcgaagacgttaagatcctggcgttcgacctgctgatgaagttgagcaaaacagccgtgcacttccaagacagcggaaagctccagggcctgttccaagccgctcttgagctttccactagtacgaagccctatgactgcgtcactgcgtcatacctcctcaatttcctgatttggcaagatgccctcccaagcagtcttagtgcttacttaacccagcaggtggcttgtgacaatggcgaccgtcccgcagcagtcgtggagcgtaacaccctgatggtgattaagtgcctcatggaaaatctcgaggaggaggtcagtcaggctgagaattccctcttgcaagcagctgcagcatttcccatgtatgggagagtacactgtatcactggggcattgcagaaactttcattgaattccctgcagcttgtgtcagagtggcgaccagttgtggagaagctgctgctcatgagttacaggctgagtacagtcgtctcccctgtgatacagtcaagtagtcctgagggtcttatccccatggacactgattcagagagcgcttctaggctccagatgatccttaatgagatccagcccagagacactaatgattacttcaaccaagcaaagatcttgaaggaacacgacagttttgacatgaaggacctgaacgcctctgtagtgaatatcgatacctccacagagatcaagggcaaagaggtcaagacctgcgacgtcaccgcacagatggtacttgtgtgctgctggcgaagtatgaaggaggtggccctgcttcttggaatgctttgccagcttcttccgatgcagccagtgcctgagtccagcgatggccttttaactgtggagcaggtgaaagagatcggcgactatttcaaacagcatttactccaaagtaggcatagaggcgcattcgaattggcctataccggattcgtgaaacttaccgaagtgctgaatagatgtcctaacgtgagccttcagaagctcccagaacagtggctgtggagcgttctcgaggaaattaaatgcagcgatccttcttctaagctctgtgcaacgcgaaggtccgccggtattccgttctacatacaggctcttctcgcgagcgagcccaagaaaggtaggatggacctcttgaagatcacaatgaaggaattgatctcactggcgggtcctaccgatgatatccagagcaccgtcccccaggtgcatgccctgaatatccttcgggctctgttcagagacacgcgcctgggcgaaaatattatcccctacgttgctgatggcgctaaggccgcaatactgggctttacatcaccagtttgggcctcacagatgacagggagagagttcttcagccgcttcccagaactctatcctttcctgttgaagcagctggagaccgtcgccaatactgtggactcagatatgggcgagcccaaccgtcacccatccatgttcctgttactacttgttcttgaaagactgtacgccagtccgatggatggaactagcagtgccctgtcaatgggacctttcgtgccatttattatgcgctgtggccactccccagtataccatagccgagaaatggcagcacgggctctggtgccgtttgtgatgatcgaccacatccccaatactatccgaaccctactgtctacccttccaagctgtacagatcagtgttttcgacagaaccatatccatggcactctgctgcaagtcttccacctgctgcaggcctattccgactctaaacacgggacaaactcagactttcaacatgaactgaccgatataaccgtatgtactaaagccaagctgtggctcgcgaagaggcaaaatccgtgcttggtcacccgcgctgtttacatcgacattctcttcctgctgacgtgttgccttaacagatctgccaaggataaccagcctgtgctggaatccttgggattctgggaggaggttcggggaattataagcggtagcgaactcattaccgggttcccctgggctttcaaagtccccggacttccacagtacctgcagtcactgaccagactggccatagccgctgtatgggccgcagcagccaagtcaggggagagagaaacaaacgttccaattagcttctcccagcttctggaatccgcctttccagaagtcagatctttaaccctggaggctctgctagaaaagtttctggcagccgctagcggactcggagaaaagggcgttccgccactactctgcaacatgggggagaagtttctccttctagccatgaaggagaaccaccccgaatgcttttgcaagattctcaagatcctgcattgcatggatcccggagagtggttgcctcagacagagcattgcgtgcacctgactccaaaagaatttcttatttggaccatggatatagcctctaacgaaagatccgaaattcagtcagttgccttgcgcttggctagcaaggtgattagccatcatatgcaaacgtgcgtggagaatcgggaacttatcgcagctgagctcaaacagtgggtacagttggttatcttatcctgcgaagaccatctccctacagaatcccgcttggctgtggttgaggtgctcacatcaacgacacctttattcttgaccaacccacatcccatcctagaactccaggacaccctcgccctgtggaagtgtgtgctcacactgctgcagagtgaagagcaggccgttagggacgctgctaccgagacggtgacaaccgccatgtcccaggaaaacacatgtcaatccaccgagtttgcattttgtcaagttgacgcatccattgcgttagctcttgccctggccgtgttgtgcgatttgctccagcagtgggaccaactggcccctggcttgcccatattgctgggctggttactcggagagagtgacgatctagtagcctgcgtcgagtctatgcaccaagtagaagaggactacttatttgaaaaggccgaggtgaacttttgggcggagactttgatctttgttaagtatttatgcaagcatctgttttgcctcttatccaaatccggctggaggcctccgtcccccgagatgctctgccatctgcaacggatggtgagcgagcagtgtcatctccttagtcagttcttccgtgaattgcctcccgctgctgagtttgtgaagacagtggagttcacacggctccggatccaggaagaacgtaccctcgcttgtctgaggttgctggccttccttgaaggtaaggagggagaggacactctcgttctttcagtctgggattcctatgccgaatctagacagttgactctgcctaggactgaggcggcatgctag

SEQ ID NO: 37855 - DNA, 3294 bp, Artificial Sequence
  derived and/or modified sequence
atgagcagctgcaggagcctctgttgtggtgacatctctcagtcagctgtcttattcctctgtcaggggacacttgccatgttggactggcagaacggaagcatgggtcggagtggggaggccctgctcttggatactgcacatgttttgttcaccttgagttcacagattaaagagccaacgctggaaatgtttctgtctagaatcttagcatcctggactaattcagccatacaagtccttgaatcaagttccccgagcctaacggacagcctgaatgggaattcaagtatagttgggagacttttggaatatgtctatacccattgggaacatccattggatgctctgagacaccaaaccaaaatcatgttcaaaaaccttctccaaatgcaccggctcactgtggaaggtgcagatttcgtccctgatcctttctttgtggaattgactgagagtcttttacgattggaatggcatattaaaggaaagtacacgtgccttggttgtttggtagagtgcataggagttgaacatattttggctatagataaaactattccatctcaaatcttagaggtgatgggagaccagtcattggtaccttatgcaagtgacctcttggaaaccatgtttagaaatcataagagtcatttgaaatcccagactgctgagagttcttggattgaccagtggcatgagacttgggtttctcctctcctttttatattgtgtgaaggaaacttggatcaaaaatcttacgtgattgattattacttgccaaaattattaagttacagccctgaaagcttacagtacatggtaaagattcttcagacttctattgatgctaaaactggacaagagcaatctttcccatccttagggtcttgtaatagcaggggggctctgggagctttgatggcatgtctgcgaatagctagagctcatggacatcttcagtctgcaactgatacctgggagaacctcgtgtctgatgcaagaataaagcaaggcttaattcatcagcattgccaagtaaggatagatacattaggcttgctttgtgaaagtaatcggagcacagaaattgtttccatggaagaaatgcagtggattcagttctttattacatacaatcttaacagccagtctccaggagtgcggcaacagatctgttctcttcttaaaaagttgttttgtaggatacaggaaagttctcaggtactttataaattggagcagagtaaatccaaacgtgaaccagagaatgagttaaccaaacagcacccttctgtttctttacagcagtataagaatttcatgtcatccatttgtaacagtctttttgaagcattgtttcctggatcttcctactcgactagattttcagctttaaccattttaggttcaatagctgaagtttttcatgtcccagaaggcagaatttatacagtatatcagctgagtcatgatattgatgttggtcgtttccaaacactaatggaatgttttaccagcacttttgaagacgtgaaaattttagcatttgatcttctgatgaagttatcaaaaacagctgtacattttcaggattcggggaaactgcaaggcttatttcaggcagcattggagctcagcacaagcaccaaaccatacgactgtgtgacagcttcctacctgctgaacttcttaatctggcaggatgctctaccgtcatccttgtctgcctacttaactcagcaagttgcatgtgataatggagataggcctgctgctgtggtggaaaggaacacattaatggttatcaaatgcttgatggaaaatcttgaggaagaagtatctcaggctgaaaattctctgcttcaggcagcagcagcatttccaatgtatgggcgagtccactgtataacaggagctttgcagaagttatctctaaacagcctgcagttggtgagcgagtggagacctgtggtagagaagctccttttgatgtcctacaggctttccactgtggtgtctccagtcattcagagctcatcccctgaaggcctcatcccaatggacactgattcagagtcagcaagccgcttacagatgattctgaatgagattcagcctcgagatactaatgattattttaaccaagccaaaatattgaaagaacatgatagctttgatatgaaggacttgaatgctagtgtggtgaatattgatacttctacagaaatcaaaggtaaagaagtaaaaacatgtgatgtaactgcgcagatggtgctggtatgttgttggagaagtatgaaggaagttgctttacttttaggcatgttgtgccagcttctgcccatgcagcctgtgccagaatcttctgatggattattgacggtggagcaggtaaaagaaataggagattactttaaacaacaccttttgcagtccaggcacagaggagcatttgaattggcttatactggttttgtgaaactcactgaagtactaaacaggtgcccaaatgtgagtctgcaaaagctgccagaacagtggctatggagtgttttagaggaaattaaatgcagtgatccttcatctaaactctgtgctacaaggcgcagtgctggaattcctttctacatacaggcactgttggcatctgaaccaaagaaaggcagaatggatttgttgaaaataacaatgaaagagttaatctctttggctgggcctacagatgacatacagagtacagtcccccaggttcatgctttaaatatccttagagcattgttcagagatacgcgcctgggagaaaatattattccttatgttgctgatggagctaaggctgcaattctgggttttacatcaccggtctgggcagtgcgaaattcatccacacttctctttagtgccttgatcacaagaatttttggagttaaaagggcaaaggatgaacattccaaaacaaatagaatgacagggagagagtttttctctcgtttcccagaactctatccttttcttctcaaacagttggaaactgtagccaatacagtagacagtgatatgggagaaccaaatcgtcatccaagcatgtttctcttacttttggtgttggagagactctacgcttccccgatggatggtacttcttctgctctcagcatgggaccttttgttcccttcattatgagagtcttgctctgttgtccaggctggagtgcagtggcacgatctcagctcactgcaacctccacctcctgggttcaagcaattctcctgcctcagcctcccgagtag

SEQ ID NO: 37856 - DNA, 6310 bp, Artificial Sequence
  derived and/or modified sequence
ggaccaggcgcctgcgactcttctcagacgccgacgtgcacgaggtttggctcccaggtgtcctgcctgccagacccgcggtagctcggctcggccagttttgctagggctgcctggcgagccacaccaattcccatcctttggtatcgccaggattcggcggctgtgaaactgatttccggtcgctaaggtctccatggagacagcactttaaccactttctcccactgtcattcctcgactccacgtggttcagaaatcgcccagagaatgtttgtgggagtcagccaggaaggtgtagagtgaagcagcgttctaaagggaagcatgactactattaattctatttaaaatgggtgtaaagaagaagaaagaaatgcaagttgctgcgctgaccatttgccatcaggaccttgaaactttgaaatcttttgctgatgtggaagggaaaaatctagcttctttgctgttacattgtgtgcaactcacggatggagtgtcacaaatccattatattaaacagattgtgcctctgctggagaaagcagataaaaatggcatgtgtgatcccactattcaaagttgtttggatatcttagcaggcatttatctttctttgagtctaaagaatcccttgaagaaagtattggcaagctcactaaatagcctgcctgatttttttctacctgaggctatgcaccgttttacttctcgtcttcaggaagaattgaatactactgacttatactcttacaggaaagttactgacaatatttcttcctgtatggagaactttaacttgggtagagcaagtgttaataatctgcttaaaaatgtgcttcattttctgcagaagagtttaattgaaatcctggaagaaaatagaaaatgtgctggaaatcatattattcaaacacagttgatgaatgacttactggtaggcattagagtttcaatgatgttagtacagaaagtacaagatttccagggaaatctttggaagacttccgattctcccatatggcaaaatatgtgtggattgctgagtatttttaccaaggttttaagcgatgatgatctgttacagactgtacagagcacatctggattagctattattctttttattaagactatgtttcacccgtctgaaaagattcctcatttgattagcagtgtgctgcttcgttcagtggactgcaccagtgtccccgagtggtttatgagcagctgcaggagcctctgttgtggtgacatctctcagtcagctgtcttattcctctgtcaggggacacttgccatgttggactggcagaacggaagcatgggtcggagtggggaggccctgctcttggatactgcacatgttttgttcaccttgagttcacagattaaagagccaacgctggaaatgtttctgtctagaatcttagcatcctggactaattcagccatacaagtccttgaatcaagttccccgagcctaacggacagcctgaatgggaattcaagtatagttgggagacttttggaatatgtctatacccattgggaacatccattggatgctctgagacaccaaaccaaaatcatgttcaaaaaccttctccaaatgcaccggctcactgtggaaggtgcagatttcgtccctgatcctttctttgtggaattgactgagagtcttttacgattggaatggcatattaaaggaaagtacacgtgccttggttgtttggtagagtgcataggagttgaacatattttggctatagataaaactattccatctcaaatcttagaggtgatgggagaccagtcattggtaccttatgcaagtgacctcttggaaaccatgtttagaaatcataagagtcatttgaaatcccagactgctgagagttcttggattgaccagtggcatgagacttgggtttctcctctcctttttatattgtgtgaaggaaacttggatcaaaaatcttacgtgattgattattacttgccaaaattattaagttacagccctgaaagcttacagtacatggtaaagattcttcagacttctattgatgctaaaactggacaagagcaatctttcccatccttagggtcttgtaatagcaggggggctctgggagctttgatggcatgtctgcgaatagctagagctcatggacatcttcagtctgcaactgatacctgggagaacctcgtgtctgatgcaagaataaagcaaggcttaattcatcagcattgccaagtaaggatagatacattaggcttgctttgtgaaagtaatcggagcacagaaattgtttccatggaagaaatgcagtggattcagttctttattacatacaatcttaacagccagtctccaggagtgcggcaacagatctgttctcttcttaaaaagttgttttgtaggatacaggaaagttctcaggtactttataaattggagcagagtaaatccaaacgtgaaccagagaatgagttaaccaaacagcacccttctgtttctttacagcagtataagaatttcatgtcatccatttgtaacagtctttttgaagcattgtttcctggatcttcctactcgactagattttcagctttaaccattttaggttcaatagctgaagtttttcatgtcccagaaggcagaatttatacagtatatcagctgagtcatgatattgatgttggtcgtttccaaacactaatggaatgttttaccagcacttttgaagacgtgaaaattttagcatttgatcttctgatgaagttatcaaaaacagctgtacattttcaggattcggggaaactgcaaggcttatttcaggcagcattggagctcagcacaagcaccaaaccatacgactgtgtgacagcttcctacctgctgaacttcttaatctggcaggatgctctaccgtcatccttgtctgcctacttaactcagcaagttgcatgtgataatggagataggcctgctgctgtggtggaaaggaacacattaatggttatcaaatgcttgatggaaaatcttgaggaagaagtatctcaggctgaaaattctctgcttcaggcagcagcagcatttccaatgtatgggcgagtccactgtataacaggagctttgcagaagttatctctaaacagcctgcagttggtgagcgagtggagacctgtggtagagaagctccttttgatgtcctacaggctttccactgtggtgtctccagtcattcagagctcatcccctgaaggcctcatcccaatggacactgattcagagtcagcaagccgcttacagatgattctgaatgagattcagcctcgagatactaatgattattttaaccaagccaaaatattgaaagaacatgatagctttgatatgaaggacttgaatgctagtgtggtgaatattgatacttctacagaaatcaaaggtaaagaagtaaaaacatgtgatgtaactgcgcagatggtgctggtatgttgttggagaagtatgaaggaagttgctttacttttaggcatgttgtgccagcttctgcccatgcagcctgtgccagaatcttctgatggattattgacggtggagcaggtaaaagaaataggagattactttaaacaacaccttttgcagtccaggcacagaggagcatttgaattggcttatactggttttgtgaaactcactgaagtactaaacaggtgcccaaatgtgagtctgcaaaagctgccagaacagtggctatggagtgttttagaggaaattaaatgcagtgatccttcatctaaactctgtgctacaaggcgcagtgctggaattcctttctacatacaggcactgttggcatctgaaccaaagaaaggcagaatggatttgttgaaaataacaatgaaagagttaatctctttggctgggcctacagatgacatacagagtacagtcccccaggttcatgctttaaatatccttagagcattgttcagagatacgcgcctgggagaaaatattattccttatgttgctgatggagctaaggctgcaattctgggttttacatcaccggtctgggcagtgcgaaattcatccacacttctctttagtgccttgatcacaagaatttttggagttaaaagggcaaaggatgaacattccaaaacaaatagaatgacagggagagagtttttctctcgtttcccagaactctatccttttcttctcaaacagttggaaactgtagccaatacagtagacagtgatatgggagaaccaaatcgtcatccaagcatgtttctcttacttttggtgttggagagactctacgcttccccgatggatggtacttcttctgctctcagcatgggaccttttgttcccttcattatgaggtgtggtcactcacctgtctaccactcccgtgaaatggcagctcgtgccttggtcccatttgttatgatagatcacattcctaataccattcgaactctgttgtccacactccccagctgcactgaccagtgtttccggcaaaaccacattcatgggacacttctccaggtttttcatttgttgcaagcctactcagactccaaacacggaacgaattcagacttccagcacgagctgactgacatcactgtttgtaccaaagccaaactctggctggccaagaggcaaaatccatgtttggtgaccagagctgtatatattgatattctcttcctattgacttgctgcctcaacagatctgcaaaggacaaccagccagttctggagagtcttggcttctgggaggaagtcagagggattatctcaggatcagagctgataacgggattcccttgggccttcaaggtgccaggcctgccccagtacctccagagcctcaccagactagccattgctgcagtgtgggccgcggcagccaagagtggagagcgggagacgaatgtccccatctctttctctcagctgttagaatctgccttccctgaagtgcgctcactaacactggaagccctcttggaaaagttcttagcagcagcctctggacttggagagaagggcgtgccacccttgctgtgcaacatgggagagaagttcttattgttggccatgaaggaaaatcacccagaatgcttctgcaagatactgaaaattctccactgcatggaccctggtgagtggcttccccagacggagcactgtgtccatctgaccccaaaggagttcttgatctggacgatggatattgcttccaatgaaagatctgaaattcagagtgtagctctgagacttgcttccaaagtcatttcccaccacatgcagacatgtgtggagaacagggaattgatagctgctgagctgaagcagtgggttcagctggtcatcttgtcatgtgaagaccatcttcctacagagtctaggctggccgtcgttgaagtcctcaccagtactacaccacttttcctcaccaacccccatcctattcttgagttgcaggatacacttgctctctggaagtgtgtccttacccttctgcagagtgaggagcaagctgttagagatgcagccacggaaaccgtgacaactgccatgtcacaagaaaatacctgccagtcaacagagtttgccttctgccaggtggatgcctccatcgctctggccctggccctggccgtcctgtgtgatctgctccagcagtgggaccagttggcccctggactgcccatcctgctgggatggctgttgggagagagtgatgacctcgtggcctgtgtggagagcatgcatcaggtggaagaagactacctgtttgaaaaagcagaagtcaacttttgggccgagaccctgatctttgtgaaatacctctgcaagcacctcttctgtctcctctcaaagtccggctggcgtcccccaagccctgagatgctctgtcaccttcaaaggatggtgtcagagcagtgccacctcctgtctcagttcttcagagagcttccaccagctgctgagtttgtgaagacagtggagttcacaagactacgcattcaagaggaaaggactttggcttgcttgaggctgctggcctttttggaaggaaaggaaggggaagacaccctagttctcagtgtttgggactcttatgcagaatcgaggcagttaactcttccaagaacagaagcggcatgttgaagaaaatctgggggattgggatgggggtatgtgtggatttttcctccactaaatctgcaggaaacatgttgaacataaattcaaaaattttatccc

SEQ ID NO: 37857 - DNA, 6114 bp, Artificial Sequence
  derived and/or modified sequence
gacccggtagtcgaccgtggaccgcgctgcgagcctcggagacgccgtagaaggagacctgcttccgggactggaccaggcgcctgcgactcttctcagacgccgacgtgcacgagtgactactattaattctatttaaaatgggtgtaaagaagaagaaagaaatgcaagttgctgcgctgaccatttgccatcaggaccttgaaactttgaaatcttttgctgatgtggaagggaaaaatctagcttctttgctgttacattgtgtgcaactcacggatggagtgtcacaaatccattatattaaacagattgtgcctctgctggagaaagcagataaaaatggcatgtgtgatcccactattcaaagttgtttggatatcttagcaggcatttatctttctttgagtctaaagaatcccttgaagaaagtattggcaagctcactaaatagcctgcctgatttttttctacctgaggctatgcaccgttttacttctcgtcttcaggaagaattgaatactactgacttatactcttacaggaaagttactgacaatatttcttcctgtatggagaactttaacttgggtagagcaagtgttaataatctgcttaaaaatgtgcttcattttctgcagaagagtttaattgaaatcctggaagaaaatagaaaatgtgctggaaatcatattattcaaacacagttgatgaatgacttactggtaggcattagagtttcaatgatgttagtacagaaagtacaagatttccagggaaatctttggaagacttccgattctcccatatggcaaaatatgtgtggattgctgagtatttttaccaaggttttaagcgatgatgatctgttacagactgtacagagcacatctggattagctattattctttttattaagactatgtttcacccgtctgaaaagattcctcatttgattagcagtgtgctgcttcgttcagtggactgcaccagtgtccccgagtggtttatgagcagctgcaggagcctctgttgtggtgacatctctcagtcagctgtcttattcctctgtcaggggacacttgccatgttggactggcagaacggaagcatgggtcggagtggggaggccctgctcttggatactgcacatgttttgttcaccttgagttcacagattaaagagccaacgctggaaatgtttctgtctagaatcttagcatcctggactaattcagccatacaagtccttgaatcaagttccccgagcctaacggacagcctgaatgggaattcaagtatagttgggagacttttggaatatgtctatacccattgggaacatccattggatgctctgagacaccaaaccaaaatcatgttcaaaaaccttctccaaatgcaccggctcactgtggaaggtgcagatttcgtccctgatcctttctttgtggaattgactgagagtcttttacgattggaatggcatattaaaggaaagtacacgtgccttggttgtttggtagagtgcataggagttgaacatattttggctatagataaaactattccatctcaaatcttagaggtgatgggagaccagtcattggtaccttatgcaagtgacctcttggaaaccatgtttagaaatcataagagtcatttgaaatcccagactgctgagagttcttggattgaccagtggcatgagacttgggtttctcctctcctttttatattgtgtgaaggaaacttggatcaaaaatcttacgtgattgattattacttgccaaaattattaagttacagccctgaaagcttacagtacatggtaaagattcttcagacttctattgatgctaaaactggacaagagcaatctttcccatccttagggtcttgtaatagcaggggggctctgggagctttgatggcatgtctgcgaatagctagagctcatggacatcttcagtctgcaactgatacctgggagaacctcgtgtctgatgcaagaataaagcaaggcttaattcatcagcattgccaagtaaggatagatacattaggcttgctttgtgaaagtaatcggagcacagaaattgtttccatggaagaaatgcagtggattcagttctttattacatacaatcttaacagccagtctccaggagtgcggcaacagatctgttctcttcttaaaaagttgttttgtaggatacaggaaagttctcaggtactttataaattggagcagagtaaatccaaacgtgaaccagagaatgagttaaccaaacagcacccttctgtttctttacagcagtataagaatttcatgtcatccatttgtaacagtctttttgaagcattgtttcctggatcttcctactcgactagattttcagctttaaccattttaggttcaatagctgaagtttttcatgtcccagaaggcagaatttatacagtatatcagctgagtcatgatattgatgttggtcgtttccaaacactaatggaatgttttaccagcacttttgaagacgtgaaaattttagcatttgatcttctgatgaagttatcaaaaacagctgtacattttcaggattcggggaaactgcaaggcttatttcaggcagcattggagctcagcacaagcaccaaaccatacgactgtgtgacagcttcctacctgctgaacttcttaatctggcaggatgctctaccgtcatccttgtctgcctacttaactcagcaagttgcatgtgataatggagataggcctgctgctgtggtggaaaggaacacattaatggttatcaaatgcttgatggaaaatcttgaggaagaagtatctcaggctgaaaattctctgcttcaggcagcagcagcatttccaatgtatgggcgagtccactgtataacaggagctttgcagaagttatctctaaacagcctgcagttggtgagcgagtggagacctgtggtagagaagctccttttgatgtcctacaggctttccactgtggtgtctccagtcattcagagctcatcccctgaaggcctcatcccaatggacactgattcagagtcagcaagccgcttacagatgattctgaatgagattcagcctcgagatactaatgattattttaaccaagccaaaatattgaaagaacatgatagctttgatatgaaggacttgaatgctagtgtggtgaatattgatacttctacagaaatcaaaggtaaagaagtaaaaacatgtgatgtaactgcgcagatggtgctggtatgttgttggagaagtatgaaggaagttgctttacttttaggcatgttgtgccagcttctgcccatgcagcctgtgccagaatcttctgatggattattgacggtggagcaggtaaaagaaataggagattactttaaacaacaccttttgcagtccaggcacagaggagcatttgaattggcttatactggttttgtgaaactcactgaagtactaaacaggtgcccaaatgtgagtctgcaaaagctgccagaacagtggctatggagtgttttagaggaaattaaatgcagtgatccttcatctaaactctgtgctacaaggcgcagtgctggaattcctttctacatacaggcactgttggcatctgaaccaaagaaaggcagaatggatttgttgaaaataacaatgaaagagttaatctctttggctgggcctacagatgacatacagagtacagtcccccaggttcatgctttaaatatccttagagcattgttcagagatacgcgcctgggagaaaatattattccttatgttgctgatggagctaaggctgcaattctgggttttacatcaccggtctgggcagtgcgaaattcatccacacttctctttagtgccttgatcacaagaatttttggagttaaaagggcaaaggatgaacattccaaaacaaatagaatgacagggagagagtttttctctcgtttcccagaactctatccttttcttctcaaacagttggaaactgtagccaatacagtagacagtgatatgggagaaccaaatcgtcatccaagcatgtttctcttacttttggtgttggagagactctacgcttccccgatggatggtacttcttctgctctcagcatgggaccttttgttcccttcattatgaggtgtggtcactcacctgtctaccactcccgtgaaatggcagctcgtgccttggtcccatttgttatgatagatcacattcctaataccattcgaactctgttgtccacactccccagctgcactgaccagtgtttccggcaaaaccacattcatgggacacttctccaggtttttcatttgttgcaagcctactcagactccaaacacggaacgaattcagacttccagcacgagctgactgacatcactgtttgtaccaaagccaaactctggctggccaagaggcaaaatccatgtttggtgaccagagctgtatatattgatattctcttcctattgacttgctgcctcaacagatctgcaaaggacaaccagccagttctggagagtcttggcttctgggaggaagtcagagggattatctcaggatcagagctgataacgggattcccttgggccttcaaggtgccaggcctgccccagtacctccagagcctcaccagactagccattgctgcagtgtgggccgcggcagccaagagtggagagcgggagacgaatgtccccatctctttctctcagctgttagaatctgccttccctgaagtgcgctcactaacactggaagccctcttggaaaagttcttagcagcagcctctggacttggagagaagggcgtgccacccttgctgtgcaacatgggagagaagttcttattgttggccatgaaggaaaatcacccagaatgcttctgcaagatactgaaaattctccactgcatggaccctggtgagtggcttccccagacggagcactgtgtccatctgaccccaaaggagttcttgatctggacgatggatattgcttccaatgaaagatctgaaattcagagtgtagctctgagacttgcttccaaagtcatttcccaccacatgcagacatgtgtggagaacagggaattgatagctgctgagctgaagcagtgggttcagctggtcatcttgtcatgtgaagaccatcttcctacagagtctaggctggccgtcgttgaagtcctcaccagtactacaccacttttcctcaccaacccccatcctattcttgagttgcaggatacacttgctctctggaagtgtgtccttacccttctgcagagtgaggagcaagctgttagagatgcagccacggaaaccgtgacaactgccatgtcacaagaaaatacctgccagtcaacagagtttgccttctgccaggtggatgcctccatcgctctggccctggccctggccgtcctgtgtgatctgctccagcagtgggaccagttggcccctggactgcccatcctgctgggatggctgttgggagagagtgatgacctcgtggcctgtgtggagagcatgcatcaggtggaagaagactacctgtttgaaaaagcagaagtcaacttttgggccgagaccctgatctttgtgaaatacctctgcaagcacctcttctgtctcctctcaaagtccggctggcgtcccccaagccctgagatgctctgtcaccttcaaaggatggtgtcagagcagtgccacctcctgtctcagttcttcagagagcttccaccagctgctgagtttgtgaagacagtggagttcacaagactacgcattcaagaggaaaggactttggcttgcttgaggctgctggcctttttggaaggaaaggaaggggaagacaccctagttctcagtgtttgggactcttatgcagaatcgaggcagttaactcttccaagaacagaagcggcatgttgaagaaaatctgggggattgggatgggggtatgtgtggatttttcctccactaaatctgcaggaaacatgttgaacataaattcaaaaattttatcccattcatgcctccccta

SEQ ID NO: 37858 - DNA, 6026 bp, Artificial Sequence
  derived and/or modified sequence
gacccggtagtcgaccgtggaccgcgctgcgagcctcggagacgccgtagaaggagacctgcttccgggactggaccaggcgcctgcgactcttctcagacgccgacgtgcacgagtgactactattaattctatttaaaatgggtgtaaagaagaagaaagaaatgcaagttgctgcgctgaccatttgccatcaggaccttgaaactttgaaatcttttgctgatgtggaagggaaaaatctagcttctttgctgttacattgtgtgcaactcacggatggagtgtcacaaatccattatattaaacagattgtgcctctgctggagaaagcagataaaaatggcatgtgtgatcccactattcaaagttgtttggatatcttagcaggcatttatctttctttgagtctaaagaatcccttgaagaaagtattggcaagctcactaaatagcctgcctgatttttttctacctgaggctatgcaccgttttacttctcgtcttcaggaagaattgaatactactgacttatactcttacaggaaagttactgacaatatttcttcctgtatggagaactttaacttgggtagagcaagtgttaataatctgcttaaaaatgtgcttcattttctgcagaagagtttaattgaaatcctggaagaaaatagaaaatgtgctggaaatcatattattcaaacacagttgatgaatgacttactggtaggcattagagtttcaatgatgttagtacagaaagtacaagatttccagggaaatctttggaagacttccgattctcccatatggcaaaatatgtgtggattgctgagtatttttaccaaggttttaagcgatgatgatctgttacagactgtacagagcacatctggattagctattattctttttattaagactatgtttcacccgtctgaaaagattcctcatttgattagcagtgtgctgcttcgttcagtggactgcaccagtgtccccgagtggtttatgagcagctgcaggagcctctgttgtggtgacatctctcagtcagctgtcttattcctctgtcaggggacacttgccatgttggactggcagaacggaagcatgggtcggagtggggaggccctgctcttggatactgcacatgttttgttcaccttgagttcacagattaaagagccaacgctggaaatgtttctgtctagaatcttagcatcctggactaattcagccatacaagtccttgaatcaagttccccgagcctaacggacagcctgaatgggaattcaagtatagttgggagacttttggaatatgtctatacccattgggaacatccattggatgctctgagacaccaaaccaaaatcatgttcaaaaaccttctccaaatgcaccggctcactgtggaaggtgcagatttcgtccctgatcctttctttgtggaattgactgagagtcttttacgattggaatggcatattaaaggaaagtacacgtgccttggttgtttggtagagtgcataggagttgaacatattttggctatagataaaactattccatctcaaatcttagaggtgatgggagaccagtcattggtaccttatgcaagtgacctcttggaaaccatgtttagaaatcataagagtcatttgaaatcccagactgctgagagttcttggattgaccagtggcatgagacttgggtttctcctctcctttttatattgtgtgaaggaaacttggatcaaaaatcttacgtgattgattattacttgccaaaattattaagttacagccctgaaagcttacagtacatggtaaagattcttcagacttctattgatgctaaaactggacaagagcaatctttcccatccttagggtcttgtaatagcaggggggctctgggagctttgatggcatgtctgcgaatagctagagctcatggacatcttcagtctgcaactgatacctgggagaacctcgtgtctgatgcaagaataaagcaaggcttaattcatcagcattgccaagtaaggatagatacattaggcttgctttgtgaaagtaatcggagcacagaaattgtttccatggaagaaatgcagtggattcagttctttattacatacaatcttaacagccagtctccaggagtgcggcaacagatctgttctcttcttaaaaagttgttttgtaggatacaggaaagttctcaggtactttataaattggagcagagtaaatccaaacgtgaaccagagaatgagttaaccaaacagcacccttctgtttctttacagcagtataagaatttcatgtcatccatttgtaacagtctttttgaagcattgtttcctggatcttcctactcgactagattttcagctttaaccattttaggttcaatagctgaagtttttcatgtcccagaaggcagaatttatacagtatatcagctgagtcatgatattgatgttggtcgtttccaaacactaatggaatgttttaccagcacttttgaagacgtgaaaattttagcatttgatcttctgatgaagttatcaaaaacagctgtacattttcaggattcggggaaactgcaaggcttatttcaggcagcattggagctcagcacaagcaccaaaccatacgactgtgtgacagcttcctacctgctgaacttcttaatctggcaggatgctctaccgtcatccttgtctgcctacttaactcagcaagttgcatgtgataatggagataggcctgctgctgtggtggaaaggaacacattaatggttatcaaatgcttgatggaaaatcttgaggaagaagtatctcaggctgaaaattctctgcttcaggcagcagcagcatttccaatgtatgggcgagtccactgtataacaggagctttgcagaagttatctctaaacagcctgcagttggtgagcgagtggagacctgtggtagagaagctccttttgatgtcctacaggctttccactgtggtgtctccagtcattcagagctcatcccctgaaggcctcatcccaatggacactgattcagagtcagcaagccgcttacagatgattctgaatgagattcagcctcgagatactaatgattattttaaccaagccaaaatattgaaagaacatgatagctttgatatgaaggacttgaatgctagtgtggtgaatattgatacttctacagaaatcaaaggtaaagaagtaaaaacatgtgatgtaactgcgcagatggtgctggtatgttgttggagaagtatgaaggaagttgctttacttttaggcatgttgtgccagcttctgcccatgcagcctgtgccagaatcttctgatggattattgacggtggagcaggtaaaagaaataggagattactttaaacaacaccttttgcagtccaggcacagaggagcatttgaattggcttatactggttttgtgaaactcactgaagtactaaacaggtgcccaaatgtgagtctgcaaaagctgccagaacagtggctatggagtgttttagaggaaattaaatgcagtgatccttcatctaaactctgtgctacaaggcgcagtgctggaattcctttctacatacaggcactgttggcatctgaaccaaagaaaggcagaatggatttgttgaaaataacaatgaaagagttaatctctttggctgggcctacagatgacatacagagtacagtcccccaggttcatgctttaaatatccttagagcattgttcagagatacgcgcctgggagaaaatattattccttatgttgctgatggagctaaggctgcaattctgggttttacatcaccggtctgggcatctcaaatgacagggagagagtttttctctcgtttcccagaactctatccttttcttctcaaacagttggaaactgtagccaatacagtagacagtgatatgggagaaccaaatcgtcatccaagcatgtttctcttacttttggtgttggagagactctacgcttccccgatggatggtacttcttctgctctcagcatgggaccttttgttcccttcattatgaggtgtggtcactcacctgtctaccactcccgtgaaatggcagctcgtgccttggtcccatttgttatgatagatcacattcctaataccattcgaactctgttgtccacactccccagctgcactgaccagtgtttccggcaaaaccacattcatgggacacttctccaggtttttcatttgttgcaagcctactcagactccaaacacggaacgaattcagacttccagcacgagctgactgacatcactgtttgtaccaaagccaaactctggctggccaagaggcaaaatccatgtttggtgaccagagctgtatatattgatattctcttcctattgacttgctgcctcaacagatctgcaaaggacaaccagccagttctggagagtcttggcttctgggaggaagtcagagggattatctcaggatcagagctgataacgggattcccttgggccttcaaggtgccaggcctgccccagtacctccagagcctcaccagactagccattgctgcagtgtgggccgcggcagccaagagtggagagcgggagacgaatgtccccatctctttctctcagctgttagaatctgccttccctgaagtgcgctcactaacactggaagccctcttggaaaagttcttagcagcagcctctggacttggagagaagggcgtgccacccttgctgtgcaacatgggagagaagttcttattgttggccatgaaggaaaatcacccagaatgcttctgcaagatactgaaaattctccactgcatggaccctggtgagtggcttccccagacggagcactgtgtccatctgaccccaaaggagttcttgatctggacgatggatattgcttccaatgaaagatctgaaattcagagtgtagctctgagacttgcttccaaagtcatttcccaccacatgcagacatgtgtggagaacagggaattgatagctgctgagctgaagcagtgggttcagctggtcatcttgtcatgtgaagaccatcttcctacagagtctaggctggccgtcgttgaagtcctcaccagtactacaccacttttcctcaccaacccccatcctattcttgagttgcaggatacacttgctctctggaagtgtgtccttacccttctgcagagtgaggagcaagctgttagagatgcagccacggaaaccgtgacaactgccatgtcacaagaaaatacctgccagtcaacagagtttgccttctgccaggtggatgcctccatcgctctggccctggccctggccgtcctgtgtgatctgctccagcagtgggaccagttggcccctggactgcccatcctgctgggatggctgttgggagagagtgatgacctcgtggcctgtgtggagagcatgcatcaggtggaagaagactacctgtttgaaaaagcagaagtcaacttttgggccgagaccctgatctttgtgaaatacctctgcaagcacctcttctgtctcctctcaaagtccggctggcgtcccccaagccctgagatgctctgtcaccttcaaaggatggtgtcagagcagtgccacctcctgtctcagttcttcagagagcttccaccagctgctgagtttgtgaagacagtggagttcacaagactacgcattcaagaggaaaggactttggcttgcttgaggctgctggcctttttggaaggaaaggaaggggaagacaccctagttctcagtgtttgggactcttatgcagaatcgaggcagttaactcttccaagaacagaagcggcatgttgaagaaaatctgggggattgggatgggggtatgtgtggatttttcctccactaaatctgcaggaaacatgttgaacataaattcaaaaattttatcccattcatgcctcccct

SEQ ID NO: 37859 - protein, 414 aa, Artificial Sequence
  derived and/or modified sequence
MAAVGSGGYARNDAGEKLPSVMAGVPARRGQSSPPPAPPICLRRRTRLSTASEETVQNRVSLEKVLGITAQNSSGLTCDPGTGHVAYLAGCVVVILDPKENKQQHIFNTARKSLSALAFSPDGKYIVTGENGHRPAVRIWDVEEKNQVAEMLGHKYGVACVAFSPNMKHIVSMGYQHDMVLNVWDWKKDIVVASNKVSCRVIALSFSEDSSYFVTVGNRHVRFWFLEVSTETKVTSTVPLVGRSGILGELHNNIFCGVACGRGRMAGSTFCVSYSGLLCQFNEKRVLEKWINLKVSLSSCLCVSQELIFCGCTDGIVRIFQAHSLHYLANLPKPHYLGVDVAQGLEPSFLFHRKAEAVYPDTVALTFDPIHQWLSCVYKDHSIYIWDVKDINRVGKVWSELFHSSYVWNVEALS

SEQ ID NO: 37860 - protein, 483 aa, Artificial Sequence
  derived and/or modified sequence
MAAVGSGGYARNDAGEKLPSVMAGVPARRGQSSPPPAPPICLRRRTRLSTASEETVQNRVSLEKVLGITAQNSSGLTCDPGTGHVAYLAGCVVVILDPKENKQQHIFNTARKSLSALAFSPDGKYIVTGENGHRPAVRIWDVEEKNQVAEMLGHKYGVACVAFSPNMKHIVSMGYQHDMVLNVWDWKKDIVVASNKVSCRVIALSFSEDSSYFVTVGNRHVRFWFLEVSTETKVTSTVPLVGRSGILGELHNNIFCGVACGRGRMAGSTFCVSYSGLLCQFNEKRVLEKWINLKVSLSSCLCVSQELIFCGCTDGIVRIFQAHSLHYLANLPKPHYLGVDVAQGLEPSFLFHRKAEAVYPDTVALTFDPIHQWLSCVYKDHSIYIWDVKDINRVGKVWSELFHSSYVWNVEVYPEFEDQRACLPSGSFLTCSSDNTIRFWNLDSSPDSHWQKNIFSNLAPALQMCGRGHSRQPNTPSPGEIAS

SEQ ID NO: 37861 - protein, 1523 aa, Artificial Sequence
  derived and/or modified sequence
MAAVGSGGYARNDAGEKLPSVMAGVPARRGQSSPPPAPPICLRRRTRLSTASEETVQNRVSLEKVLGITAQNSSGLTCDPGTGHVAYLAGCVVVILDPKENKQQHIFNTARKSLSALAFSPDGKYIVTGENGHRPAVRIWDVEEKNQVAEMLGHKYGVACVAFSPNMKHIVSMGYQHDMVLNVWDWKKDIVVASNKVSCRVIALSFSEDSSYFVTVGNRHVRFWFLEVSTETKVTSTVPLVGRSGILGELHNNIFCGVACGRGRMAGSTFCVSYSGLLCQFNEKRVLEKWINLKVSLSSCLCVSQELIFCGCTDGIVRIFQAHSLHYLANLPKPHYLGVDVAQGLEPSFLFHRKAEAVYPDTVALTFDPIHQWLSCVYKDHSIYIWDVKDINRVGKVWSELFHSSYVWNVEVYPEFEDQRACLPSGSFLTCSSDNTIRFWNLDSSPDSHWQKNIFSNTLLKVVYVENDIQHLQDMSHFPDRGSENGTPMDVKAGVRVMQVSPDGQHLASGDRSGNLRIHELHFMDELVKVEAHDAEVLCLEYSKPETGLTLLASASRDRLIHVLNVEKNYNLEQTLDDHSSSITAIKFAGNRDIQMISCGADKSIYFRSAQQGSDGLHFVRTHHVAEKTTLYDMDIDITQKYVAVACQDRNVRVYNTVNGKQKKCYKGSQGDEGSLLKVHVDPSGTFLATSCSDKSISVIDFYSGECIAKMFGHSEIITSMKFTYDCHHLITVSGDSCVFIWHLGPEITNCMKQHLLEIDHRQQQQHTNDKKRSGHPRQDTYVSTPSEIHSLSPGEQTEDDLEEECEPEEMLKTPSKDSLDPDPRCLLTNGKLPLWAKRLLGDDDVADGLAFHAKRSYQPHGRWAERAGQEPLKTILDAQDLDCYFTPMKPESLENSILDSLEPQSLASLLSESESPQEAGRGHPSFLPQQKESSEASELILYSLEAEVTVTGTDSQYCRKEVEAGPGDQQGDSYLRVSSDSPKDQSPPEDSGESEADLECSFAAIHSPAPPPDPAPRFATSLPHFPGCAGPTEDELSLPEGPSVPSSSLPQTPEQEKFLRHHFETLTESPCRELFPAALGDVEASEAEDHFFNPRLSISTQFLSSLQKASRFTHTFPPRATQCLVKSPEVKLMDRGGSQPRAGTGYASPDRTHVLAAGKAEETLEAWRPPPPCLTSLASCVPASSVLPTDRNLPTPTSAPTPGLAQGVHAPSTCSYMEATASSRARISRSISLGDSEGPIVATLAQPLRRPSSVGELASLGQELQAITTATTPSLDSEGQEPALRSWGNHEARANLRLTLSSACDGLLQPPVDTQPGVTVPAVSFPAPSPVEESALRLHGSAFRPSLPAPESPGLPAHPSNPQLPEARPGIPGGTASLLEPTSGALGLLQGSPARWSEPWVPVEALPPSPLELSRVGNILHRLQTTFQEALDLYRVLVSSGQVDTGQQQARTELVSTFLWIHSQLEAECLVGTSVAPAQALPSPGPPSPPTLYPLASPDLQALLEHYSELLVQAVRRKARGH

SEQ ID NO: 37862 - DNA, 4572 bp, Artificial Sequence
  derived and/or modified sequence
atggccgccgtgggcagcggcggctacgccagaaacgacgccggcgagaagctgcccagcgtgatggccggcgtgcccgccagaagaggccagagcagccccccccccgccccccccatctgcctgagaagaagaaccagactgagcaccgccagcgaggagaccgtgcagaacagagtgagcctggagaaggtgctgggcatcaccgcccagaacagcagcggcctgacctgcgaccccggcaccggccacgtggcctacctggccggctgcgtggtggtgatcctggaccccaaggagaacaagcagcagcacatcttcaacaccgccagaaagagcctgagcgccctggccttcagccccgacggcaagtacatcgtgaccggcgagaacggccacagacccgccgtgagaatctgggacgtggaggagaagaaccaggtggccgagatgctgggccacaagtacggcgtggcctgcgtggccttcagccccaacatgaagcacatcgtgagcatgggctaccagcacgacatggtgctgaacgtgtgggactggaagaaggacatcgtggtggccagcaacaaggtgagctgcagagtgatcgccctgagcttcagcgaggacagcagctacttcgtgaccgtgggcaacagacacgtgagattctggttcctggaggtgagcaccgagaccaaggtgaccagcaccgtgcccctggtgggcagaagcggcatcctgggcgagctgcacaacaacatcttctgcggcgtggcctgcggcagaggcagaatggccggcagcaccttctgcgtgagctacagcggcctgctgtgccagttcaacgagaagagagtgctggagaagtggatcaacctgaaggtgagcctgagcagctgcctgtgcgtgagccaggagctgatcttctgcggctgcaccgacggcatcgtgagaatcttccaggcccacagcctgcactacctggccaacctgcccaagccccactacctgggcgtggacgtggcccagggcctggagcccagcttcctgttccacagaaaggccgaggccgtgtaccccgacaccgtggccctgaccttcgaccccatccaccagtggctgagctgcgtgtacaaggaccacagcatctacatctgggacgtgaaggacatcaacagagtgggcaaggtgtggagcgagctgttccacagcagctacgtgtggaacgtggaggtgtaccccgagttcgaggaccagagagcctgcctgcccagcggcagcttcctgacctgcagcagcgacaacaccatcagattctggaacctggacagcagccccgacagccactggcagaagaacatcttcagcaacaccctgctgaaggtggtgtacgtggagaacgacatccagcacctgcaggacatgagccacttccccgacagaggcagcgagaacggcacccccatggacgtgaaggccggcgtgagagtgatgcaggtgagccccgacggccagcacctggccagcggcgacagaagcggcaacctgagaatccacgagctgcacttcatggacgagctggtgaaggtggaggcccacgacgccgaggtgctgtgcctggagtacagcaagcccgagaccggcctgaccctgctggccagcgccagcagagacagactgatccacgtgctgaacgtggagaagaactacaacctggagcagaccctggacgaccacagcagcagcatcaccgccatcaagttcgccggcaacagagacatccagatgatcagctgcggcgccgacaagagcatctacttcagaagcgcccagcagggcagcgacggcctgcacttcgtgagaacccaccacgtggccgagaagaccaccctgtacgacatggacatcgacatcacccagaagtacgtggccgtggcctgccaggacagaaacgtgagagtgtacaacaccgtgaacggcaagcagaagaagtgctacaagggcagccagggcgacgagggcagcctgctgaaggtgcacgtggaccccagcggcaccttcctggccaccagctgcagcgacaagagcatcagcgtgatcgacttctacagcggcgagtgcatcgccaagatgttcggccacagcgagatcatcaccagcatgaagttcacctacgactgccaccacctgatcaccgtgagcggcgacagctgcgtgttcatctggcacctgggccccgagatcaccaactgcatgaagcagcacctgctggagatcgaccacagacagcagcagcagcacaccaacgacaagaagagaagcggccaccccagacaggacacctacgtgagcacccccagcgagatccacagcctgagccccggcgagcagaccgaggacgacctggaggaggagtgcgagcccgaggagatgctgaagacccccagcaaggacagcctggaccccgaccccagatgcctgctgaccaacggcaagctgcccctgtgggccaagagactgctgggcgacgacgacgtggccgacggcctggccttccacgccaagagaagctaccagccccacggcagatgggccgagagagccggccaggagcccctgaagaccatcctggacgcccaggacctggactgctacttcacccccatgaagcccgagagcctggagaacagcatcctggacagcctggagccccagagcctggccagcctgctgagcgagagcgagagcccccaggaggccggcagaggccaccccagcttcctgccccagcagaaggagagcagcgaggccagcgagctgatcctgtacagcctggaggccgaggtgaccgtgaccggcaccgacagccagtactgcagaaaggaggtggaggccggccccggcgaccagcagggcgacagctacctgagagtgagcagcgacagccccaaggaccagagcccccccgaggacagcggcgagagcgaggccgacctggagtgcagcttcgccgccatccacagccccgcccccccccccgaccccgcccccagattcgccaccagcctgccccacttccccggctgcgccggccccaccgaggacgagctgagcctgcccgagggccccagcgtgcccagcagcagcctgccccagacccccgagcaggagaagttcctgagacaccacttcgagaccctgaccgagagcccctgcagagagctgttccccgccgccctgggcgacgtggaggccagcgaggccgaggaccacttcttcaaccccagactgagcatcagcacccagttcctgagcagcctgcagaaggccagcagattcacccacaccttcccccccagagccacccagtgcctggtgaagagccccgaggtgaagctgatggacagaggcggcagccagcccagagccggcaccggctacgccagccccgacagaacccacgtgctggccgccggcaaggccgaggagaccctggaggcctggagacccccccccccctgcctgaccagcctggccagctgcgtgcccgccagcagcgtgctgcccaccgacagaaacctgcccacccccaccagcgcccccacccccggcctggcccagggcgtgcacgcccccagcacctgcagctacatggaggccaccgccagcagcagagccagaatcagcagaagcatcagcctgggcgacagcgagggccccatcgtggccaccctggcccagcccctgagaagacccagcagcgtgggcgagctggccagcctgggccaggagctgcaggccatcaccaccgccaccacccccagcctggacagcgagggccaggagcccgccctgagaagctggggcaaccacgaggccagagccaacctgagactgaccctgagcagcgcctgcgacggcctgctgcagccccccgtggacacccagcccggcgtgaccgtgcccgccgtgagcttccccgcccccagccccgtggaggagagcgccctgagactgcacggcagcgccttcagacccagcctgcccgcccccgagagccccggcctgcccgcccaccccagcaacccccagctgcccgaggccagacccggcatccccggcggcaccgccagcctgctggagcccaccagcggcgccctgggcctgctgcagggcagccccgccagatggagcgagccctgggtgcccgtggaggccctgccccccagccccctggagctgagcagagtgggcaacatcctgcacagactgcagaccaccttccaggaggccctggacctgtacagagtgctggtgagcagcggccaggtggacaccggccagcagcaggccagaaccgagctggtgagcaccttcctgtggatccacagccagctggaggccgagtgcctggtgggcaccagcgtggcccccgcccaggccctgcccagccccggcccccccagcccccccaccctgtaccccctggccagccccgacctgcaggccctgctggagcactacagcgagctgctggtgcaggccgtgagaagaaaggccagaggccactag

SEQ ID NO: 37863 - DNA, 4572 bp, Artificial Sequence
  derived and/or modified sequence
atggcggcagtggggtcaggcggatatgctaggaacgacgccggtgagaaactgcctagtgtgatggcaggagtccccgccaggagaggacagtcttcaccacccccagcccctcccatctgcttgaggagacggaccaggctgagcactgcatccgaagaaaccgtgcagaacagggtgtcactggaaaaggttctggggataactgcgcagaactcctctggattgacatgtgatcccggtaccggccacgtggcctatcttgccgggtgcgtggtggtgatactggaccccaaagaaaataagcaacagcacatcttcaacaccgcaaggaaatccctgagcgcgcttgcttttagccccgatggaaagtatattgtcactggggaaaacggacatagaccagcagtcaggatctgggatgtggaagagaagaatcaggttgcagaaatgctcgggcacaaatatggagtggcatgcgtcgccttttctccaaatatgaaacacattgtttctatgggctatcagcacgacatggtgctcaatgtgtgggactggaaaaaggatattgtcgttgcttccaataaggtatcttgccgcgtcattgccctttctttctcagaagatagttcgtacttcgttacagtgggtaatcgacacgtgcgcttctggtttctggaggtaagcacggagacaaaagtgacctccacggtgccccttgtgggacgatcaggcattcttggtgagctgcataacaacattttctgcggagttgcctgtggccggggacggatggcaggttcaactttctgcgtgagctatagcggtcttttgtgtcagttcaacgaaaagagggtcctggaaaagtggatcaatctgaaggtcagtctgagctcctgcctgtgtgtctcccaggaactgatcttttgtggctgtacagacggaatcgtccgcatttttcaagcccacagtctgcattacctagccaatctccccaaaccccattatcttggggtcgatgtcgcccagggtctggagcctagttttctctttcacaggaaagctgaagcggtgtacccagacactgttgcactcacatttgatccgatacatcagtggctctcctgcgtctacaaggatcattcaatttatatctgggacgtcaaagatattaaccgcgtgggtaaggtttggagcgagctttttcactctagctatgtgtggaacgttgaagtgtacccagaatttgaggatcaacgcgcgtgtctgcccagcggctcatttttgacctgttccagtgacaatacgattagattctggaatttggatagctcaccagattcacactggcagaagaatatctttagcaatactctcctgaaggttgtgtacgtggaaaatgatatccagcacttacaggacatgagtcatttccccgaccgtggcagcgagaacggaacccctatggatgtcaaagccggggtgcgggtgatgcaggtgtctcccgatggacagcatctagcatctggagaccgatctggaaatctgaggattcatgaattacacttcatggacgagttggtgaaagtggaggctcatgacgcagaggttctgtgtctggaatacagcaaacctgagacaggcctgaccctgctggccagtgcgtccagggatcgcttaatccacgtacttaacgtcgagaaaaactacaacttagagcaaactctcgatgaccattccagttccattacagcgattaaatttgcgggcaatcgagacatccagatgattagctgtggagccgacaaatcaatttattttcgaagtgcccagcagggcagcgatggtcttcacttcgtgcgtacacaccatgtagctgagaagaccactctgtacgatatggacatagacatcacccagaaatacgtagctgtggcctgccaggatagaaatgtgagagtttataatacggtcaacgggaagcagaagaagtgctacaagggctctcaaggtgacgaaggctctctgctcaaggtccacgtggatccttccggcacattcttggctacatcatgctcagacaaaagtatctcagtcatcgatttctatagcggtgagtgcatagcaaagatgttcggtcacagtgaaattatcacctcaatgaagttcacctacgactgtcaccatctcatcacagtgtctggggactcatgtgtgttcatctggcacctgggtcccgagattacaaactgcatgaagcagcacttgctggaaattgaccacagacagcagcagcagcacactaacgacaagaagcgctccggccaccccaggcaggacacatatgtaagcaccccatctgagatccactccttgtcccccggagaacagaccgaggatgaccttgaagaggagtgcgaacccgaggagatgctgaaaactccctcaaaggactccctggatcctgacccacgatgcctgttgaccaatggtaagctgcctctgtgggcaaaacggttgttaggtgatgacgacgtcgccgacgggctcgccttccacgctaaacggtcctaccaacctcacggccggtgggcggaaagagcaggccaggagccactgaaaacaatcttagacgcccaggacctggactgttacttcacccctatgaagcctgagagtctggaaaattccatactagacagtctggaacctcagtccctggcgagtctactctccgagagtgaatctccccaggaggctggacgaggtcatccatcattcctcccacagcagaaggagtccagtgaagcctctgagctgatcttatacagcctggaagcggaggtgaccgtgactggcactgacagccagtattgccgaaaagaagtagaggctggaccgggagaccagcagggcgactcgtacctgcgagtcagttccgactcccccaaggatcaaagccctccagaggactctggggaatctgaagctgaccttgaatgctccttcgccgctatccactcaccagccccgcccccggatcctgcccctcgcttcgcaacatctttaccacattttcctgggtgcgcaggcccaaccgaggatgaactctctctgcctgagggcccttctgtgccaagtagcagtttaccccagacccccgagcaagagaaattcctgcgccaccatttcgagacattgactgagtctccatgccgtgaacttttcccagcagcgctcggtgacgtggaagcaagcgaggcggaggaccactttttcaatccacgtttgagtatttccactcaattcctgtcctctctgcaaaaggctagcagatttacccataccttcccccctagggcaacacagtgtctggtaaagtctccagaagtgaaacttatggatcgcggcggatcccagccccgggcgggtaccgggtacgccagtccggaccgaacgcacgtgctggctgcgggaaaggcggaggagactcttgaagcctggagacctcctccaccgtgccttacctctctcgctagctgtgttccagcttcatccgtgctgcccacggatcgaaacttaccgacgcccacttccgcgcctacgcccggactggcccagggtgtgcacgcaccatctacatgtagctacatggaggccactgcttcttccagagcaaggatttcccgcagtatctcacttggtgatagtgaaggccccattgtagcgaccttagcccagccattaaggcggcccagctcagtgggagaactggcttctttaggtcaggagttgcaggctattacaacagcaacgaccccatcactggacagtgaaggacaggagcccgcgctgagaagctggggaaatcacgaagcccgcgccaatctgcgactcacactgagtagcgcgtgcgatggactgctccagcctcccgtagatacacagccaggcgtgacggtgcctgccgtaagcttcccagccccttcccctgtggaggaatccgcactaagactgcacggaagtgctttcagacctagcttacctgctccggagtctcccggcctccctgcacatccaagtaacccccaactgcccgaagctcggcctggcattcctggcggaaccgctagcctgctggagcctactagcggagcacttgggctgctccagggtagtccagctcgctggtctgagccgtgggtgcctgttgaggcattacccccctctcctctcgaactaagtagggttgggaatatactgcatagacttcaaaccacttttcaagaggcactggacctttaccgcgtgcttgtaagtagcggtcaggtggacacgggacagcaacaggccaggacagaactagttagtactttcctgtggatccactcccagctcgaggctgaatgccttgtcggcacctccgttgccccagcgcaggcgctgccatctcccggacccccatccccccccacgctgtacccactagcctcccccgatctacaggccctgttagaacactacagtgaactgctagttcaggccgtccgaagaaaagctcgagggcactag

SEQ ID NO: 37864 - DNA, 4572 bp, Artificial Sequence
  derived and/or modified sequence
atggctgctgtgggcagcggcggctacgccagaaatgatgctggggagaagctgcccagcgtgatggccggcgtgcctgcccggcggggccagagcagccccccaccagccccacccatctgcctgcggcggaggacccggctgagcacagccagcgaggagaccgtgcagaacagagtgtccctggagaaggtgctgggcatcacagcccagaacagcagcggcctgacctgtgaccccggcaccggccacgtggcctacctggccggctgtgtggtggtgatcctggaccccaaggagaacaagcagcagcacatcttcaacacagccaggaagagcctgagcgccctggccttctccccagatggcaagtacatcgtgactggagaaaatggccacaggcctgctgtgcgcatctgggatgtggaggagaagaaccaggtggccgagatgctgggccacaagtatggagtggcctgtgtggccttcagccccaacatgaagcacatcgtgtccatgggctaccagcacgacatggtgctgaatgtgtgggactggaagaaggacatcgtggtggccagcaacaaggtgtcctgcagggtcatcgccctgtccttcagcgaggacagcagctactttgtgacagtgggcaacagacatgtgcgcttctggttcctggaggtgtccacagagaccaaggtgaccagcacagtgcccctggtgggccgcagcggcatcctgggggagctgcacaacaacatcttctgtggggtggcctgtggccggggccgcatggccggcagcaccttctgtgtgtcctacagcggcctgctgtgccagttcaatgagaagagggtgctggagaagtggatcaacctgaaggtgtccctgagcagctgcctgtgtgtgtcccaggagctgatcttctgtggctgcacagatggcatcgtgcgcatcttccaggcccacagcctgcactacctggccaacctgcccaagccccactacctgggcgtggatgtggcccagggcctggagcccagcttcctgttccacaggaaggccgaggccgtgtacccagacacagtggccctgacctttgaccccatccaccagtggctgagctgtgtgtacaaggaccacagcatctacatctgggatgtgaaggacatcaacagagtgggcaaggtgtggagcgagctgttccacagcagctatgtgtggaatgtggaggtgtacccagagtttgaggaccagagggcctgcctgcccagcggcagcttcctgacctgcagcagtgacaacaccatccgcttctggaacctggacagcagcccagacagccactggcagaagaacatcttcagcaacaccctgctgaaggtggtgtatgtggagaatgacatccagcacctgcaggacatgagccacttcccagaccggggctctgaaaatggcacccccatggatgtgaaggccggcgtgcgggtgatgcaggtgtccccagatggccagcacctggccagcggggacagaagtggcaacctgcgcatccacgagctgcacttcatggatgagctggtgaaggtggaggcccatgatgctgaggtgctgtgcctggagtacagcaagccagagaccggcctgaccctgctggccagcgccagccgggacaggctcatccacgtgctgaatgtggagaagaactacaacctggagcagaccctggatgaccacagcagcagcatcacagccatcaagtttgctggcaacagagacatccagatgatcagctgtggggctgacaagagcatctacttccgcagcgcccagcagggcagtgatggcctgcactttgtgaggacccaccacgtggccgagaagaccaccctgtatgacatggacatcgacatcacccagaagtatgtggccgtggcctgccaggacagaaatgtgcgggtgtacaacacagtgaatggcaagcagaagaagtgctacaagggcagccagggagatgagggcagcctgctgaaggtgcacgtggaccccagcggcaccttcctggccaccagctgcagcgacaagagcatcagcgtcatcgacttctacagcggggagtgcatcgccaagatgtttggccacagcgagatcatcacctccatgaagttcacctatgactgccaccacctgatcaccgtgtctggggacagctgtgtgttcatctggcacctgggccctgagatcaccaactgcatgaagcagcacctgctggagattgaccaccggcagcagcagcagcacaccaatgacaagaagaggagcggccacccccggcaggacacctacgtgtccaccccatctgagatccacagcctgagccctggagagcagacagaagatgacctggaggaggagtgtgagcctgaggagatgctgaagacccccagcaaggacagcctggaccctgacccccgctgcctgctgaccaacgggaagctgcccctgtgggccaagaggctgctgggagatgatgatgtggctgatggcctggccttccacgccaagaggagctaccagccccacggccgctgggccgagcgggccggccaggagcccctgaagaccatcctggatgcccaggacctggactgctacttcacccccatgaagccagagagcctggagaacagcatcctggacagcctggagccccagagcctggccagcctgctgtctgagagcgagagcccccaggaggccggccggggccaccccagcttcctgccccagcagaaggagagcagcgaggccagcgagctgatcctgtacagcctggaggccgaggtgacagtgactggaacagacagccagtactgcaggaaggaggtggaggccggccctggggaccagcagggcgacagctacctgcgggtgtccagtgacagccccaaggaccagagccccccagaggacagcggggagagcgaggccgacctggagtgcagctttgctgccatccacagccctgcccctcctccagaccctgcccccaggtttgccaccagcctgccccacttccctggctgtgccggccccacagaagatgagctgagcctgcctgagggccccagcgtgcccagcagcagcctgccccagaccccagagcaggagaagttcctgcggcaccactttgagaccctgacagagagcccctgccgggagctgtttcctgctgccctgggagatgtggaggccagcgaggccgaggaccacttcttcaacccccggctgagcatcagcacccagttcctgagcagcctgcagaaggccagccgcttcacccacaccttccccccccgggccacccagtgcctggtgaagagccctgaggtgaagctgatggacagaggaggcagccagcccagggctggcaccggctacgccagcccagacaggacccacgtgctggccgccggcaaggccgaggagaccctggaggcctggaggcctcctccaccctgcctgaccagcctggccagctgtgtgcctgccagctctgtgctgcccacagacaggaacctgcccacccccaccagcgcccccaccccaggcctggcccagggcgtgcacgcccccagcacctgcagctacatggaggccacagccagcagccgggcccgcatcagccgcagcatcagcctgggggacagcgagggccccatcgtggccaccctggcccagcccctgcggcggcccagctctgtgggggagctggccagcctgggccaggagctgcaggccatcaccacagccaccacccccagcctggacagcgagggccaggagcccgccctgcgctcctggggcaaccacgaggcccgggccaacctgcggctgaccctgagcagcgcctgtgatggcctgctgcagccccctgtggacacccagcccggggtgacagtgcctgctgtgtccttccctgcccccagccctgtggaggagagcgccctgcggctgcacggcagcgccttccggcccagcctgcctgcccctgagagccctggcctgcctgcccaccccagcaacccccagctgcctgaggcccggcccggcatccctgggggcacagccagcctgctggagcccaccagcggggccctgggcctgctgcagggcagccctgcccgctggagcgagccctgggtgcctgtggaggccctgccccccagccccctggagctgagccgggtgggcaacatcctgcaccggctgcagaccaccttccaggaggccctggacctgtacagagtgctggtgagcagcggccaggtggacaccggccagcagcaggccaggacagagctggtgtccaccttcctgtggatccacagccagctggaggctgaatgtctggtgggcacctctgtggccccagcccaggccctgcccagccctggcccccccagcccccccaccctgtaccccctggccagcccagacctgcaggccctgctggagcactacagcgagctgctggtgcaggccgtgcggaggaaggcccggggccactag

SEQ ID NO: 37865 - DNA, 4572 bp, Artificial Sequence
  derived and/or modified sequence
atggccgccgtgggcagcggcggctacgcccggaacgacgccggcgagaagttgccatcagtcatggcaggcgtccctgccagacggggtcagtcttctccaccacccgcccccccaatctgtctcagaagacggacgcgcctgagcacagccagcgaagaaactgtgcaaaaccgagtgtccctggagaaagtcctcggaattaccgctcagaacagttctggtttgacttgtgatcccggaactggccatgtggcgtatctggccgggtgcgtcgtggtgatcttggaccccaaagaaaacaaacagcagcacatcttcaataccgctcgcaagtcattatccgcccttgcattcagcccagacgggaagtatatcgtgactggtgagaacgggcatcgccccgctgtccgtatatgggacgtggaggaaaagaatcaagttgccgagatgctggggcacaagtacggcgtggcttgcgtcgctttttctccaaacatgaaacatatcgtgtcaatgggatatcaacacgatatggtgctgaacgtgtgggattggaaaaaggatatagtggtggcatcgaacaaggtgagttgccgcgtgattgcgctgtctttttcagaggattcaagctatttcgttactgtggggaacagacacgtgcgcttctggttcctcgaggtgtccactgagactaaggtaactagcacagttccacttgtaggtcggtcaggtattctcggggaactacataataacatcttctgtggcgtggcctgtgggcgaggtcggatggccggcagtactttctgcgtgtcttactcaggactgttatgccagtttaacgagaagagggtgttggaaaagtggatcaacctgaaggtgtccttgtcctcctgcctgtgtgtctcccaagagcttatattttgcggctgtacagacggtatagtccgcatttttcaggcacacagcttgcactacttggccaacctgcccaaacctcactacttaggcgtagatgtggcccaaggccttgaacccagctttctattccatagaaaggccgaggcagtttatccggacacagtggctctcaccttcgacccaattcatcaatggctctcatgcgtgtacaaggaccattctatctatatctgggatgtcaaagacatcaaccgcgtgggcaaagtctggagcgaattgtttcatagttcctacgtgtggaacgtcgaagtgtatccggagtttgaggatcagcgagcttgtctcccctcagggtccttcttgacatgttcttccgataacaccatccggttttggaacttggactcctccccggactcccattggcagaaaaatattttttccaacacattgctgaaggtggtttatgttgagaatgatatccagcaccttcaggatatgagtcactttcccgaccgggggtcagagaatggcaccccgatggatgtgaaagctggtgttcgggtaatgcaagtctctcccgatggacagcatctcgcttccggcgacagatctggcaacctgcggatccacgaattacacttcatggatgagctcgttaaggttgaggcacatgatgctgaagtgctgtgcctggaatactccaagcctgagacgggcctgaccctgctggcttcggccagcagagatcgccttattcacgtcctgaacgtggagaagaattataacctggagcaaaccctcgacgaccattcctcgtcgatcactgctatcaagtttgcaggaaatagggatatccaaatgatttcctgtggggccgataaaagtatatactttagatctgctcaacagggttcagacgggctgcatttcgtgagaacacaccacgtcgctgagaagaccaccctatatgatatggatatagacattacccagaaatacgttgctgtggcatgtcaggatagaaacgtgagagtttacaataccgtgaatgggaagcagaagaagtgttacaaaggctcacagggcgatgagggaagcctgctcaaagttcacgttgacccctcaggaactttcctggcgacctcttgttcagataagagcatttctgttatagatttctactctggagaatgcatcgccaagatgttcggccattccgaaatcattacctcaatgaagtttacatatgactgtcaccacctgatcactgtgtcgggagactcttgcgtatttatttggcatctcggacctgagattacaaattgcatgaagcagcacctgcttgagatcgatcatcgccagcaacagcaacacaccaatgacaagaagagatccggacaccctcgccaagacacttacgtcagtaccccatccgagattcactcactctctcccggcgagcagaccgaggatgacttggaggaggaatgcgaacccgaggagatgctaaagactcctagcaaggattcattggaccccgatccaagatgcttgctcactaacggaaagttgccgctctgggcaaaaagactgctgggcgacgacgacgtggctgacggtctcgctttccacgccaagcgttcatatcagcctcatggccgctgggccgagcgggctggacaggaacctttgaagaccattctcgacgctcaagacttagactgctacttcacgcccatgaaacctgaaagcctggagaactctatcctggactccttggagccccaaagtctggcctccctgctgagcgagtctgagtcgccacaggaggcagggaggggacacccttcatttctgccccaacagaaagagagtagcgaagcatccgaactgatactgtactctctagaagccgaggtgaccgtaaccggcaccgattctcagtactgccgtaaggaggtcgaggctggccccggcgaccaacaaggcgacagttatttgcgcgtctcgtctgacagccccaaagaccagtccccccccgaggactctggtgaatctgaggccgacctggagtgctctttcgctgcgattcattcgcccgctccaccccctgatcctgcgcctaggttcgctaccagtctcccccacttcccaggctgcgcaggaccaaccgaggatgagctcagcttgcctgaaggtcccagtgtgcctagtagctcgctgcctcagactcccgagcaggaaaagttcctgcggcaccattttgaaacccttacagagtcaccctgtcgcgagctgttcccagcagcactgggtgacgtcgaagcttctgaggccgaagaccatttttttaaccctagactgtccatctcaacacagttcctctcctctttgcagaaagcatcccgcttcactcacacctttcctcctcgggctactcagtgcctcgtgaagagccctgaggttaagctcatggacaggggagggtcacaaccccgtgcggggaccggctacgcttctccggacagaacccatgttctcgctgccggaaaggcagaagaaactttggaggcctggcgtccacctccaccatgcctcacatctttggcttcttgcgttcctgcttcatctgtgctgccgacggatcgcaatttacccactcccacaagcgcccccacccccggactggcccagggagtgcacgcaccaagcacttgtagttacatggaggccaccgctagctctcgagcaaggatttcaagatcaatcagtctgggcgacagtgaaggaccaatcgttgcgacactagctcagcctctgagacggccgagctccgtgggcgagctcgcctccctgggtcaggagctacaagcaatcaccacagcaactacgcctagccttgactcagagggccaggagccagcactccgatcatggggcaatcatgaggccagagctaacctcagactcaccctgtctagcgcctgcgatggcctgctccagcctccagtggatacacagcctggagtcaccgtgcccgccgtatctttccccgcaccctccccagttgaggagtcagctctgcgactccacggtagtgcgttccgcccctccctcccagcccctgaaagcccaggcttgccggcgcacccctccaacccacagcttccagaggcccgcccgggtatccctggcgggacagcctccctcctggaacctaccagtggagcactgggcctgctgcaggggtcccccgctcgctggagtgaaccctgggtccctgtcgaggcactgccaccaagtccacttgagttatcccgagtgggcaacatcctccaccggcttcaaacaacattccaggaagcactggacttgtatcgggtgttagtctcctctggccaagtcgacaccggccaacagcaggctcgcacagagttagtgtcaacatttctttggatccactcccagttagaggcagaatgcttagtgggcacctcagtcgctccagcgcaggcattgccctcccccggccccccatctccgcctacactttacccgctggcttcacccgacctgcaggccctgctcgagcactacagtgaactattagttcaggccgtgagaaggaaggcacgaggccactag

SEQ ID NO: 37866 - DNA, 4572 bp, Artificial Sequence
  derived and/or modified sequence
atggccgctgtggggtccggcggatacgctcgcaatgacgccggtgagaagctgcctagcgtcatggccggtgtgcccgctcgacgagggcaatccagcccgccacctgcccctcccatttgtcttcgcagacgcacaaggctctctacagctagtgaagagacagtccagaatagggtctccttggaaaaggttcttggcataacagcgcagaattcgagcgggctgacttgtgatcctggaacaggccacgttgcctatttggccggttgtgtagtcgttattttggaccctaaagagaataagcagcagcatatatttaataccgcaaggaagagcctgagcgctttggctttcagtcctgatggaaagtatatcgtaacaggggaaaatggacatcggcctgccgtccgcatctgggatgtggaggagaaaaaccaagtcgccgaaatgctggggcataagtacggcgtcgcctgtgtcgctttctccccaaacatgaaacacatcgtgtctatgggatatcagcatgatatggtgctcaacgtgtgggactggaagaaggacattgtggtggccagcaataaagtgagctgtcgcgtaatcgctctttctttctcagaggatagctcctactttgttacagttggcaaccgacacgtgaggttttggtttctggaagtgtccacggaaacaaaagtgacttccaccgtcccactggttggcagaagcgggatactgggagagcttcacaataacatattttgcggggtggcgtgtggcagaggtagaatggccggaagtacattctgtgttagttattcaggactgctctgccagttcaatgagaaaagggttttggagaagtggattaatctcaaagtgtcactgagctcttgtctttgcgttagccaagaactgatcttctgcggatgtaccgatggcatcgtcaggatctttcaggcccatagtctgcattaccttgctaatctccctaaacctcactaccttggtgtcgacgttgcccaaggactagaaccttccttcttgttccacagaaaggctgaggctgtgtaccctgacaccgttgcactgacttttgaccctatccatcagtggctgtcgtgcgtatataaggaccacagcatttacatatgggatgtgaaggacataaaccgggtgggcaaggtttggtccgaactcttccatagctcctacgtttggaacgtggaagtttaccccgaattcgaggaccagagggcctgcctgccttctgggtcctttctgacatgcagctccgacaatactatcaggttctggaatctcgatagcagcccagatagtcactggcagaagaatattttctctaatacactcctgaaggttgtatatgttgaaaacgatattcagcacctgcaggacatgagtcatttcccagacagaggctccgagaatggaacccccatggacgttaaggctggggtgagggtcatgcaggtctcacctgatggccagcatcttgcttcaggagaccggagcggcaacttgcggatccacgaactacactttatggatgaattggtcaaggtcgaagcacacgatgccgaggtgctgtgtctggagtactctaagcccgagaccgggttgaccctcctggcatcggcatccagagatcgactgattcacgtcctaaatgtagaaaagaattataatttggagcagacactggacgaccactcatcctcaatcaccgcaatcaagttcgccggaaaccgcgatatccagatgatcagctgcggtgcagacaagagcatttactttagatccgcccaacagggatctgatggactgcatttcgtgagaacccaccatgtggcagagaaaacaaccctgtacgacatggatatagacatcacacaaaagtatgtcgccgttgcttgtcaggatagaaacgttcgtgtatacaacacagtgaacggcaagcaaaaaaaatgttataaaggatcacagggcgacgagggtagcctgcttaaggtccatgtcgatcccagcggtacattccttgcgacgtcatgttcagacaagtcaatcagcgtaatcgacttttattctggcgagtgtatagctaaaatgttcgggcactctgagataataacttcaatgaagtttacatatgactgtcaccacctgattaccgtcagcggagacagctgtgtttttatctggcatctggggccagagatcacgaactgtatgaaacagcacttactggaaatcgaccatcgccaacagcagcagcatactaacgataaaaaacgctcaggccatccgcgtcaagatacatacgtgagcacaccgtctgagattcattcactgtcccctggcgagcagactgaggatgacttggaggaggagtgcgagccagaagagatgcttaaaacccctagcaaggactcactggatccggatcccaggtgccttctgactaacgggaagctgcccctttgggcaaagcgcctccttggcgatgacgatgtggcggacgggttggcatttcacgccaagcgaagttatcagccccacgggcgatgggccgaacgcgctggtcaagagccgctgaaaacaatcctggatgcccaggacctggattgctacttcacgcccatgaaaccagaaagcctcgaaaatagcatcctggatagtctggagccacagtctttggcttccctgctgtccgagagtgagtcaccccaggaggcaggaagaggccacccatccttcctccctcagcaaaaggaatccagcgaggcctccgagttgattttatatagcctggaagcagaggtgacggtgaccggaaccgactctcagtactgccgcaaggaagtggaggcgggtcctggcgatcagcagggagactcttatttgcgggtatcgagcgatagtcctaaagaccagtcacctcctgaagactccggagagagtgaagctgacctggagtgcagcttcgccgcaattcactcacctgcacccccaccagaccccgcaccaaggtttgctacaagtctgccacacttccccggatgcgcaggtccgacagaggacgaattgtctttaccagaaggaccctcagtgcccagtagtagcttaccacagactcccgaacaggaaaaattccttcgtcatcatttcgagaccctgaccgagagcccttgtcgtgaattattccccgctgccttaggagatgtggaggcatctgaggccgaggatcatttcttcaacccccgactgtccatcagtacgcaattccttagctcgttgcaaaaggccagccgattcactcacacgtttccaccccgtgccacacagtgccttgtcaaatcaccagaggtcaagctcatggaccgcggaggcagtcagcctcgggctggtacgggatacgcctctcccgacaggactcacgtgctggccgctggcaaagcggaggaaactctggaagcttggagacctccccctccttgcctgacctcacttgctagctgcgttcccgcaagttctgtgctgcccaccgatagaaatcttccgactccaacgtccgccccaaccccagggttggcccaaggtgttcatgccccttcaacttgttcatacatggaagcgaccgcctcttctcgtgcaaggatctctagaagtattagcctcggcgatagcgagggcccaatcgtggcaacactggcccaaccgctgagaaggcctagcagcgtgggagaacttgcttctttgggccaggaactccaagccattaccacggcaacgacaccaagcctcgactctgaaggccaagagcccgcactgcgcagttgggggaaccatgaagcaagagcaaacctacgactgactctatctagcgcatgtgatggattactgcagcccccagtggacacacagccaggggtaacagttccagccgtatcattcccagccccaagccccgtggaagagtccgccctcaggctacacggtagcgcattccgccctagcttgcctgctcccgagtcaccaggcctgcccgcacatccaagcaatccccagctccccgaggccagaccaggcatccctggaggcaccgccagtctcctcgagcctactagcggagccttggggctactccagggatctcctgctcggtggagtgagccgtgggtacccgtcgaggctttgccaccctctcctctcgagcttagccgcgtgggaaacatcctgcatcgcctgcagactacattccaagaggcacttgacctgtatcgcgtattagttagcagtgggcaggtggataccggacaacaacaggccaggaccgaactggtaagcacttttctctggatccacagtcagcttgaggccgaatgtctcgtgggcacatccgttgctcctgcacaggccctcccctcccccggacccccatctccacctaccttgtaccctctcgcttctcctgacttgcaggccctgctggaacactacagcgaactcctagtccaggccgtgcgtagaaaggccaggggacactag

SEQ ID NO: 37867 - DNA, 4745 bp, Artificial Sequence
  derived and/or modified sequence
tttcccgcggctgttcgctgttccagtgggtcgtggcggtggcggcagcggcggttaggggatgtaacggtcgcccgcctccggcgtgacgatggcggccgtagggtccggaggctatgcgcggaacgatgcaggggagaagctgccctctgtcatggcgggagttccggcgcggaggggccagtcctccccgccccccgccccaccaatctgcctacggcggcggacgcgactctcgacggcctccgaggagacggtgcagaaccgggtgtcactcgagaaggtgcttggcatcacagcccagaacagcagtggcctaacctgtgaccccggcacaggccatgtggcctacctggcaggctgtgtggtggtgattttggaccccaaggagaacaagcagcagcacatctttaacaccgccaggaagtctctcagtgctctggccttctcccctgatgggaagtacatagtgacaggggagaatgggcataggcctgctgtgcgcatctgggatgtggaggagaagaatcaggtggcggagatgctaggccacaagtatggtgtggcgtgtgtggccttctcacccaatatgaagcacatcgtgtccatgggctaccaacatgacatggtgctcaacgtctgggactggaagaaagacatcgtagtggcctccaacaaggtatcttgtagagtcattgccctctccttctcagaggacagcagctattttgtcactgttgggaaccgccatgtgaggttctggttcttggaagtctccactgagacaaaggtgacgagcacagtgccccttgtagggcgctcgggcatcctgggcgagctgcacaacaacatcttctgtggtgtggcctgcggtcggggccggatggcgggcagtaccttctgtgtgtcctactcgggcctcctctgccagttcaatgagaagagggtgctggagaagtggatcaacctgaaggtctccctgtcttcctgcctctgtgtcagccaggagctcatcttctgtggctgcacagatgggatagtccgcatcttccaggcccatagcctgcactacctcgccaacctgcccaagccacactaccttggggtagacgtggcacagggcctggagcccagcttcctcttccacaggaaggcggaagcagtctacccagatacagtggcactgaccttcgaccccatccaccagtggctgtcctgcgtgtataaggaccacagcatctacatctgggatgtcaaggacatcaacagagtgggcaaggtgtggtcagagctcttccacagctcctacgtttggaacgtggaggtgtatcctgagtttgaagaccagagagcttgtttgccatcaggatcctttctgacttgttcttcagacaacaccattcgcttctggaacttggacagcagccctgattctcactggcagaaaaacatcttcagcaataccctgctgaaggtcgtgtacgtggagaatgacatccagcacctgcaggacatgtcacacttcccagaccgggggagcgagaatgggacacccatggacgtgaaagccggggtgcgggtcatgcaggtcagtcctgacggccagcatttggcttcaggcgaccgaagtggaaatctgaggatccacgagctgcacttcatggacgagctggtcaaggtggaggcccatgatgctgaggtgctgtgcctggagtactccaagccagagacggggctgaccttgctggcctcagccagtcgggaccggctgatccatgtgctgaacgtggagaagaactacaacctggagcagacgctggatgaccactcctcctccatcaccgccatcaagttcgctggcaacagagacatccagatgatcagctgtggggctgacaagagcatctactttcgcagtgcccagcagggttcggatggactacactttgtccgtacccaccacgtagcagagaaaaccaccttgtatgacatggacattgacatcacccagaagtacgtggccgtggcctgccaggaccgcaatgtgagagtctacaacactgtgaacgggaagcagaagaagtgctacaagggctcccagggtgacgaagggtccttgctgaaggtccatgtggacccctcaggcaccttcctggccaccagctgctctgacaaaagcatctcagtgattgacttttactcgggcgagtgcattgccaagatgtttggccattcagaaattattaccagcatgaagttcacctatgactgtcatcacttgatcacagtatctggagacagctgcgtgttcatctggcacctgggcccggagatcaccaactgcatgaagcagcacttgctggagattgaccaccggcagcagcagcagcacacaaatgacaagaagcggagtggccaccccaggcaggatacgtatgtgtccacacctagtgagattcactccctgagccctggagagcaaacagaggatgatctggaggaagagtgtgagccagaagagatgctgaagacaccatccaaagatagcttggatccagatcctcgttgcctgctaaccaacggcaagctgccactgtgggcaaagcggctgctaggggacgatgatgtggcagatggcttggccttccacgccaagcgcagctaccagccccacggccgctgggcagagcgggccggccaagagcccctcaagaccatcctggatgcccaggacctggattgctactttacccccatgaagcccgagagtctggagaactccattctggattcactggagccacagagcctggccagcctgctgagtgagtcagagagtccccaggaagctggccgcgggcacccctccttcctgccccagcagaaggaatcatctgaggccagtgagctcatcctctactctctggaggcagaagtgacagtcacagggacagacagccagtattgcaggaaggaggtggaggccgggcctggagaccagcagggcgactcctacctcagggtgtcctccgacagcccaaaggaccagagcccgcctgaggactcgggggagtcagaggccgacctggagtgcagcttcgcagccatccactccccagctccgcctcctgaccctgcccctcggtttgccacgtcgctgccccatttcccaggatgcgcaggtcccacagaagatgagctgtccctgcccgagggacccagcgtccccagcagctccctaccccagactccggagcaggagaagttcctccgccaccactttgagacactgactgagtccccctgcagagagctcttccccgcagctctgggagacgtggaggcctctgaagctgaagaccacttcttcaacccacgcctgagtatctccacgcagttcctctcaagcctccagaaggcatccaggttcacccataccttccctccccgggcaacccagtgccttgtgaagtctccagaggtcaagctcatggaccgaggcggaagccagcccagagcaggtactggctacgcctccccagacaggacccacgtcctcgctgcagggaaggctgaagagaccctggaggcctggcgcccaccacctccctgccttacgagcctggcgtcctgtgtccctgcttcctccgtgctgcccacagacaggaatctcccaacgcccacatctgcacccaccccaggcctggctcagggtgtccatgccccctccacctgttcctacatggaggccactgccagctcccgtgccaggatatcacgcagcatctccctcggtgacagtgagggccctatcgtggccacactggcccagcccctccgtaggccatcgtccgttggggagctggcctccttgggccaggagcttcaggccatcaccaccgcgacaacacccagtttggacagtgagggccaagagcctgccctgcgttcctggggcaaccacgaggcccgggccaacctgagactgaccctgtcaagtgcctgtgatgggctcctgcagccccccgtggatacccagcctggcgtcaccgtccctgcagtgagcttcccagcccctagccctgtggaagagagcgccctgaggctccacggctctgcctttcgcccaagtctcccagctcctgagtcccctggccttcctgcccaccccagtaacccccagcttccagaggcccggcctggcatccctggcggcactgcctccctcctggagcccacctccggtgcacttggtctgttacagggcagccctgcccgctggagtgagccctgggtgccggttgaagccctgcccccatctccccttgagctgagcagggtggggaacatcttgcacaggctgcagaccaccttccaagaagccctcgacctttaccgtgtgttggtctccagtggccaggtggacaccgggcagcagcaggcacggactgagctggtctccaccttcctgtggatccacagccagctggaggctgaatgcctggtggggactagtgtggccccagcccaggctctgcccagcccaggacccccgtccccaccgacgctgtaccccctggccagcccagacctgcaggccctgctggaacactactcggagctgctggtgcaggccgtgcggaggaaggcacgggggcactgagggcgcagcccctccaccgcagccctgctgcttctgaggacttaggtattttaagcgaataaactgacagctttgaggaatg

SEQ ID NO: 37868 - protein, 516 aa, Artificial Sequence
  derived and/or modified sequence
MSTERTSWTSLSTIQKIALGLGIPASATVAYILYRRYRESREERLTFVGEDDIEIEMRVPQEAVKLIIGRQGANIKQLRKQTGARIDVDTEDVGDERVLLISGFPVQASGAKITCDKESEGTLLLSRLIKISGTQKEVAAAKHLILEKVSEDEELRKRIAHSAETRVPRKQPISVRREDMTEPGGAGEPALWKNTSSSMEPTAPLVTPPPKGGGDMAVVVSKEGSWEKPSDDSFQKSEAQAIPEMPMFEIPSPDFSFHADEYLEVYVSASEHPNHFWIQIVGSRSLQLDKLVNEMTQHYENSVPEDLTVHVGDIVAAPLPTNGSWYRARVLGTLENGNLDLYFVDFGDNGDCPLKDLRALRSDFLSLPFQAIECSLARIAPSGDQWEEEALDEFDRLTHCADWKPLVAKISSYVQTGISTWPKIYLYDTSNGKKLDIGLELVHKGYAIELPEDIEENRAVPDMLKDMATETDASLSTLLTETKKSSGEITHTLSCLSLSEAASMSGDDNLEDDYLL

SEQ ID NO: 37869 - DNA, 1551 bp, Artificial Sequence
  derived and/or modified sequence
atgagcaccgagagaaccagctggaccagcctgagcaccatccagaagatcgccctgggcctgggcatccccgccagcgccaccgtggcctacatcctgtacagaagatacagagagagcagagaggagagactgaccttcgtgggcgaggacgacatcgagatcgagatgagagtgccccaggaggccgtgaagctgatcatcggcagacagggcgccaacatcaagcagctgagaaagcagaccggcgccagaatcgacgtggacaccgaggacgtgggcgacgagagagtgctgctgatcagcggcttccccgtgcaggccagcggcgccaagatcacctgcgacaaggagagcgagggcaccctgctgctgagcagactgatcaagatcagcggcacccagaaggaggtggccgccgccaagcacctgatcctggagaaggtgagcgaggacgaggagctgagaaagagaatcgcccacagcgccgagaccagagtgcccagaaagcagcccatcagcgtgagaagagaggacatgaccgagcccggcggcgccggcgagcccgccctgtggaagaacaccagcagcagcatggagcccaccgcccccctggtgacccccccccccaagggcggcggcgacatggccgtggtggtgagcaaggagggcagctgggagaagcccagcgacgacagcttccagaagagcgaggcccaggccatccccgagatgcccatgttcgagatccccagccccgacttcagcttccacgccgacgagtacctggaggtgtacgtgagcgccagcgagcaccccaaccacttctggatccagatcgtgggcagcagaagcctgcagctggacaagctggtgaacgagatgacccagcactacgagaacagcgtgcccgaggacctgaccgtgcacgtgggcgacatcgtggccgcccccctgcccaccaacggcagctggtacagagccagagtgctgggcaccctggagaacggcaacctggacctgtacttcgtggacttcggcgacaacggcgactgccccctgaaggacctgagagccctgagaagcgacttcctgagcctgcccttccaggccatcgagtgcagcctggccagaatcgcccccagcggcgaccagtgggaggaggaggccctggacgagttcgacagactgacccactgcgccgactggaagcccctggtggccaagatcagcagctacgtgcagaccggcatcagcacctggcccaagatctacctgtacgacaccagcaacggcaagaagctggacatcggcctggagctggtgcacaagggctacgccatcgagctgcccgaggacatcgaggagaacagagccgtgcccgacatgctgaaggacatggccaccgagaccgacgccagcctgagcaccctgctgaccgagaccaagaagagcagcggcgagatcacccacaccctgagctgcctgagcctgagcgaggccgccagcatgagcggcgacgacaacctggaggacgactacctgctgtag

SEQ ID NO: 37870 - DNA, 1551 bp, Artificial Sequence
  derived and/or modified sequence
atgagtactgaaagaacttcgtggacaagcctctccactattcagaagatcgctctgggattgggcatccccgcgagcgctacagtcgcctacatcctgtaccgaaggtaccgggaatccagagaagagcgtttgaccttcgtaggggaggatgatattgagatcgagatgagggtacctcaggaggccgtcaagttgattatcgggcgacaaggcgccaatatcaagcagctgcgcaagcagacgggagcaaggattgacgtggatactgaagatgtgggcgacgagagggtcctactgatcagcggcttccccgtacaggccagtggagctaaaattacatgcgataaggagagcgagggcactctgctgctgtctagacttatcaaaatcagcggtacccagaaggaagtggctgccgctaagcatctgatcctcgagaaggtgagtgaggacgaagagctaagaaaacggattgctcatagcgcggagacaagagttccgagaaagcagcccatcagcgtccggcgtgaggacatgacagaacccggcggggctggtgagcctgctctgtggaaaaacacatcttcctccatggaacccaccgcaccacttgtgactcccccccccaagggcggaggagacatggctgtcgtagtcagtaaggagggctcctgggagaaacccagcgatgactcttttcaaaagtccgaggctcaggctatacccgagatgcctatgtttgagatccccagccccgacttttcatttcacgccgacgagtatttagaggtatatgtatcagcatccgagcaccccaatcacttctggatccagatcgtgggatcacgttccctccagctggataaactggtgaatgaaatgacacaacactacgagaattcagttcctgaagacctcacagtgcacgtgggcgatatcgttgccgcgccactgcccaccaacggaagctggtacagagcccgcgtgcttggcactctggagaatggtaatctggacctgtactttgtagacttcggggataatggggattgccccttgaaggatctccgggcattgaggtcagatttcctgtccctgccatttcaagctatcgagtgctccctcgcgaggatcgcacccagcggagaccaatgggaagaagaagcacttgacgaattcgaccgcctgactcattgtgctgactggaaacctctcgttgctaaaattagctcttacgtgcagactggtatttctacgtggcctaaaatatacctgtacgataccagcaacgggaagaaactagatatcgggctggagctggtgcataaggggtacgcaatcgagttaccagaagacattgaagagaatagggcagtgccggacatgttaaaagatatggcaacagaaaccgacgcttccctcagcaccctcctaaccgagaccaagaagagctcaggagagattacgcatacactttcatgtttgtccctgagtgaggcagcttcaatgagcggtgatgataaccttgaagatgactacctactttag

SEQ ID NO: 37871 - DNA, 1551 bp, Artificial Sequence
  derived and/or modified sequence
atgagcacagagaggacctcctggaccagcctgagcaccatccagaagatcgccctgggcctgggcatcccagccagcgccaccgtggcctacatcctgtaccgccgctaccgggagagccgggaggagcggctgacctttgtgggggaggatgacattgaaattgagatgagggtgccccaggaggccgtgaagctgatcatcggccggcagggcgccaacatcaagcagctgaggaagcagacaggagccagaattgatgtggacacagaagatgtgggagatgagcgggtgctgctgatcagcggcttccctgtgcaggccagcggggccaagatcacctgtgacaaggagagcgagggcaccctgctgctgagccgcctcatcaagatcagcggcacccagaaggaggtggccgccgccaagcacctgatcctggagaaggtgtctgaagatgaggagctgaggaagagaattgcccacagcgctgagaccagggtgcccaggaagcagcccatctctgtgcggcgggaggacatgacagagcctggaggagctggggagcccgccctgtggaagaacaccagcagctccatggagcccacagcccccctggtgaccccaccacccaagggcggcggggacatggctgtggtggtgtccaaggagggctcctgggagaagcccagtgatgacagcttccagaagtctgaggcccaggccatccctgagatgcccatgtttgagatccccagcccagacttctccttccacgcagatgagtacctggaggtgtatgtgtctgccagcgagcaccccaaccacttctggatccagatcgtgggcagccgcagcctgcagctggacaagctggtgaatgagatgacccagcactatgagaacagcgtgcctgaggacctgactgtgcacgtgggggacatcgtggccgcccccctgcccaccaacggctcctggtaccgggcccgggtgctgggcaccctggagaatggaaacctggacctgtactttgtggactttggagacaatggagactgccccctgaaggacctgcgggccctgcggagtgacttcctgagcctgcccttccaggccattgaatgttccctggccagaattgcccccagcggggaccagtgggaggaggaggccctggatgaatttgaccggctgacccactgtgccgactggaagcccctggtggccaagatcagcagctatgtgcagacaggcatcagcacctggcccaagatctacctgtatgacaccagcaatggcaagaagctggacatcggcctggagctggtgcacaagggctacgccatcgagctgcctgaggacatcgaggagaacagagctgtgcctgacatgctgaaggacatggccacagaaacagatgccagcctgagcaccctgctgacagagaccaagaagagcagcggggagatcacccacaccctgagctgcctgagcctgtctgaggccgcctccatgtctggagatgacaacctggaggatgactacctgctgtag

SEQ ID NO: 37872 - DNA, 1551 bp, Artificial Sequence
  derived and/or modified sequence
atgagcaccgagcggaccagctggaccagcctgagcaccatccagaagattgctctcggcctaggcattccagcctctgcaacagtggcctatattctgtatagacgttaccgggaatccagagaagagagattaaccttcgtcggtgaagatgacatcgagattgaaatgcgagtgcctcaggaagcagtcaaactgattatcgggagacaaggcgccaacatcaaacaattaagaaagcaaacgggagctcgcatcgatgtagacacagaagacgtgggcgacgaaagggtccttttaatttccggattccccgttcaggcttccggagctaaaatcacatgtgataaagaaagtgaaggcacccttctcctgtctcggctgattaagataagcggcactcagaaagaggttgctgcggctaagcacctcatcctcgagaaagttagtgaggacgaagagcttcggaagagaatcgctcactcggctgagacaagggtgcccagaaagcaaccaatatcagttcgccgtgaggacatgactgagcccggaggagctggtgaaccagcactgtggaagaacacgtcctcctccatggaacctaccgcccccctcgttacccctcccccaaaaggggggggagatatggccgtcgtggtgagcaaggagggctcatgggaaaagccaagcgatgattccttccagaaatctgaggcccaagctatacccgaaatgcccatgttcgagataccgtcccccgacttcagtttccacgccgatgaatacctcgaagtttatgtgtcagcatcggagcatcctaaccatttctggatccagatcgtgggatctagaagcctgcagttggataaactggtcaacgaaatgactcagcattatgaaaatagcgttccagaagatctgaccgttcacgtgggtgatattgtcgctgctccactgcccacaaatggctcttggtacagggcgcgggtgctgggcacactggagaacgggaatttggacctgtactttgtggactttggagacaacggagattgtcccctgaaggacctacgtgcactaaggagcgactttctctcattacccttccaggccatagaatgcagcctggcgcggatcgcacctagcggcgatcagtgggaggaagaggccttagatgagttcgatagactgacgcactgcgctgattggaaacctttagtggcaaagatcagctcttacgttcaaactggcatttctacctggcccaagatctacctgtatgacacctccaatggaaagaaattagatattgggcttgagctcgtacacaaagggtacgctatcgaactgccggaggacatcgaggagaaccgtgccgttccagatatgttgaaggatatggccacagagactgatgcctcactgagcaccctgctcacagagaccaagaaaagttccggagagatcacacacacgctgtcttgtctgtccctgtccgaagccgcctctatgtctggtgatgataacttggaagacgactacctgctctag

SEQ ID NO: 37873 - DNA, 1551 bp, Artificial Sequence
  derived and/or modified sequence
atgtccactgagagaacatcctggacttcactgtcgacaatccaaaagattgcactggggctcggcattcccgcttcagccacggtcgcctatatactgtacaggagataccgtgaatctcgggaagagcggttaacatttgtcggtgaggatgacattgagatcgaaatgagagtcccacaggaagcggtgaagttgattattggccgtcagggagctaacatcaagcagctgcgcaaacagacaggagccaggattgacgttgacacggaggatgttggcgatgaaagagtgctcctgatttcggggtttccagttcaggccagcggcgcaaagatcacctgtgataaggaaagtgaaggcacgctgctgctcagccggcttatcaagatctcaggcacccagaaagaagtggcggctgctaagcacctcatcctggaaaaagtttcagaggacgaagaacttaggaaacgcattgctcactccgcggagacgcgcgtccctagaaaacagccaattagtgtgagacgagaggacatgacagaaccaggcggtgcaggggaaccagctctatggaagaacacaagttcttctatggaacccacagctcccttagtgacacccccaccaaagggaggcggtgacatggccgttgtggtgtctaaggaaggcagctgggagaaaccctcagatgattcatttcagaaatcggaagcccaggcgattccggagatgcctatgtttgagatcccgtcgcccgacttcagttttcatgctgacgaataccttgaagtgtacgtgtccgcaagcgagcaccccaaccatttctggatacaaatcgttggctcgaggagcctccagctagataaactcgtgaatgagatgacacagcactatgagaatagcgtacccgaagacctgactgtgcacgtcggagatatagtcgctgctccgctaccaacaaacggatcatggtatcgggctcgggtgctgggaactctggagaacggcaatcttgatctatacttcgtggattttggagataatggtgactgcccgttgaaggacctgcgcgctttacgtagcgatttcctgagcctcccatttcaggccattgaatgttcactggctcggatcgccccaagtggggatcagtgggaggaggaggcactggatgagtttgatcggctgactcactgcgcggattggaagccactggtagccaaaatctcttcttatgtgcaaacgggaatttcgacttggccgaagatttatctatacgacacatcgaacgggaagaaactggacatcggcctcgaactggtacacaaggggtacgccatcgaactacccgaagacatcgaagaaaatcgcgctgtgcccgatatgcttaaagacatggcgaccgagacggacgcatctctctccacgctcctcaccgagacaaaaaagagctcaggcgaaatcacccatactctctcttgcctcagcctgagcgaggcagcctcaatgtctggagatgataacctggaggacgactacctcttatag

SEQ ID NO: 37874 - DNA, 2651 bp, Artificial Sequence
  derived and/or modified sequence
gggaggcggcggcgctggtggctgcagctggggtgaggcgcgaggcggcgcactcgacggctgactggagcagcggtaaaggcgaggatggagaccgaaggatataagtcaaagagtacagcagaaaatgtctactgaacggacttcttggacaagcctgtccaccattcagaaaatagccctgggccttgggatcccagccagtgcaacagttgcctatatcctataccgcaggtatagggaaagcagagaagagcggctgacatttgttggggaagatgacattgagatagagatgcgggttccccaggaggctgtgaaactcatcattggccggcaaggagccaatattaaacagctgcggaaacagacaggtgctcggattgatgtggacacagaggatgtaggcgatgagcgagtgctgcttatcagtggttttcctgttcaggcatctggagccaaaattacctgtgacaaagaatcagaagggacattactactatcaagacttataaaaatctcaggaacacagaaggaagtggcagcagccaagcatttgatactggagaaagtttcagaagatgaagaacttcggaagagaattgctcattctgcagaaaccagggtcccacgcaaacagccaatcagtgtgagaagagaagacatgacagagccaggtggagctggagagccagcattatggaaaaacaccagttctagcatggagccgactgcacccctggtgactcctccacccaaaggaggaggcgacatggctgtggtagtgtcaaaggaaggttcctgggagaaacctagtgatgacagctttcagaagtctgaagcccaggccatcccagagatgcccatgtttgaaatccccagtcctgacttcagttttcatgctgatgagtacctagaagtctacgtttctgcttctgagcaccctaaccacttctggatccagatcgttggctcccgcagcctgcaattggataagcttgtcaatgagatgacccagcactatgagaatagtgtgcctgaagacttgactgtgcatgtaggagacattgtagcagcacctttacctacaaatggttcctggtatcgagcccgggtcctcggcaccttggagaatgggaacttggacctctattttgttgactttggagataatggagattgcccactgaaggacctcagggctctcaggagtgacttcctaagccttccatttcaagcaatagaatgtagtctggcacggattgctccctcaggtgaccagtgggaagaggaagctttggatgagtttgatagactcactcattgtgctgactggaagcctctggtagccaagatctctagctatgtccagactgggatctcaacttggccaaagatctacttatatgatactagcaatgggaagaaacttgatattgggctagaattagtacacaaaggatacgcaattgagcttcctgaagacatagaagaaaacagagctgtcccagacatgttgaaggacatggccacagaaacagatgcctctctcagcacgttgctcactgagaccaaaaagagctctggagagataacacataccctgtcctgcctcagcttatcagaagctgcttccatgtctggtgatgataaccttgaagatgactacttactctgaagtctgggcttcagtttgctcagccatctgctttgctgtgtgagtgcagctatcatctatctgtagcaacaggaaagtaatgagggcgacagtggggcacttgctttgattccctctttcccatgccctgtcttaatatacttctctgcagctgctttcctgcagcttaacttgctctcagattgagcactttcaagctttttgtgtatttctgtctttggcaggatttggcataggaattggtgcatggaggagaggagtgtatgataaaggatccatgcagtccttcctttattacacatatagtctggcttgctgtggaccaaattaatattctcctcccatcagactacaaaaaaattggactaccacgctacaagtgtgtctcccccattccacctccggatccctccccaaccctccagtgtttgaatactgctgtgttacttccaggccgttcaacgtcaggctcagtcccctctaccagtcatgattcacattactactaggctgtatcctttttgaggctgggaaacagtcaggctttcgtcattggaagtgattctgcagacttctgactcaccttatcaggtgactctggttaaggaaagcttttgagtggtgaactcaaagactccagttgaatcaggaggcaaaggcaaaaattagcataattatatttaaaagcctcaggaagtgggaagagaatactgcctcccagcctcaattgctgatatgttattggagacaggcttttgaaactgctccagctatttctctgtaacctttagttaaaatataagtagaaaggagacaggaggctcaggaaattttctaaattgctagtataatatctatatgtatacacacatatacacccgtggagagagaggaagagtatacagtcctgtttgaatcatttggaggatttttttgctgaataaagttctcaagaaaattttctaaaaccaaa

SEQ ID NO: 37875 - protein, 118 aa, Artificial Sequence
  derived and/or modified sequence
MPFLELDTNLPANRVPAGLEKRLCAAAASILGKPADRVNVTVRPGLAMALSGSTEPCAQLSISSIGVVGTAEDNRSHSAHFFEFLTKELALGQDRILIRFFPLESWQIGKIGTVMTFL

SEQ ID NO: 37876 - protein, 132 aa, Artificial Sequence
  derived and/or modified sequence
MQLFLLAVSVPLPAMPFLELDTNLPANRVPAGLEKRLCAAAASILGKPADRVNVTVRPGLAMALSGSTEPCAQLSISSIGVVGTAEDNRSHSAHFFEFLTKELALGQDRILIRFFPLESWQIGKIGTVMTFL

SEQ ID NO: 37877 - DNA, 357 bp, Artificial Sequence
  derived and/or modified sequence
atgcccttcctcgagttggacacgaacttgcccgcaaatcgggtccctgcggggcttgaaaaacgtctgtgcgcagccgccgctagcatcctgggtaagccggcagatcgggtgaacgttacggtgcgccctgggctggcgatggccctctctggaagcacagagccctgcgctcaactttcaatatcaagtatcggcgtggttggaaccgctgaggataacagatctcacagcgcgcactttttcgagttcctcaccaaggagcttgctctgggacaagacagaattctgatcaggttttttccccttgaaagttggcagataggcaaaattggaactgtgatgactttcctttag

SEQ ID NO: 37878 - DNA, 357 bp, Artificial Sequence
  derived and/or modified sequence
atgccatttctcgagctggatacgaatttaccggcaaaccgagtcccggccgggctggagaagcggttgtgcgctgccgcagccagcattcttggaaagcccgcagatcgggtgaatgtgaccgtgcggcccggactcgctatggctctatcggggtcaacagaaccctgcgcgcaactgagtatcagcagcatcggagtggtgggtacagccgaagataaccgatcccacagcgcacactttttcgagtttctgaccaaagaactggcactagggcaagatagaattctgatcaggttcttcccccttgaatcttggcaaatcggcaagatcggtaccgtaatgacatttttatag

SEQ ID NO: 37879 - DNA, 399 bp, Artificial Sequence
  derived and/or modified sequence
atgcagctgttcctcctcgctgtgtccgtgcccctgcccgctatgccctttctggagctcgataccaacctgcccgcgaatagagtgcccgccggactcgagaaacggctgtgtgccgccgctgctagtatcctggggaagccagcagacagggtgaatgtgactgtacggccagggctagccatggctctctctgggtctacagaaccctgcgcacagctgtccatcagctccattggcgtagtggggaccgccgaggacaacagatcacatagcgcccatttttttgagtttctgactaaagagttggcacttggtcaagacaggatcctaatccgctttttccccttggaatcatggcagataggcaagatcggtactgttatgaccttcctctag

SEQ ID NO: 37880 - DNA, 357 bp, Artificial Sequence
  derived and/or modified sequence
atgcccttcctggagctggacaccaacctgcctgccaacagagtgcctgctggcctggagaagaggctgtgtgccgctgctgccagcatcctgggcaagccagctgacagagtgaatgtgacagtgcggcccggcctggccatggccctgagcggcagcacagagccctgtgcccagctgagcatcagcagcattggagtggtgggcacagctgaggacaacagaagccacagcgcccacttctttgagttcctgaccaaggagctggccctgggccaggaccgcatcctgatccgcttcttccccctggagagctggcagatcggcaagattggaacagtgatgaccttcctgtag

SEQ ID NO: 37881 - DNA, 399 bp, Artificial Sequence
  derived and/or modified sequence
atgcagctgttcctgctggccgtgtctgtgcccctgcctgccatgcccttcctggagctggacaccaacctgcctgccaacagagtgcctgctggcctggagaagaggctgtgtgccgctgctgccagcatcctgggcaagccagctgacagagtgaatgtgacagtgcggcccggcctggccatggccctgagcggcagcacagagccctgtgcccagctgagcatcagcagcattggagtggtgggcacagctgaggacaacagaagccacagcgcccacttctttgagttcctgaccaaggagctggccctgggccaggaccgcatcctgatccgcttcttccccctggagagctggcagatcggcaagattggaacagtgatgaccttcctgtag

SEQ ID NO: 37882 - DNA, 357 bp, Artificial Sequence
  derived and/or modified sequence
atgcccttcctggagctggacaccaacctgcccgccaaccgggtgcctgccggcttggagaaaagactctgcgccgcggcagctagtatcctcggaaagcctgcggatagagtcaacgtgactgttagacccggacttgccatggcactctcaggttcgaccgaaccatgtgctcaactcagcatctcttctattggtgtggtcggcaccgccgaggacaaccgctcccattctgcgcattttttcgaatttctgaccaaggagctggctctgggacaggaccgaattctgatcaggttcttccctctcgagtcctggcagattggaaagatcggtacggtcatgacctttctttag

SEQ ID NO: 37883 - DNA, 357 bp, Artificial Sequence
  derived and/or modified sequence
atgcccttcctggagctggacaccaacctgcccgccaaccgggtgccagcggggttggaaaaaagattatgtgccgccgccgcatcaatcctgggtaagcctgctgaccgggtaaatgtgactgtgcgacctggactagcaatggcactgtcaggatctaccgaaccttgtgcacagctctctatatctagtataggcgtcgtcggcacagccgaagataacaggtcccactcagcccacttctttgagtttttaaccaaggagctcgcccttggacaggatcgcatcctaatcagattctttccccttgaaagttggcagattggtaaaatcggaacggtgatgacctttttgtag

SEQ ID NO: 37884 - DNA, 399 bp, Artificial Sequence
  derived and/or modified sequence
atgcagctgttcctgctggccgtgagcgtgcccctgcccgccatgcccttcttagaactggatacgaacttgcctgcaaaccgagttcctgccggactggagaagagactgtgcgccgctgccgcctcaatcctcggtaaaccagccgatagagttaatgtcactgtgcgccctggacttgccatggccctgagcggctcgacggagccttgcgcacagctgtccataagcagtatcggcgttgtcggaacagccgaagacaatcgatcgcactccgcccatttctttgagtttctcacaaaagagttggccctaggccaggataggattctgatccgctttttccccctagagtcctggcagattgggaagatcggcacagtcatgacctttctgtag

SEQ ID NO: 37885 - DNA, 357 bp, Artificial Sequence
  derived and/or modified sequence
atgccttttctggagcttgataccaacctacccgcaaatcgcgtcccggctggtcttgaaaaacgcctgtgtgctgcagcggcttcgatcctaggaaaacctgctgatcgggttaacgtcacagttagaccgggattggccatggcccttagtggctcaactgaaccctgcgcgcaactctccatctcctctatcggcgtagtggggaccgcagaagataacaggtctcattctgctcatttctttgaattcctgacaaaggaactagctctgggacaggacaggatactcatcagattcttccctctcgagtcatggcaaattggaaagatcggaactgtgatgaccttcctctag

SEQ ID NO: 37886 - DNA, 357 bp, Artificial Sequence
  derived and/or modified sequence
atgcctttcttagagttggatactaacctgccagccaatcgggtgcctgccggactggaaaagcgactgtgtgccgcagccgcatcgattctcggtaagcctgcagatcgcgtaaacgtcacggttcgcccagggctagccatggccttaagcggcagcacagagccctgtgcccaactgtccatcagttctataggggttgtaggaaccgcagaggacaataggagtcatagtgcccatttctttgaattcctgactaaagagctggcactggggcaggatcgaatcttgataaggtttttcccattggaatcatggcagattggcaagatcgggactgttatgactttcctctag

SEQ ID NO: 37887 - DNA, 399 bp, Artificial Sequence
  derived and/or modified sequence
atgcagctctttctcttagctgtcagcgtgccccttcctgccatgcccttcctggagctcgacaccaacttgcctgctaatcgagtgccggcagggttggagaaaagactgtgcgcagccgctgccagcatactcggcaaaccagccgatagggttaacgtaaccgtgcgtcccggtttggcaatggcacttagtgggtctaccgaaccttgtgcgcaactctcaatctctagcattggtgtcgttggtactgctgaggacaacaggagccattcagcccacttctttgagttcttaacaaaagaactcgctctcggccaggaccggatcctcatcaggttcttccctcttgaatcctggcagatcggaaaaataggaacagtaatgacatttctttag

SEQ ID NO: 37888 - DNA, 671 bp, Artificial Sequence
  derived and/or modified sequence
gatcccggtgccagggaccctgcccagttccaggcgtcgccctgacccagaaacgactgggcgccgccgtcctggaaaggccccagcgcacggacatctgaggagctgtttccgttcctctgcccgccatgccgttcctggagctggacacgaatttgcccgccaaccgagtgcccgcggggctggagaaacgactctgcgccgccgctgcctccatcctgggcaaacctgcggaccgcgtgaacgtgacggtacggccgggcctggccatggcgctgagcgggtccaccgagccctgcgcgcagctgtccatctcctccatcggcgtagtgggcaccgccgaggacaaccgcagccacagcgcccacttctttgagtttctcaccaaggagctagccctgggccaggaccggatacttatccgctttttccccttggagtcctggcagattggcaagatagggacggtcatgacttttttatgattgggcacggagggatccagggcatctgtgaactggctgcttcttccagagagatctcttggcagagtgagggcctggagataaccagctttggattatcccgcatgcaacattcctgtgatcacataatcctcttcttcatcctcatatgaaataaatgaagagagcttcctcattcaaacatga

SEQ ID NO: 37889 - DNA, 713 bp, Artificial Sequence
  derived and/or modified sequence
gtttgcagaagcgggaggtaccctaggcagccaatcggggagcgccgagtctctgtccagccaatgagaagccaggttgctgtggcgcctcgcccctcctccctggtccgcgagccttgggtacccccagcttttcttccgccagagctgtttccgttcctctgcccgccatgccgttcctggagctggacacgaatttgcccgccaaccgagtgcccgcggggctggagaaacgactctgcgccgccgctgcctccatcctgggcaaacctgcggaccgcgtgaacgtgacggtacggccgggcctggccatggcgctgagcgggtccaccgagccctgcgcgcagctgtccatctcctccatcggcgtagtgggcaccgccgaggacaaccgcagccacagcgcccacttctttgagtttctcaccaaggagctagccctgggccaggaccggatacttatccgctttttccccttggagtcctggcagattggcaagatagggacggtcatgacttttttatgattgggcacggagggatccagggcatctgtgaactggctgcttcttccagagagatctcttggcagagtgagggcctggagataaccagctttggattatcccgcatgcaacattcctgtgatcacataatcctcttcttcatcctcatatgaaataaatgaagagagcttcctcattcaaacatga

SEQ ID NO: 37890 - DNA, 805 bp, Artificial Sequence
  derived and/or modified sequence
atcccttcaaggccactcagtccacagcattctctggtggcagacgctgcaggaggagcccatcagtgctggctgctgagtctttgaaagcggacccacggtggcagcatggtgcccaacacgtggaggctgcagtgcgggaggacctcttccaggaggccctcccagctgtcctgaaggccaaggacctgcctccagtagaacctgctgttaaagagaatctgaagaccttaatgcagcttttcttgctagctgtttccgttcctctgcccgccatgccgttcctggagctggacacgaatttgcccgccaaccgagtgcccgcggggctggagaaacgactctgcgccgccgctgcctccatcctgggcaaacctgcggaccgcgtgaacgtgacggtacggccgggcctggccatggcgctgagcgggtccaccgagccctgcgcgcagctgtccatctcctccatcggcgtagtgggcaccgccgaggacaaccgcagccacagcgcccacttctttgagtttctcaccaaggagctagccctgggccaggaccggatacttatccgctttttccccttggagtcctggcagattggcaagatagggacggtcatgacttttttatgattgggcacggagggatccagggcatctgtgaactggctgcttcttccagagagatctcttggcagagtgagggcctggagataaccagctttggattatcccgcatgcaacattcctgtgatcacataatcctcttcttcatcctcatatgaaataaatgaagagagcttcct

SEQ ID NO: 37891 - DNA, 357 bp, Artificial Sequence
  derived and/or modified sequence
atgcccttcctggagctggacaccaacctgcccgccaacagagtgcccgccggcctggagaagagactgtgcgccgccgccgccagcatcctgggcaagcccgccgacagagtgaacgtgaccgtgagacccggcctggccatggccctgagcggcagcaccgagccctgcgcccagctgagcatcagcagcatcggcgtggtgggcaccgccgaggacaacagaagccacagcgcccacttcttcgagttcctgaccaaggagctggccctgggccaggacagaatcctgatcagattcttccccctggagagctggcagatcggcaagatcggcaccgtgatgaccttcctgtag

SEQ ID NO: 37892 - DNA, 399 bp, Artificial Sequence
  derived and/or modified sequence
atgcagctgttcctgctggccgtgagcgtgcccctgcccgccatgcccttcctggagctggacaccaacctgcccgccaacagagtgcccgccggcctggagaagagactgtgcgccgccgccgccagcatcctgggcaagcccgccgacagagtgaacgtgaccgtgagacccggcctggccatggccctgagcggcagcaccgagccctgcgcccagctgagcatcagcagcatcggcgtggtgggcaccgccgaggacaacagaagccacagcgcccacttcttcgagttcctgaccaaggagctggccctgggccaggacagaatcctgatcagattcttccccctggagagctggcagatcggcaagatcggcaccgtgatgaccttcctgtag

SEQ ID NO: 37893 - protein, 134 aa, Artificial Sequence
  derived and/or modified sequence
MPFLELDTNLPANRVPAGLEKRLCAAAASILGKPADRVNVTVRPGLAMALSGSTEPCAQLSISSIGVVGTAEDNRSHSAHFFEFLTKELALGQDRFPTVLSTSPAAHGGPRCPGEIIEGKKSCLNEEALFIYFI

SEQ ID NO: 37894 - DNA, 405 bp, Artificial Sequence
  derived and/or modified sequence
atgccctttctcgagttagacaccaatctcccagccaatcgcgtgcctgccggcctggaaaagagactatgcgctgccgcagcctctattctgggcaaacctgccgatcgcgtgaacgtgacagttagaccggggctggcaatggccttgagcggcagtacagagccttgtgcccagttatccatttcctctatcggcgttgtcggcactgccgaggataaccggtcccattctgcccacttcttcgagttcctgaccaaggagctggcactgggccaggacaggtttccaactgtcctgtccacttcccccgcagctcacggcggccctagatgtcctggagagattatagaagggaagaagtcatgcttaaatgaagaagctttgttcatctactttatctag

SEQ ID NO: 37895 - DNA, 405 bp, Artificial Sequence
  derived and/or modified sequence
atgcccttcctggagctggacaccaacctgcctgccaacagagtgcctgctggcctggagaagaggctgtgtgccgctgctgccagcatcctgggcaagccagctgacagagtgaatgtgacagtgcggcccggcctggccatggccctgagcggcagcacagagccctgtgcccagctgagcatcagcagcattggagtggtgggcacagctgaggacaacagaagccacagcgcccacttctttgagttcctgaccaaggagctggccctgggccaggaccgcttccccaccgtgctgagcaccagccctgctgcccatggaggcccccgctgccctggagagatcatcgagggcaagaagagctgcctgaatgaggaggccctcttcatctacttcatctag

SEQ ID NO: 37896 - DNA, 405 bp, Artificial Sequence
  derived and/or modified sequence
atgcccttcctggagctggacaccaacctgcccgccaaccgggtgcccgctggtttggaaaagcggctctgtgctgccgcagcctccatcctcggtaagcctgcggacagagttaacgttacagtgcgccccggactcgctatggcattgtcagggagtacggagccctgcgcgcaattgtccatctcatccatcggggttgtgggcacagcggaagataatcgctcccatagcgcccattttttcgagtttctgacgaaagagttggccctgggccaagacaggttcccaaccgtgctctcaacgagccccgccgcccacggaggccctaggtgcccgggcgagatcattgaaggaaaaaaatcatgcctaaacgaggaggccctgttcatttactttatatag

SEQ ID NO: 37897 - DNA, 405 bp, Artificial Sequence
  derived and/or modified sequence
atgcctttcctagaactggatacgaatctccctgctaaccgcgtgcctgctgggctggagaaacggctatgtgcggcagccgctagcattctgggcaagccagctgaccgggtgaacgtcactgtgaggcctgggcttgcgatggcgctttcaggttcgaccgagccctgtgcccagctcagtatttcaagcattggagtcgtcggaaccgctgaggacaaccgcagccattccgctcatttctttgagttcttgaccaaagagctagcattgggacaagataggtttccaacggttcttagcacctctcccgctgcacacggagggcctagatgccctggggaaattattgaaggcaagaaaagttgcctgaacgaagaggctctgttcatttatttcatttag

SEQ ID NO: 37898 - DNA, 1545 bp, Artificial Sequence
  derived and/or modified sequence
ttcctctgcccgccatgccgttcctggagctggacacgaatttgcccgccaaccgagtgcccgcggggctggagaaacgactctgcgccgccgctgcctccatcctgggcaaacctgcggaccgcgtgaacgtgacggtacggccgggcctggccatggcgctgagcgggtccaccgagccctgcgcgcagctgtccatctcctccatcggcgtagtgggcaccgccgaggacaaccgcagccacagcgcccacttctttgagtttctcaccaaggagctagccctgggccaggaccggttccctacggtcttatccaccagccctgctgcccatggtggccccagatgcccaggagagataatagaaggtaagaagtcatgtttgaatgaggaagctctcttcatttatttcatatgaggatgaagaagaggattatgtgatcacaggaatgttgcatgcgggataatccaaagctggttatctccaggccctcactctgccaagagatctctctggaagaagcagccagttcacagatgccctggatccctccgtgcccaatcataaaaaagtcatgaccgtccctatcttgccaatctgccaggactccaaggggaaaaagcggataagtatccttcaggagacagagaaaaagatatcatcagctccttggctaataccacatcttgcaagacccctgccaggtactcccactgtgggtactcaggacagcctgcctcagtccaccaggcattttgcaaacctgctcatcccaataatgattttccccaacccccagcagggcagtgggacactcaggtgtgggaggtagccgcacatcatgacccagctaggacagacacacaatacagtagcctcggtgtgtgtgccgtacactctatcatctccatcagtttgtgtactgaggggtaccctgcctcctaattgcaggctccctaagggcacagtacctcagccacctgttttctcaaaggctgagcacagggtgaccccccaccccaccaaccccgccactaatgtctgggccataagtgaacatgcccctctcagaggtaacagcaagtttccagtgaggaaaaccagaacttgggacagcctggttggggcgggcgggagtatgaacagcctgtcttctcatcataaaattggcataatggagattatctacctcatggggatagcatgtcttgtctgagcaaagggagagtggatagggattgtaaggatcaaatgggatcatgagtgtaaagtacctgtagaggacctagcacatggtaagtgtataacacttgttgttagagtaacagttttccctgagtatccgtgggagatttgttctagaatccccagaggaaaccagaatctacatttgctcaagtcccttacataaaatggtgtaatatttgcatgtaacctacacacatcctctcatatactttaaataatctctgggttacttataatacctaatataatgtacgtactatgtaaatagttgtattgtttagggaataatgacaag

SEQ ID NO: 37899 - DNA, 405 bp, Artificial Sequence
  derived and/or modified sequence
atgcccttcctggagctggacaccaacctgcccgccaacagagtgcccgccggcctggagaagagactgtgcgccgccgccgccagcatcctgggcaagcccgccgacagagtgaacgtgaccgtgagacccggcctggccatggccctgagcggcagcaccgagccctgcgcccagctgagcatcagcagcatcggcgtggtgggcaccgccgaggacaacagaagccacagcgcccacttcttcgagttcctgaccaaggagctggccctgggccaggacagattccccaccgtgctgagcaccagccccgccgcccacggcggccccagatgccccggcgagatcatcgagggcaagaagagctgcctgaacgaggaggccctgttcatctacttcatctag

SEQ ID NO: 37900 - protein, 399 aa, Artificial Sequence
  derived and/or modified sequence
MGRKSLYLLIVGILIAYYIYTPLPDNVEEPWRMMWINAHLKTIQNLATFVELLGLHHFMDSFKVVGSFDEVPPTSDENVTVTETKFNNILVRVYVPKRKSEALRRGLFYIHGGGWCVGSAALSGYDLLSRWTADRLDAVVVSTNYRLAPKYHFPIQFEDVYNALRWFLRKKVLAKYGVNPERIGISGDSAGGNLAAAVTQQLLDDPDVKIKLKIQSLIYPALQPLDVDLPSYQENSNFLFLSKSLMVRFWSEYFTTDRSLEKAMLSRQHVPVESSHLFKFVNWSSLLPERFIKGHVYNNPNYGSSELAKKYPGFLDVRAAPLLADDNKLRGLPLTYVITCQYDLLRDDGLMYVTRLRNTGVQVTHNHVEDGFHGAFSFLGLKISHRLINQYIEWLKENL

SEQ ID NO: 37901 - protein, 321 aa, Artificial Sequence
  derived and/or modified sequence
MAAATRGCRPWGSLLGLLGLVSAAAAAWDLASLRCTLGAFCECDFRPDLPGLECDLAQHLAGQHLAKALVVKALKAFVRDPAPTKPLVLSLHGWTGTGKSYVSSLLAHYLFQGGLRSPRVHHFSPVLHFPHPSHIERYKKDLKSWVQGNLTACGRSLFLFDEMDKMPPGLMEVLRPFLGSSWVVYGTNYRKAIFIFISNTGGKQINQVALEAWRSRRDREEILLQELEPVISRAVLDNPHHGFSNSGIMEERLLDAVVPFLPLQRHHVRHCVLNELAQLGLEPRDEVVQAVLDSTTFFPEDEQLFSSNGCKTVASRIAFFL

SEQ ID NO: 37902 - DNA, 966 bp, Artificial Sequence
  derived and/or modified sequence
atggccgctgctactaggggatgtaggccatggggcagcttactagggttgctcgggctagtttccgccgctgctgcagcctgggatctcgcatccctgcgctgcaccctgggcgcattttgtgagtgcgattttcgtcccgatctgccaggactggagtgcgaccttgcgcaacacctggccggacaacacttggctaaggccttggtcgtgaaggccctgaaggccttcgtccgggaccccgcaccaaccaagccacttgttctttctcttcatggctggaccggaaccggaaagtcgtatgttagttcattacttgctcactatctgtttcaggggggtttgcgatcccctcgagtgcaccattttagccccgtcttacactttccacatccaagccacatagagagatacaagaaggacttgaaatcctgggtacaaggaaatctgacagcatgcgggcgtagcctgtttctgtttgacgagatggacaagatgccacctggcctcatggaagttttgcgcccatttttggggagttcctgggtggtatacggaacgaactaccggaaagccatttttatttttatttccaataccggaggcaaacagatcaatcaggtggctttggaggcttggagatctcgccgtgaccgggaagagattctgttgcaagaacttgagcccgttatctccagggccgtgctggataacccccatcacggtttcagtaactcaggaatcatggaggaacggctgcttgacgctgtagttccgtttctgcccctacagcggcaccacgtgcgccactgcgtcctcaacgagctcgcgcaattggggctggagcccagggatgaggtggtgcaggctgtgctcgactcgaccactttttttcccgaagacgagcagcttttcagctcaaatggttgtaaaaccgtggctagccgaatagctttttttctttag

SEQ ID NO: 37903 - DNA, 966 bp, Artificial Sequence
  derived and/or modified sequence
atggctgccgctacacgcggatgtcgaccgtggggttccctcttgggtctgctgggacttgtgtcagctgccgctgccgcctgggacctggcttctcttagatgtacccttggggctttttgcgaatgcgattttagacccgacctgcctgggttagaatgcgaccttgcccaacatcttgccggtcagcacctcgctaaagccctcgtcgtcaaggccctcaaggcgtttgtccgcgaccccgccccaaccaagccccttgtgctgagcctgcacggatggacgggaacagggaaatcatacgtttcaagtctcctggcacactatctgttccagggggggcttcggtcaccacgggtgcaccacttctctccggtactgcacttcccacatccctcccacattgaaagatataagaaagatctcaagagttgggtgcaggggaatttaacagcctgtggacgaagtctgtttctgtttgatgagatggataagatgccaccaggacttatggaagtgctgcggccgttcctaggctcctcttgggtcgtgtacggaacgaactatagaaaggcgatcttcatttttattagtaatactggtgggaagcagattaaccaggtggctcttgaagcctggcgttcaagaagggatagagaggagatcttgcttcaggagctagaaccagtaatttcacgggctgtgctcgacaacccacaccacggctttagcaattccggcatcatggaagagcgcctcctggacgctgtggtgccatttctcccgctccagaggcaccatgtccgtcactgcgtgttgaatgaacttgctcagctgggactcgagcctcgcgacgaggttgtacaggcggtcctcgattcaaccacattcttccctgaagatgaacagctattcagttctaatggatgtaaaacagtggcctcccgaatcgccttttttttgtag

SEQ ID NO: 37904 - DNA, 966 bp, Artificial Sequence
  derived and/or modified sequence
atggctgccgctacacgcggatgtcgaccgtggggttccctcttgggtctgctgggacttgtgtcagctgccgctgccgcctgggacctggcttctcttagatgtacccttggggctttttgcgaatgcgattttagacccgacctgcctgggttagaatgcgaccttgcccaacatcttgccggtcagcacctcgctaaagccctcgtcgtcaaggccctcaaggcgtttgtccgcgaccccgccccaaccaagccccttgtgctgagcctgcacggatggacgggaacagggaaatcatacgtgtcttctcttcttgctcattacctcttccaaggtggcttaagatcacccagagtacaccatttctctccagtgctgcatttcccacacccttcccatatagaaaggtacaagaaggatcttaagtcgtgggtacaaggcaacttaaccgcctgtggtcgatcacttttcttatttgatgaaatggacaaaatgcctcccggcttgatggaggtgttgcgtccgttcctgggcagctcctgggtagtgtacggcacaaattatcggaaggccatcttcatctttatatccaataccggtggcaaacagatcaaccaggtggcactggaggcttggaggtcaagaagggacagagaggagattctgcttcaggagctagaaccagttattagcagggcagtattagataacccccatcacggattttccaactcgggcatcatggaagagcggctgctggatgctgttgtgcctttcctgcccctacaaagacatcatgtgcggcattgtgttctcaatgagctcgcacagctcgggttagagcccagagacgaagtggtacaggctgtcctggattcgactacatttttccctgaagatgaacagctattcagttctaatggatgtaaaacagtggcctcccgaatcgccttttttttgtag

SEQ ID NO: 37905 - DNA, 966 bp, Artificial Sequence
  derived and/or modified sequence
atggccgccgccaccagaggctgcagaccctggggcagcctgctgggcctgctgggcctggtgagcgccgccgccgccgcctgggacctggccagcctgagatgcaccctgggcgccttctgcgagtgcgacttcagacccgacctgcccggcctggagtgcgacctggcccagcacctggccggccagcacctggccaaggccctggtggtgaaggccctgaaggccttcgtgagagaccccgcccccaccaagcccctggtgctgagcctgcacggctggaccggcaccggcaagagctacgtgagcagcctgctggcccactacctgttccagggcggcctgagaagccccagagtgcaccacttcagccccgtgctgcacttcccccaccccagccacatcgagagatacaagaaggacctgaagagctgggtgcagggcaacctgaccgcctgcggcagaagcctgttcctgttcgacgagatggacaagatgccccccggcctgatggaggtgctgagacccttcctgggcagcagctgggtggtgtacggcaccaactacagaaaggccatcttcatcttcatcagcaacaccggcggcaagcagatcaaccaggtggccctggaggcctggagaagcagaagagacagagaggagatcctgctgcaggagctggagcccgtgatcagcagagccgtgctggacaacccccaccacggcttcagcaacagcggcatcatggaggagagactgctggacgccgtggtgcccttcctgcccctgcagagacaccacgtgagacactgcgtgctgaacgagctggcccagctgggcctggagcccagagacgaggtggtgcaggccgtgctggacagcaccaccttcttccccgaggacgagcagctgttcagcagcaacggctgcaagaccgtggccagcagaatcgccttcttcctgtag

SEQ ID NO: 37906 - DNA, 966 bp, Artificial Sequence
  derived and/or modified sequence
atggctgctgctacccggggatgccggccctgggggagtcttctggggttgctgggactggtttcggctgcagcagctgcatgggaccttgcaagcctccgctgtaccttgggggccttttgcgaatgcgacttccgtcccgatttacctggcctcgaatgcgacctcgcacagcatcttgccggtcagcatctcgccaaagctctagttgtgaaggccctgaaggcctttgtccgcgatccagcccctactaagcctttagttctgtcattgcacggctggacaggaactgggaaaagttacgtgagctcattgttagcacactatctatttcaaggcggattaaggagcccacgcgttcaccacttttcccccgttctccatttccctcatccgagccacattgaacgctataaaaaagatttgaagtcttgggtacaaggcaatctgaccgcgtgtggtcgatccctgttccttttcgacgagatggacaagatgccacctggactgatggaggtacttcgaccattcctaggttccagttgggtggtctacggaaccaattacagaaaggccatcttcattttcatctccaatacgggcgggaagcaaattaatcaggtggctctggaggcctggaggagccgtcgtgatagggaagaaattctcctccaggagctggagcctgtgatatcgcgggcagtgctggacaacccccaccacggattctccaattcaggcattatggaggagcggctcctggatgcagtggttccctttctgcctctccagcggcaccacgtgcgtcattgtgtactgaacgagttggcacagctggggctggaaccacgtgacgaggtcgtgcaggcagttctggacagtacaactttttttccggaagacgaacagctgttttcaagtaacggatgtaagacagtggctagtcggatagcattttttctttag

SEQ ID NO: 37907 - DNA, 966 bp, Artificial Sequence
  derived and/or modified sequence
atggctgctgccacccggggctgccggccctggggcagcctgctgggcctgctgggcctggtgtctgctgctgctgctgcctgggacctggccagcctgcgctgcaccctgggcgccttctgtgaatgtgacttccggccagacctgcccggcctggagtgtgacctggcccagcacctggccggccagcacctggccaaggccctggtggtgaaggccctgaaggcctttgtgcgggaccctgcccccaccaagcccctggtgctgagcctgcacggctggacaggaacaggcaagagctatgtgagcagcctgctggcccactacctgttccagggcggcctgcggagcccccgggtgcaccacttcagccctgtgctgcacttcccccaccccagccacatcgagcgctacaagaaggacctgaagtcctgggtgcagggcaacctgacagcctgtggccgcagcctcttcctgtttgatgagatggacaagatgcctcctggcctgatggaggtgctgcggcccttcctgggcagctcctgggtggtgtatggcaccaactacaggaaggccatcttcatcttcatcagcaacacaggaggcaagcagatcaaccaggtggccctggaggcctggaggagccggcgggaccgggaggagatcctgctgcaggagctggagcctgtgatcagcagagctgtgctggacaacccccaccacggcttcagcaacagcggcatcatggaggagcggctgctggatgctgtggtgcccttcctgcccctgcagaggcaccacgtgcgccactgtgtgctgaatgagctggcccagctgggcctggagcccagagatgaggtggtgcaggccgtgctggacagcaccaccttcttcccagaagatgagcagctgttcagcagcaatggctgcaagacagtggccagcagaattgccttcttcctgtag

SEQ ID NO: 37908 - DNA, 1523 bp, Artificial Sequence
  derived and/or modified sequence
cgggcgaggcagttgactgccccacaacgagctcgggcctcacccggatggcggctgcgacgcgcggctgccggccctggggctcgctcctcgggctgctcgggctggtctcggccgcggccgccgcctgggacctggcttccctgcgctgcaccttgggcgccttttgcgaatgcgacttccggcccgacttgccgggtctggagtgtgacctggctcagcacctggccggccagcatctggccaaggcgctggtggtgaaggcgctgaaggcctttgtgcgggacccagcccccaccaagccgctggtcctctccctgcacggctggaccggcaccggcaaatcctatgtcagctccctgctggcgcactacctcttccagggcggcctccgcagcccccgcgtgcaccacttttctcccgtcctccacttcccccaccccagccacatcgagcgctacaagaaggatctgaagagctgggtccaagggaacctcactgcctgtggccgctccctcttcctcttcgatgagatggacaagatgcccccaggcctgatggaagtcctgcggcctttcctgggctcctcctgggtggtatacgggaccaattaccgcaaagccatcttcatcttcatcagcaacacgggtggcaagcagatcaaccaggtggcattggaggcgtggcgcagccggcgggaccgcgaggagatcctcctgcaggagctggagccggtcatctcccgcgcggtgctggacaacccgcaccatggcttctcaaactcgggcatcatggaagagcgcctcctagacgcagtggtgcccttcctcccgctccagcggcaccacgtccggcactgcgtgctcaacgagctggcccagctgggcctggagccaagggatgaggttgtccaggctgtgctggacagcaccaccttcttccctgaagacgagcagctcttctcctccaacggctgcaagaccgtggcctcccgaatcgccttcttcctctgactctctgagtggtgtcctcggcccccctgatggccaggccatgcaggaaaggccaggggcctctgtcacaggaacccagagcaccaagtgagatgaacggagtgtcggctaggccacgggacagatggccaggaagggccctggcctctaaactggctcgagagcatcttggccccggccaccttccccagggaaacccctggtcaccccagaacctcactgagccttgacctccccctgcagcctgagccttcttactgtgaattataactcagggactgtggctcgtggcggtgctccctcctcagtctgccacccttgccccttgcctccttggtcgggcaccatacctcctcccctccaccccacaccctgtgtccatatcaagccaggtggagccttctcagtttccagaaatggagggactcaagctgccacttgggcctggttttagatgtttttaattttgtaaaagaaaacaagtataataaactcagctgtgggaccaga

SEQ ID NO: 37909 - DNA, 966 bp, Artificial Sequence
  derived and/or modified sequence
atggccgccgccacccggggctgccggccctggggcagcctgctggggctgctggggctggtcagcgcagcagctgctgcgtgggacttagcaagtctgagatgtacccttggtgcattttgcgagtgtgatttccgccccgacctaccgggcttagagtgcgacctcgcacaacacctcgcaggacagcacctggcgaaggctctggttgtgaaagccctcaaggcctttgtgcgggacccagcgcccacaaaaccattggtgctgagcctgcatggctggaccggcaccgggaaatcttacgttagtagccttctggcccactacctgttccagggaggccttcgttctcctagagtacatcacttcagcccagtccttcacttccctcacccgagccacatcgaacgatacaaaaaagatttaaaatcttgggttcaggggaacctgacagcatgcgggagatctttgttcctgttcgacgaaatggacaagatgccgcccggtctgatggaggtgctcagaccttttcttggctcctcctgggtcgtatacggcactaactaccgcaaagctatttttatctttatttcaaacactggcggtaagcagataaaccaagtcgcattggaagcctggcgatcccgccgcgatagagaggagatcctcttgcaagagctagagccagtgatcagccgggccgtactggataacccgcaccacgggttctccaactcggggattatggaagagaggctcctggatgccgttgtccctttcttgccactccagcggcatcacgtccggcattgtgttctgaacgagctagcccagttgggattggagccccgcgacgaagttgtccaggcagtactggatagcaccactttcttccccgaagatgagcagctgtttagctctaacggctgtaagacagtggcttccagaattgccttcttcctgtag

SEQ ID NO: 37910 - RNA, 966 nt, Artificial Sequence
  derived and/or modified sequence
auggcugccgcuacacgcggaugucgaccgugggguucccucuugggucugcugggacuugugucagcugccgcugccgccugggaccuggcuucucuuagauguacccuuggggcuuuuugcgaaugcgauuuuagacccgaccugccuggguuagaaugcgaccuugcccaacaucuugccggucagcaccucgcuaaagcccucgucgucaaggcccucaaggcguuuguccgcgaccccgccccaaccaagccccuugugcugagccugcacggauggacgggaacagggaaaucauacguuucaagucuccuggcacacuaucuguuccagggggggcuucggucaccacgggugcaccacuucucuccgguacugcacuucccacaucccucccacauugaaagauauaagaaagaucucaagaguugggugcaggggaauuuaacagccuguggacgaagucuguuucuguuugaugagauggauaagaugccaccaggacuuauggaagugcugcggccguuccuaggcuccucuugggucguguacggaacgaacuauagaaaggcgaucuucauuuuuauuaguaauacuggugggaagcagauuaaccagguggcucuugaagccuggcguucaagaagggauagagaggagaucuugcuucaggagcuagaaccaguaauuucacgggcugugcucgacaacccacaccacggcuuuagcaauuccggcaucauggaagagcgccuccuggacgcuguggugccauuucucccgcuccagaggcaccauguccgucacugcguguugaaugaacuugcucagcugggacucgagccucgcgacgagguuguacaggcgguccucgauucaaccacauucuucccugaagaugaacagcuauucaguucuaauggauguaaaacaguggccucccgaaucgccuuuuuuuuguag

SEQ ID NO: 37911 - RNA, 966 nt, Artificial Sequence
  derived and/or modified sequence
auggcugccgcuacacgcggaugucgaccgugggguucccucuugggucugcugggacuugugucagcugccgcugccgccugggaccuggcuucucuuagauguacccuuggggcuuuuugcgaaugcgauuuuagacccgaccugccuggguuagaaugcgaccuugcccaacaucuugccggucagcaccucgcuaaagcccucgucgucaaggcccucaaggcguuuguccgcgaccccgccccaaccaagccccuugugcugagccugcacggauggacgggaacagggaaaucauacgugucuucucuucuugcucauuaccucuuccaagguggcuuaagaucacccagaguacaccauuucucuccagugcugcauuucccacacccuucccauauagaaagguacaagaaggaucuuaagucguggguacaaggcaacuuaaccgccuguggucgaucacuuuucuuauuugaugaaauggacaaaaugccucccggcuugauggagguguugcguccguuccugggcagcuccuggguaguguacggcacaaauuaucggaaggccaucuucaucuuuauauccaauaccgguggcaaacagaucaaccagguggcacuggaggcuuggaggucaagaagggacagagaggagauucugcuucaggagcuagaaccaguuauuagcagggcaguauuagauaacccccaucacggauuuuccaacucgggcaucauggaagagcggcugcuggaugcuguugugccuuuccugccccuacaaagacaucaugugcggcauuguguucucaaugagcucgcacagcucggguuagagcccagagacgaagugguacaggcuguccuggauucgacuacauuuuucccugaagaugaacagcuauucaguucuaauggauguaaaacaguggccucccgaaucgccuuuuuuuuguag

SEQ ID NO: 37912 - protein, 241 aa, Artificial Sequence
  derived and/or modified sequence
MKTLPAMLGTGKLFWVFFLIPYLDIWNIHGKESCDVQLYIKRQSEHSILAGDPFELECPVKYCANRPHVTWCKLNGTTCVKLEDRQTSWKEEKNISFFILHFEPVLPNDNGSYRCSANFQSNLIESHSTTLYVTGKQNELSDTAGREINLVDAHLKSEQTEASTRQNSQVLLSETGIYDNDPDLCFRMQEGSEVYSNPCLEENKPGIVYASLNHSVIGPNSRLARNVKEAPTEYASICVRS

SEQ ID NO: 37913 - DNA, 726 bp, Artificial Sequence
  derived and/or modified sequence
atgaagaccctgcccgccatgctgggcaccggcaagctgttctgggtgttcttcctgatcccctacctggacatctggaacatccacggcaaggagagctgcgacgtgcagctgtacatcaagagacagagcgagcacagcatcctggccggcgaccccttcgagctggagtgccccgtgaagtactgcgccaacagaccccacgtgacctggtgcaagctgaacggcaccacctgcgtgaagctggaggacagacagaccagctggaaggaggagaagaacatcagcttcttcatcctgcacttcgagcccgtgctgcccaacgacaacggcagctacagatgcagcgccaacttccagagcaacctgatcgagagccacagcaccaccctgtacgtgaccggcaagcagaacgagctgagcgacaccgccggcagagagatcaacctggtggacgcccacctgaagagcgagcagaccgaggccagcaccagacagaacagccaggtgctgctgagcgagaccggcatctacgacaacgaccccgacctgtgcttcagaatgcaggagggcagcgaggtgtacagcaacccctgcctggaggagaacaagcccggcatcgtgtacgccagcctgaaccacagcgtgatcggccccaacagcagactggccagaaacgtgaaggaggcccccaccgagtacgccagcatctgcgtgagaagctag

SEQ ID NO: 37914 - DNA, 726 bp, Artificial Sequence
  derived and/or modified sequence
atgaaaacattacccgctatgctgggcacaggcaagctgttctgggtgttcttcttgatcccttacctggacatttggaatatacacggcaaggagtcctgtgacgtgcagttgtacatcaagcggcagagcgaacacagcattctggccggagacccattcgaactcgaatgcccagtcaagtactgtgctaaccgtcctcacgtgacatggtgtaaactcaatggaactacatgtgtgaaactggaagatcggcaaacgagctggaaagaggagaaaaacattagtttttttattctgcacttcgaaccagtgcttcccaatgacaacggcagctacaggtgttcagcaaacttccagtccaatctgattgaatcccactcaacgaccctgtatgtaaccggaaagcagaacgaactgagcgataccgcagggcgagagatcaacctggtggacgcccacctgaaaagcgaacaaaccgaggcttctacacgccagaatagccaggtactactgagcgagaccggtatttacgataatgatccagacctgtgctttcggatgcaggaaggtagcgaggtgtactccaacccctgtctcgaagaaaataaacctgggatcgtgtatgctagtctcaaccattctgtcattggacctaacagcagattagcccggaatgtgaaggaagcacccacagaatacgctagtatctgcgtccgttcctag

SEQ ID NO: 37915 - DNA, 726 bp, Artificial Sequence
  derived and/or modified sequence
atgaagaccctgcctgccatgctgggcaccgggaagctgttctgggtgttcttcctgatcccctacctggacatctggaacatccacggcaaggagagctgtgatgtgcagctgtacatcaagaggcagagcgagcacagcatcctggccggggacccctttgagctggagtgccctgtgaagtactgtgccaaccggccccacgtgacctggtgcaagctgaatggcaccacctgtgtgaagctggaggaccggcagacctcctggaaggaggagaagaacatctccttcttcatcctgcactttgagcctgtgctgcccaatgacaatggcagctaccgctgcagcgccaacttccagagcaacctgattgagagccacagcaccaccctgtatgtgacaggcaagcagaatgagctgagtgacacagctggccgggagatcaacctggtggatgcccacctgaagtctgagcagacagaggccagcacccggcagaacagccaggtgctgctgtctgaaacaggcatctatgacaatgaccctgacctgtgcttcaggatgcaggagggcagcgaggtgtacagcaacccctgcctggaggagaacaagccaggcatcgtgtatgccagcctgaaccacagcgtgattggccccaacagccggctggccagaaatgtgaaggaggcccccacagaatatgccagcatctgtgtgcgctcctag

SEQ ID NO: 37916 - DNA, 726 bp, Artificial Sequence
  derived and/or modified sequence
atgaagaccctgcccgccatgctgggcaccggcaagctgttctgggtcttcttcctgatcccctatctggacatttggaatatccacggtaaagaatcttgcgacgtccagctgtacatcaagcgacaaagtgagcacagtatcctcgcaggggatcctttcgagctggagtgcccagtgaaatattgcgcgaatagacctcacgtcacctggtgcaaactgaacggcaccacttgcgtaaaattagaggaccgccaaaccagctggaaggaggagaagaacattagctttttcatcctgcacttcgagcctgttctgcccaatgacaacggctcgtacagatgttccgcaaattttcagtccaacctgatagaatcccattcgacgacactctacgtgacaggcaagcaaaacgagcttagcgatactgcaggccgggaaatcaacctcgtagatgctcacctgaagagtgagcaaaccgaagcaagtactagacagaatagtcaggttctgctgagcgagacgggtatctacgataacgacccggacctgtgttttcgaatgcaggaagggtctgaggtctattcaaatccatgtcttgaggagaacaaacctggaatagtatacgcgtctctgaaccacagcgtcattggacccaactctcgcctggccaggaacgtaaaggaggctccaacggagtacgctagtatttgcgtacggtcctag

SEQ ID NO: 37917 - DNA, 726 bp, Artificial Sequence
  derived and/or modified sequence
atgaagactcttcccgcaatgctcgggactggtaaattattttgggtcttcttcttaataccttacctggacatatggaatatccacgggaaagagagctgcgatgtgcagctgtatattaagcggcagtctgagcattcaattctggccggtgacccattcgaactggagtgccccgtgaagtactgcgcgaataggcctcatgtcacgtggtgtaagctcaatggtacaacctgtgtgaaactcgaagacaggcagacatcttggaaggaagagaaaaacatcagcttttttattctgcactttgaacctgtgttgcctaatgacaacgggtcgtaccggtgcagcgccaacttccaatccaacctaattgagtcacactctactaccctgtacgtcaccggcaagcagaacgagcttagcgatacagcaggacgagagataaatctggtggatgcccacttgaagtctgagcagacggaggctagcacccgacagaacagtcaagtgcttctgtccgaaactggcatatacgacaatgacccagacctctgtttccgcatgcaggaaggatccgaggtctattcgaatccttgtctggaagaaaataagcctggtattgtttacgcctcactcaaccactctgtgatcggaccaaatagcagactcgccagaaacgttaaggaggcaccaacagaatatgcatctatctgcgtccgctcctag

SEQ ID NO: 37918 - DNA, 726 bp, Artificial Sequence
  derived and/or modified sequence
atgaagacattgcctgccatgcttggaactgggaaattattttgggtcttcttcttaatcccatatctggacatctggaacatccatgggaaagaatcatgtgatgtacagctttatataaagagacaatctgaacactccatcttagcaggagatccctttgaactagaatgccctgtgaaatactgtgctaacaggcctcatgtgacttggtgcaagctcaatggaacaacatgtgtaaaacttgaagatagacaaacaagttggaaggaagagaagaacatttcatttttcattctacattttgaaccagtgcttcctaatgacaatgggtcataccgctgttctgcaaattttcagtctaatctcattgaaagccactcaacaactctttatgtgacaggaaagcaaaatgaactctctgacacagcaggaagggaaattaacctggttgatgctcaccttaagagtgagcaaacagaagcaagcaccaggcaaaattcccaagtactgctatcagaaactggaatttatgataatgaccctgacctttgtttcaggatgcaggaagggtctgaagtttattctaatccatgcctggaagaaaacaaaccaggcattgtttatgcttccctgaaccattctgtcattggaccgaactcaagactggcaagaaatgtaaaagaagcaccaacagaatatgcatccatatgtgtgaggagttaa

SEQ ID NO: 37919 - DNA, 516 bp, Artificial Sequence
  derived and/or modified sequence
atgttcgagaacctgaacaccgccctgacccccaagctgcaggccagcagaagcttcccccacctgagcaagcccgtggcccccggcagcgcccccctgggcagcggcgagcccggcggccccggcctgtgggtgggcagcagccagcacctgaagaacctgggcaaggccatgggcgccaaggtgaacgacttcctgagaagaaaggagcccagcagcctgggcagcgtgggcgtgaccgagatcaacaagaccgccggcgcccagctggccagcggcaccgacgccgcccccgaggcctggctggaggacgagagaagcgtgctgcaggagaccttccccagactggacccccccccccccatcaccagaaagagaacccccagagccctgaagaccacccaggacatgctgatcagcagccagcccgtgctgagcagcctggagtacggcaccgagcccagccccggccaggcccaggacagcgcccccaccgcccagcccgacgtgccctag

SEQ ID NO: 37920 - DNA, 819 bp, Artificial Sequence
  derived and/or modified sequence
atgttcgagaacctgaacaccgccctgacccccaagctgcaggccagcagaagcttcccccacctgagcaagcccgtggcccccggcagcgcccccctgggcagcggcgagcccggcggccccggcctgtgggtgggcagcagccagcacctgaagaacctgggcaaggccatgggcgccaaggtgaacgacttcctgagaagaaaggagcccagcagcctgggcagcgtgggcgtgaccgagatcaacaagaccgccggcgcccagctggccagcggcaccgacgccgcccccgaggcctggctggaggacgagagaagcgtgctgcaggagaccttccccagactggacccccccccccccatcaccagaaagagaacccccagagccctgaagaccacccaggacatgctgatcagcagccagcccgtgctgagcagcctggagtacggcaccgagcccagccccggccaggcccaggacagcgcccccaccgcccagcccgacgtgcccgccgacgccagccagcccgaggccaccatggagagagaggagagaggcaaggtgctgcccaacggcgaggtgagcctgagcgtgcccgacctgatccacaaggacagccaggacgagagcaagctgaagatgaccgagtgcagaagagccagcagccccagcctgatcgagagaaacggcttcaagctgagcctgagccccatcagcctggccgagagctgggaggacggcagcccccccccccaggccagaaccagcagcctggacaacgagggcccccaccccgacctgctgagcttcgagtag

SEQ ID NO: 37921 - DNA, 516 bp, Artificial Sequence
  derived and/or modified sequence
atgttcgaaaatctcaatactgcacttactcccaagctgcaggccagtagatcattcccacacctgtctaagccggtggcccccggcagcgcacccctcggttctggtgagccaggcggcccagggttatgggttgggagtagccagcacctcaaaaacttgggtaaggcgatgggtgctaaggtcaatgattttctgaggcgcaaggagccttcctctctagggagcgttggcgtcaccgaaattaataagactgcaggagcacaactggccagtgggaccgatgccgcccccgaagcctggctcgaagatgaacgttccgtgctgcaggaaacctttccacgactggaccccccacctccgatcacacggaaaaggactcctcgtgccctcaaaactactcaggacatgcttatttcttcccagccggttctgtctagtctagagtacggaactgagccctcccctggccaagcacaggattctgctcctaccgctcagccggacgttccatag

SEQ ID NO: 37922 - DNA, 819 bp, Artificial Sequence
  derived and/or modified sequence
atgttcgaaaatctgaacaccgcgttgacacctaagcttcaggcttcccgctcctttcctcacctctcaaaaccagtcgcacccggctcagcccccctgggaagcggggagcctggtggtcctggcttgtgggtgggctcctctcagcatctaaagaacttgggcaaggccatgggcgccaaggtgaacgacttcttgagacgaaaagagcctagtagtctaggttcagtcggggtgaccgagatcaacaaaaccgccggggctcaactcgctagcggcactgacgccgccccagaggcctggctggaagacgagaggagcgtgctccaggagacctttccccgcctggatccacctcctccgatcacccggaagcgcactcctcgcgcactgaaaaccacgcaggatatgctaatctccagtcagccagtgctatcctctctggaatacggaaccgagccctcccctggccaggcccaggattcggcccctacggcgcagccagacgttccagctgatgcaagccaaccagaggctactatggagcgcgaggagcgaggcaaagtgcttcctaatggcgaagtaagcctctctgtgcctgacctgattcacaaggactcccaagatgagtctaagctgaagatgaccgaatgccgtcgtgcctcatccccgtccttaatcgaacggaacggcttcaaactctctcttagccccatctcactagcggagagttgggaagacggatctcctcctccacaggcgcgcaccagcagtctcgacaacgaagggccgcacccagatttactgagcttcgagtag

SEQ ID NO: 37923 - DNA, 516 bp, Artificial Sequence
  derived and/or modified sequence
atgtttgagaacctgaacacagccctgacccccaagctgcaggccagccgctccttcccccacctgagcaagcctgtggcccctggcagcgcccccctgggcagcggggagcccggcggccctggcctgtgggtgggcagcagccagcacctgaagaacctgggcaaggccatgggcgccaaggtgaatgacttcctgcggaggaaggagcccagcagcctgggctctgtgggcgtgacagagatcaacaagacagctggggcccagctggccagcggcacagatgctgcccctgaggcctggctggaggatgagaggtctgtgctgcaggagaccttcccccggctggaccccccaccacccatcaccaggaagaggaccccccgggccctgaagaccacccaggacatgctgatcagcagccagcctgtgctgagcagcctggagtatggaacagagcccagccctggccaggcccaggacagcgcccccacagcccagccagatgtgccctag

SEQ ID NO: 37924 - DNA, 819 bp, Artificial Sequence
  derived and/or modified sequence
atgtttgagaacctgaacacagccctgacccccaagctgcaggccagccgctccttcccccacctgagcaagcctgtggcccctggcagcgcccccctgggcagcggggagcccggcggccctggcctgtgggtgggcagcagccagcacctgaagaacctgggcaaggccatgggcgccaaggtgaatgacttcctgcggaggaaggagcccagcagcctgggctctgtgggcgtgacagagatcaacaagacagctggggcccagctggccagcggcacagatgctgcccctgaggcctggctggaggatgagaggtctgtgctgcaggagaccttcccccggctggaccccccaccacccatcaccaggaagaggaccccccgggccctgaagaccacccaggacatgctgatcagcagccagcctgtgctgagcagcctggagtatggaacagagcccagccctggccaggcccaggacagcgcccccacagcccagccagatgtgcctgcagatgccagccagcctgaggccaccatggagcgggaggagcggggcaaggtgctgcccaacggggaggtgtccctgtctgtgcctgacctgatccacaaggacagccaggatgagagcaagctgaagatgacagaatgtagaagagccagcagccccagcctgattgaaagaaatggcttcaagctgagcctgagccccatcagcctggccgagagctgggaggatggcagccccccaccccaggcccggaccagcagcctggacaatgaaggcccccacccagacctgctgagctttgaatag

SEQ ID NO: 37925 - DNA, 516 bp, Artificial Sequence
  derived and/or modified sequence
atgttcgagaacctgaacaccgccctgacccccaagctgcaggccagcagatccttcccccatcttagtaagcccgtggcccccggttccgccccactcggcagcggcgagcctggagggccgggtctgtgggtgggctcctctcaacatctgaagaacctgggcaaggctatgggggccaaagtcaatgacttcctgaggagaaaggaaccatccagcctcgggtctgtcggggtgaccgagatcaacaaaacagcaggcgctcagctggcaagcggaactgacgctgcccctgaagcctggcttgaggacgagcgcagcgtgctccaggaaacgtttcctcggttagatccaccacccccaatcacgcgtaagagaaccccaagggcgctcaagaccacccaagatatgctcatatcatcgcagcccgttctcagttccctggagtacgggacggagccctcacccggccaggctcaggattcagcccccaccgcgcaacccgatgtgccttag

SEQ ID NO: 37926 - DNA, 819 bp, Artificial Sequence
  derived and/or modified sequence
atgttcgagaacctgaacaccgccctgacccccaagctgcaggcctctcggagcttcccacacctttctaaaccagtggctcccgggtcagcaccactgggcagcggagagccaggaggacctggactttgggtgggaagcagtcagcatttgaaaaatctgggaaaagccatgggcgccaaagtcaatgactttctgcgccgtaaggagccaagcagcctcgggtctgtaggagtgactgaaatcaacaagactgcaggagcccagctggcgagcggcaccgacgccgcgccagaagcgtggctggaagacgagagatccgtgttacaggagactttccctcgcctggaccctccaccgccaattaccaggaaacgtacacccagagccctaaaaactactcaagacatgctcatcagcagccagcccgtgctgagttccctggagtacggcactgagccgagtcctggacaagctcaggactccgctccaactgcacagcctgatgtacccgcagatgcctcccagcctgaggcaacaatggagcgagaagaaagaggcaaagtgcttcctaatggtgaggtgtcgttgagcgtacccgacttgatacacaaggacagccaggacgagagtaagctgaagatgactgagtgccggagagcttcaagcccatccctcatcgagcgtaatggctttaagctgagcctgagccctataagtctcgccgagtcgtgggaagacgggagcccccctccccaggctagaaccagtagcctcgacaacgagggaccccacccggatctgcttagttttgagtag

SEQ ID NO: 37927 - DNA, 516 bp, Artificial Sequence
  derived and/or modified sequence
atgtttgagaacctgaatacagccttaacccccaagctgcaggcaagtagatcctttccccatctatctaaaccagtagccccagggagcgcgccattgggttctggcgagcctggaggacccggtctgtgggtgggtagtagccagcacctgaagaacctgggtaaggctatgggcgctaaggtgaatgacttcctgaggaggaaggagcccagctccctggggagtgtgggcgtgaccgagataaataagacagctggcgcacagctcgcctcaggcactgacgccgcacctgaggcctggctagaagatgagagatccgtgctgcaggaaacttttccacgcctggacccgccacctccaatcaccagaaagcgtacacctagggctctgaagacaactcaggacatgttaattagtagccagcccgtgctgagctcattggagtacggcacagagccctcacctggacaagctcaggactcagctccaactgcccagcctgatgtgccgtag

SEQ ID NO: 37928 - DNA, 819 bp, Artificial Sequence
  derived and/or modified sequence
atgttcgaaaaccttaatactgccctgactccaaaactgcaggccagccggtctttccctcacctcagcaaaccggttgctcctggctccgctccactcgggtccggcgaacccggaggtcccggtctgtgggttggttcctcacaacacctgaagaatttgggcaaggctatgggggcaaaagtcaatgactttctgcggagaaaggagccgtcatctttgggctccgtgggggtcactgaaatcaacaagaccgccggagcacagctcgcaagcggcactgacgcagctccggaggcatggctggaagacgagcggtccgtgctgcaagagacctttcctagactagacccccctcccccaatcacccgcaagcggacaccgagagcactgaagacgacacaggacatgctgatttcttctcagcctgtgcttagtagcctcgagtacggcacagagccctctccaggccaagctcaggacagtgctcctaccgcccagccagatgtgcccgcagatgcaagtcaacccgaggctaccatggagagggaggagaggggtaaagtgctgcctaatggagaagtcagcctttcagtacctgaccttatccacaaggacagccaggacgaaagcaaactgaagatgaccgagtgtcgcagagcatcatccccatcacttatagagaggaacggcttcaagcttagtctcagtcccatatctctggccgaaagctgggaggacggatccccaccccctcaggcgcgaacctcatccctcgataacgaaggtccgcaccccgacctgctgtctttcgaatag

SEQ ID NO: 37929 - protein, 1019 aa, Artificial Sequence
  derived and/or modified sequence
MMAAAAAAAAGSSSSGGGGGGSGSSSSSSDTSSTGEEERMRRLFQTCDGDGDGYISRNDLLMVCRQLNMEESVAEIMNQLGADENGKISFQDFTRCRMQLVREIRKEEVDLSAKSDNSCTKKLRDRIASWPTSSDNSLGALSAARESWEYDSGARDLQSPDVQSQSALQKLLEYGGSSLHQQAALHKLLTQSPHIGNSVGGSYLELANTLHSAALASLKGDIVELNKRLQQTERERDLLEKKLAKAQCEQSHLMREHEDVQERTTLRYEERITELHSVIAELNKKIDRLQGTTIREEDEYSELRSELSQSQHEVNEDSRSMDQDQTSVSIPENQSTMVTADMDNCSDLNSELQRVLTGLENVVCGRKKSSCSLSVAEVDKHIEQLTTASEHCDLAIKTVEEIEGVLGRDLYPNLAEERSRWEKELAGLREENESLTAMLCSKEEELNRTKATMNAIREERDRLRRRVRELQTRLQSVQATGPSSPGRLTSTNRPINPSTGELSTSSSSNDIPIAKIAERVKLSKTRSESSSSDRPVLGSEISSIGVSSSVAEHLAHSLQDCSNIQEIFQTLYSHGSAISESKIREFEVETERLNSRIEHLKSQNDLLTITLEECKSNAERMSMLVGKYESNATALRLALQYSEQCIEAYELLLALAESEQSLILGQFRAAGVGSSPGDQSGDENITQMLKRAHDCRKTAENAAKALLMKLDGSCGGAFAVAGCSVQPWESLSSNSHTSTTSSTASSCDTEFTKEDEQRLKDYIQQLKNDRAAVKLTMLELESIHIDPLSYDVKPRGDSQRLDLENAVLMQELMAMKEEMAELKAQLYLLEKEKKALELKLSTREAQEQAYLVHIEHLKSEVEEQKEQRMRSLSSTSSGSKDKPGKECADAASPALSLAELRTTCSENELAAEFTNAIRREKKLKARVQELVSALERLTKSSEIRHQQSAEFVNDLKRANSNLVAAYEKAKKKHQNKLKKLESQMMAMVERHETQVRMLKQRIALLEEENSRPHTNETSL

SEQ ID NO: 37930 - DNA, 3060 bp, Artificial Sequence
  derived and/or modified sequence
atgatggccgccgcggcagcagctgcagccggttcttctagcagtggagggggggggggcggcagcggcagctcaagcagcagtagcgatacttctagtactggggaggaagagcggatgcgtcggcttttccagacatgcgacggcgatggcgacggctacatctcaaggaacgacttattaatggtgtgccgacagctcaacatggaagagtctgttgccgagatcatgaatcagctgggggcagacgagaatggaaagatcagctttcaagacttcacaaggtgtcggatgcagcttgtgagagaaatccggaaggaggaagtagatctttcagccaaatcggacaactcgtgcacaaagaagctcagggatcgcattgcctcctggccaacgtcctccgataactccctgggcgctctgagcgccgctcgtgaatcctgggaatacgatagcggagcgcgcgacttgcaatctccagacgtacagagccaatccgccctgcagaagcttctggaatacgggggttcctccctccatcagcaggccgccctgcataagctactgacccagtctccacatatcgggaactcggtggggggctcctacttggagctggcgaatactctccatagtgccgctttggccagtctgaaaggcgacatcgtggagctgaacaagcggcttcagcagaccgagagggagagagatttactggagaagaaacttgccaaagctcagtgtgagcagtcacacttgatgcgcgaacacgaggacgtgcaagaacggaccactttgcgttacgaagagcgcataactgagctgcactctgtcatcgcggagctgaacaagaaaatcgaccgactgcagggtacaaccatccgggaagaagacgagtactctgagctgaggtctgaactgtctcagtcccagcacgaggtgaatgaagattcgcgatctatggaccaggatcagactagtgtatctatccctgagaaccagagtacgatggtaaccgcggatatggataactgttccgacctgaactcagagttacagagggttctaacaggattggaaaacgtcgtctgtggtagaaagaagtctagctgtagcctgtccgtcgcagaggtggataaacacatagagcagctcactaccgctagcgagcactgcgaccttgctattaagaccgtggaagagatagagggggtgctggggcgtgatttgtatcctaatctagccgaagagaggtcacggtgggagaaggagctcgcaggtctgagagaggagaacgagtcgctgaccgccatgctctgcagcaaagaagaagagctgaataggaccaaagcaacgatgaatgctatccgcgaagaacgtgaccgccttaggcgtcgagtccgggagcttcagactcgactgcagagtgttcaagccaccgggccaagctctccaggccgccttacgtcaactaaccgtcctataaacccttctaccggcgaactgtctacctcctcctcgagtaacgatattcccattgcaaagatcgccgagcgagtgaaactgtcaaaaacacgttccgaaagcagcagtagtgaccggcccgtgttaggttccgagatttcatcgatcggggtttccagcagcgttgccgagcatctagcgcattccttgcaagactgtagcaatatacaggaaattttccaaaccctttatagtcatggatccgccataagtgagtccaagatcagggaattcgaagtggagacggagcgcttaaacagccggattgaacatcttaaatctcagaacgatcttctgactattactctcgaggagtgtaaaagcaacgcagaaagaatgagcatgcttgtggggaaatacgaatccaacgccaccgccctccgcctggccctgcagtacagcgaacaatgtatagaagcttacgaactgttactggccctggccgagtctgagcaatccctgatcctgggacaatttcgtgctgctggggtgggatctagtccgggcgaccagagcggggatgaaaatatcacacagatgttgaaacgggctcacgattgccggaagacggccgaaaatgcagctaaagcactgttgatgaaattggatggctcctgcggtggcgccttcgctgttgctggctgctctgtgcagccatgggagagcctgagttctaacagccacacctcaaccacttctagcaccgctagcagctgcgatactgagtttaccaaagaggatgagcagcggctcaaagattatatccaacagctgaaaaatgaccgagcagctgtcaagctaacaatgctggagttggaaagcattcacatcgacccgctttcgtacgacgtgaagcctagaggtgatagccaaaggctggacctcgagaatgcagttctaatgcaggagctgatggccatgaaagaagagatggcggagttgaaagcacagctgtaccttctagagaaagagaaaaaagcccttgaactgaaactttcaactagggaagcacaggaacaagcctaccttgtgcacatagaacatctcaaatccgaggttgaggagcagaaggaacagcggatgcggagcttatcttctacttcatctggatcaaaggataaacccggcaaggaatgcgctgacgccgcaagtccagcactgagcttggccgagctgaggactacttgttcagagaacgaacttgccgcagagttcaccaacgcaattaggagggaaaagaaactgaaggctcgagttcaggagctggtctcagcactggaaagattaacgaagtctagcgaaatccggcatcagcagtctgccgaatttgtgaacgatttaaagcgtgcgaatagcaacctagtggcagcctacgaaaaggccaagaagaaacaccagaacaagctaaaaaaattggaatcacagatgatggccatggtggagagacatgaaacccaagtacgcatgttgaaacagcggatagctcttcttgaggaagagaatagtcgaccacacaccaatgagacctcactgtag

SEQ ID NO: 37931 - DNA, 3060 bp, Artificial Sequence
  derived and/or modified sequence
atgatggctgctgctgctgctgctgctgctggcagcagcagcagcggcggcggcggcggcggcagcggcagcagcagcagcagcagtgacaccagcagcactggagaggaggagaggatgagaagactcttccagacctgtgatggagatggagatggctacatcagcagaaatgacctgctgatggtgtgccggcagctgaacatggaggagagcgtggccgagatcatgaaccagctgggcgcagatgaaaatggcaagatctccttccaggacttcacccgctgcaggatgcagctggtgcgggagatcaggaaggaggaggtggacctgagcgccaagagtgacaacagctgcaccaagaagctgcgggacagaattgcctcctggcccaccagcagtgacaacagcctgggcgccctgtctgctgcccgggagagctgggagtatgacagcggggcccgggacctgcagagcccagatgtgcagagccagagcgccctgcagaagctgctggagtatggaggcagcagcctgcaccagcaggccgccctgcacaagctgctgacccagagcccccacatcggcaacagcgtgggcggcagctacctggagctggccaacaccctgcacagcgctgccctggccagcctgaagggggacatcgtggagctgaacaagaggctgcagcagacagagcgggagcgggacctgctggagaagaagctggccaaggcccagtgtgagcagagccacctgatgagggagcatgaagatgtgcaggagaggaccaccctgcgctatgaggagcgcatcacagagctgcacagcgtgattgctgagctgaacaagaagattgaccggctgcagggcaccaccatccgggaggaggatgagtacagcgagctgcggtctgagctgagccagagccagcacgaggtgaatgaagacagccgctccatggaccaggaccagacctctgtgtccatccctgagaaccagagcaccatggtgacagctgacatggacaactgcagcgacctgaacagcgagctgcagagggtgctgaccggcctggagaatgtggtgtgtggcaggaagaagagcagctgcagcctgtctgtggccgaggtggacaagcacatcgagcagctgaccacagccagcgagcactgtgacctggccatcaagacagtggaggagattgagggcgtgctgggccgggacctgtaccccaacctggccgaggagaggagccgctgggagaaggagctggccggcctgcgggaggagaatgaaagcctgacagccatgctgtgcagcaaggaggaggagctgaacagaaccaaggccaccatgaatgccatccgggaggagcgggaccggctgcggaggagagtgcgggagctgcagacccggctgcagagcgtgcaggccaccggccccagcagccctggccgcctgaccagcaccaaccggcccatcaaccccagcactggagagctgagcaccagcagcagcagcaatgacatccccatcgccaagattgctgagcgggtgaagctgagcaagaccaggtctgagagcagcagcagtgacaggcctgtgctgggcagcgagatcagcagcattggagtgagcagctctgtggccgagcacctggcccacagcctgcaggactgcagcaacatccaggagatcttccagaccctgtacagccacggcagcgccatcagcgagagcaagatccgggagtttgaggtggagacagagcggctgaacagcagaattgagcacctgaagagccagaatgacctgctgaccatcaccctggaggagtgcaagagcaatgctgagaggatgtccatgctggtgggcaagtatgagagcaatgccacagccctgcggctggccctgcagtacagcgagcagtgcatcgaggcctatgagctgctgctggccctggccgagagcgagcagagcctcatcctgggccagttccgggccgccggcgtgggcagcagccctggggaccagagcggagatgagaacatcacccagatgctgaagagggcccatgactgcaggaagacagcagaaaatgctgccaaggccctgctgatgaagctggatggcagctgtggcggggcctttgctgtggccggctgcagcgtgcagccctgggagagcctgagcagcaacagccacaccagcaccaccagcagcacagccagcagctgtgacacagagttcaccaaggaggatgagcagaggctgaaggactacatccagcagctgaagaatgacagagctgctgtgaagctgaccatgctggagctggagagcatccacatcgaccccctgtcctatgatgtgaagcccaggggggacagccagaggctggacctggagaatgctgtgctgatgcaggagctgatggccatgaaggaggagatggccgagctgaaggcccagctgtacctgctggagaaggagaagaaggccctggagctgaagctgagcacccgggaggcccaggagcaggcctacctggtgcacatcgagcacctgaagtctgaggtggaggagcagaaggagcagaggatgaggagcctgagcagcaccagcagcggcagcaaggacaagccaggcaaggaatgtgctgatgctgccagccctgccctgagcctggccgagctgcggaccacctgcagtgaaaatgagctggccgctgagttcaccaatgccatccggcgggagaagaagctgaaggcccgggtgcaggagctggtgtctgccctggagcggctgaccaagagcagcgagatccgccaccagcagagcgctgagtttgtgaatgacctgaagagggccaacagcaacctggtggccgcctatgagaaggccaagaagaagcaccagaacaagctgaagaagctggagagccagatgatggccatggtggagagacatgagacccaggtgaggatgctgaagcagagaattgccctgctggaggaggagaacagccggccccacaccaatgagaccagcctgtag

SEQ ID NO: 37932 - DNA, 3476 bp, Artificial Sequence
  derived and/or modified sequence
atgactccgggcggtcggagaaggtctgccgggagtacacctgccctctgcctgaagcgtccccaagtgtcccgggcccgcgtcgttgccggatgcacaatgctgacacccttcccgggggcttccagtgtattctgcctcctcttgtgttcccgttgccacccttagctccctgactcttccagccaccttcccctcctccctcttccctgaggtgcctcctcgggcgattccagagcgcccatcttcccagtccgggcaaaacccggagaggtggaatccctcgcccggagcgccccggcggccactgggcatgctccgttgtcaggcaagttcggggctgcaggcagcttgcgcgccgcgcggattccagctgcggtcgcgcgtactcctcctcccaagtagggagcgggcgcatgatggcggccgcggcggcagcggctgcggggagctccagcagcggcggcggcggcggcggcagcggcagcagcagcagcagcagcgacacgtccagcaccggcgaggaggagaggatgcggcgcctcttccagacgtgcgacggcgacggggacggatacatcagcagaaatgacttgctaatggtctgtcgccagctgaatatggaagagtctgtggctgagatcatgaaccagttgggagcagatgaaaatgggaagatttcctttcaggatttcacaagatgccgcatgcagcttgttcgagaaattaggaaggaggaagtagatctttctgcaaagtcagacaactcctgtacaaagaagctgagggatagaattgcttcctggcccacgagcagtgacaacagtttgggtgccttatcagcagccagggagagctgggaatacgactctggtgccagggacctccagagcccggatgtgcagagccagtcagccctccagaagctgctcgagtatggcggaagctctttgcatcagcaggctgctctccacaaactgctcacacagtccccgcacattggcaactctgtaggaggaagctatctagagctggccaacacactccattcagcagccctggcatcactaaagggagatatagtggaacttaataaacgtctccagcaaacagagagggaacgggaccttctggaaaagaaattggccaaggcacagtgcgagcagtcccacctcatgagagagcatgaggatgtccaggagcgaacgacacttcgctatgaggaacgcatcacagagctccacagcgtcattgcggagctcaacaagaagatagaccgtctgcaaggcaccaccatcagggaggaagatgagtactcagaactgcgatcagaactcagccagagccaacacgaggtcaacgaggactctcgaagcatggaccaagaccagacctctgtctctatccccgaaaaccagtctaccatggttactgctgacatggacaactgcagtgacctgaactcagaactgcagagggtgctgacagggctggagaatgttgtctgcggcaggaagaagagcagctgcagcctctccgtggccgaggtggacaagcacattgagcagctcaccacagccagcgagcactgtgacctggctattaagacagtcgaggagattgagggggtgcttggccgggacctgtatcccaacctggctgaagagaggtctcggtgggagaaggagctggctgggctgagggaagagaatgagagcctgactgccatgctgtgcagcaaagaggaagaactgaaccggactaaggccaccatgaatgccatccgggaagagcgggaccggctccggaggagggtcagagagcttcaaactcgactacagagcgtgcaggccacaggtccctccagccctggccgcctcacttccaccaaccgcccgattaaccccagcactggggagctgagcacaagcagcagcagcaatgacattcccatcgccaagattgctgagagggtgaagctatcaaagacaaggtccgaatcgtcatcatctgatcggccagtcctgggctcagaaatcagtagcataggggtatccagcagtgtggctgaacacctggcccactcacttcaggactgctccaatatccaagagattttccaaacactctactcacacggatctgccatctcagaaagcaagattagagagtttgaggtggaaacagaacggctgaatagccggattgagcacctcaaatcccaaaatgacctcctgaccataaccttggaggaatgtaaaagcaatgccgagaggatgagcatgctggtgggaaaatacgaatccaatgccacagcgctgaggctggccttgcagtacagcgagcagtgcatcgaagcctacgaactcctcctggcgctggcagagagtgagcagagcctcatcctggggcagttccgagcggcgggcgtggggtcctcccctggagaccagtcgggggatgaaaacatcactcagatgctcaagcgagctcatgactgccggaagacagctgagaacgctgccaaggccctgctcatgaagctggacggcagctgtgggggagcctttgccgtggccggctgcagcgtgcagccctgggagagcctttcctccaacagccacaccagcacaaccagctccacagccagtagttgcgacaccgagttcactaaagaagacgagcagaggctgaaggattatatccagcagctcaagaatgacagggctgcggtcaagctgaccatgctggagctggaaagcatccacatcgatcctctcagctatgacgtcaagcctcggggagacagccagaggctggatctggaaaacgcagtgcttatgcaggagctcatggccatgaaggaggagatggccgagttgaaggcccagctctacctactggagaaagagaagaaggccctggagctgaagctgagcacgcgggaggcccaggagcaggcctacctggtgcacattgagcacctgaagtccgaggtggaggagcagaaggagcagcggatgcgatccctcagctccaccagcagcggcagcaaagacaaacctggcaaggagtgtgctgatgctgcctccccagctctgtccctagccgaactcaggacaacgtgcagcgagaatgagctggctgcggagttcaccaacgccattcgtcgagaaaagaagttgaaggccagagttcaagagctggtgagtgccttggagagactcaccaagagcagtgaaatccgacatcagcaatctgcagagttcgtgaatgatctaaagcgggccaacagcaacctggtggctgcctatgagaaagcaaagaaaaagcatcaaaacaaactgaagaagttagagtcgcagatgatggccatggtggagagacatgagacccaagtgaggatgctcaagcaaagaatagctctgctagaggaggagaactccaggccacacaccaatgaaacttcgctttaa

SEQ ID NO: 37933 - DNA, 3060 bp, Artificial Sequence
  derived and/or modified sequence
atgatggccgccgccgccgccgccgccgccggcagcagcagcagcggaggcggcggcggcggaagcggctctagcagctcatcttctgatactagcagtacaggtgaagaggaacgaatgcgccggttattccagacctgtgatggggacggcgacggctacatttcccgcaacgatctgctcatggtgtgtaggcagctaaacatggaagaatctgttgcggagattatgaaccagttaggagcagatgagaacggcaagatcagtttccaggactttacgcgatgtcgtatgcagctggtgcgtgaaatcagaaaggaggaggttgacttgtctgctaagtctgacaacagttgtacaaagaagctacgggaccggatagccagctggcctacttcatctgataactccctgggagctttatctgctgccagggagagctgggaatacgacagcggcgcaagggatctccaatccccagatgtgcagagtcagagcgccctccaaaaattgcttgaatacggagggtctagcctccaccagcaggctgcactgcataagctactgacacagtcgccccacatcggcaactccgtgggagggtcctatctggagctggccaatactctgcacagcgctgctcttgcaagcttgaagggggatatcgtggaattaaacaaaagactacagcaaacagagagagagcgggatctgctcgagaaaaagttagcgaaggcccagtgcgagcagtcgcatcttatgagagagcacgaagacgtacaggaaagaaccactcttagatatgaggagcgcatcactgagctgcatagtgttatcgcggagttgaataagaagatcgatcggctgcaaggcaccactattcgcgaagaggacgagtactcggagctaagatccgaattgtctcagtcacagcatgaagtgaacgaagatagtcgctcgatggaccaggaccagacctctgtatccattccagaaaaccagagtaccatggtcacagccgacatggacaactgtagtgacctcaactcagagctgcagcgcgtgctcaccggtcttgagaacgtagtgtgcggtagaaagaaatccagctgctcgctgtccgtcgctgaagtcgacaagcacatcgaacagctgacaactgcctcagaacactgcgatctggccatcaagaccgtggaagaaatcgaaggagtactcggacgcgacctgtaccccaatcttgccgaggagcggtcacgctgggaaaaggagcttgcaggactgcgtgaagagaatgaaagcctgacagcgatgctgtgcagtaaggaggaagagctgaatcggacgaaggccactatgaatgctatcagagaggaacgcgatcgtctgagacgccgcgtaagggagctccaaacccgtctccagtccgtccaggccacaggaccatcgagtccagggagactaaccagcacgaatcggccaatcaatccttccaccggagaactttccacatcgtcttcatccaatgacatccccattgcaaaaattgcagagagagtgaaactgagtaagactcgctcggaatccagttctagcgaccgtcctgtcctcgggagtgaaatttctagcattggggtctcttcttccgttgctgaacatctggcgcactccctgcaggattgtagtaatattcaagaaatcttccagactctgtattcacacggaagtgccatatctgaaagtaagatccgcgaatttgaggtggagaccgagcgcctcaactcacgtattgaacacctgaagtctcagaatgacctgttaaccatcacccttgaggaatgcaaaagcaacgctgaacggatgtctatgctggtcggcaagtatgagagcaatgccaccgctctccgcctggccctgcagtatagtgaacagtgcattgaggcctacgagctgcttctcgcccttgccgaatctgaacaatctctcatcttggggcagttcagggccgctggcgttggctcctcgccaggcgaccagtccggagacgagaacattacccagatgttgaagagagctcacgactgccggaagacggcggagaatgccgctaaggcattgctcatgaagctggacggctcatgtgggggagccttcgctgttgccggttgttcagtgcagccgtgggagtcgctgagctccaactcacacacatctacgactagctcaacggctagcagctgtgacacagaattcactaaggaggatgaacagagactgaaagactacatccagcaactgaaaaacgacagagccgcagtaaagcttacaatgctggagctggagtccattcacatcgacccactgagctacgatgtaaagccacgcggagactcccaaaggctagacttggagaacgccgtgttgatgcaggagcttatggcaatgaaggaagagatggctgaactgaaggcgcagctgtatctccttgagaaggaaaagaaagccctcgagctgaagctgtccacgagggaagcccaggagcaggcctatctggttcatattgaacatctaaagagcgaggttgaggaacagaaagagcagcggatgcggtctctgtctagtacaagcagcggatccaaagacaagcccggaaaggagtgtgcagatgctgccagcccagcccttagtctcgctgagcttagaactacatgcagcgaaaacgaactcgcagcagaattcactaacgcaattcgtcgagagaagaagctaaaagcccgagtgcaagaactggtttcggctctggagaggctcaccaaatccagtgaaatacgacatcagcaatcagcagagttcgtgaacgacttgaaaagggctaactccaatcttgttgccgcatatgaaaaggccaaaaagaaacatcaaaacaagttaaagaaacttgagtcccagatgatggcgatggttgaaaggcacgaaacacaggtgaggatgctgaaacagagaattgcccttcttgaagaggaaaattccaggccccatacaaatgagacctctctatag

SEQ ID NO: 37934 - DNA, 3060 bp, Artificial Sequence
  derived and/or modified sequence
atgatggccgctgcagctgccgcagctgctggctcttccagctcaggaggtgggggaggcggatcgggatccagctcaagctcctccgacacttcctctaccggtgaagaagagcggatgcggaggcttttccaaacctgcgatggggatggcgacggatacatatctcgaaatgatctgctaatggtgtgtagacagttgaatatggaagaatcagtcgcggaaattatgaatcaattaggggcagacgagaacgggaagatctcctttcaggattttacccgatgcaggatgcagctggttagagaaatacggaaagaagaggttgatctttctgcaaagagcgacaacagctgtactaaaaagctgcgcgaccgcatcgcatcctggccaactagttccgacaactctctgggtgctctctccgcagccagagaatcttgggagtatgatagtggggctcgagatctgcaaagccccgacgtgcagagccagagtgccctacagaaattgctggagtatgggggatcatctcttcaccagcaggctgcactgcataaactactgactcagtctccgcatatcggcaattccgtgggcggaagctatctcgagttagcaaacaccctgcactccgccgcactggctagcctgaagggtgacattgttgagttgaacaaacgactccagcagaccgaacgcgagagggacttgctggagaaaaaactagctaaagctcaatgcgagcagtctcatctgatgcgcgaacacgaagacgtgcaggagcgcaccaccctcagatacgaagagcgcatcactgaactacactccgtcattgcagagctgaacaaaaagatcgaccggctgcagggcactacaattcgagaggaagatgaatatagtgagctacgcagcgagcttagccaatctcagcacgaggttaacgaagattcacggtccatggatcaggatcaaacctccgtctccatcccagagaaccaatccaccatggtgacagccgacatggataactgtagcgaccttaattccgagctgcaacgggtgctcactgggttggagaacgtggtgtgtggcaggaaaaagtcgagctgttctctctccgtcgccgaggtcgacaagcacatcgaacagctcaccaccgccagcgaacactgcgacctcgcaattaagacagtggaggagattgagggggtgctcggcagagatttgtatccgaacctggccgaagagaggagcagatgggagaaggagcttgccggactgcgcgaggaaaacgagtctctgaccgccatgctttgctcaaaggaggaagaactgaatagaacgaaggccaccatgaatgcaatcagagaggagcgggatcgtctaagacggagagtcagggaattgcaaacaagattgcagtcagtgcaggccactggaccctcatccccaggtagactaacgtcaacaaaccggcctatcaacccttcaactggagagctgtctacgagcagcagctccaacgatatccctatcgccaaaatcgcagaaagggtgaaactcagtaagacacgttcagagtccagctcttcagataggcccgtgcttgggagcgagatcagctcgatcggagtgtcatcatccgttgcggagcacttggcccattcactgcaggactgttccaacatacaggagattttccagaccctgtactctcatggcagcgcaatttcagagagcaaaatccgggaatttgaggtggagacagagcgactgaactccagaatcgagcatttaaaatcccagaacgacctgctgacaattactctcgaagagtgtaaaagcaacgctgaacggatgtcgatgttagtgggaaaatacgagagtaatgccacagcccttcggctggctctgcagtacagtgagcaatgtattgaggcttatgagctactccttgccctcgccgagtccgaacagtcacttatactcggacaatttagagcggctggcgtgggcagctcgccaggtgatcagagtggggacgaaaacattacccagatgctgaagcgagctcacgactgtcgcaagacagccgaaaacgccgcaaaggccctgctgatgaagctggacggctcatgtggtggtgccttcgcagtcgcgggttgctcagtgcagccctgggagtcactatcttctaatagtcataccagtacaaccagctcaaccgcctcctcgtgcgacactgagttcaccaaagaagatgaacaacgcctcaaggattacatccagcagcttaaaaacgaccgggcagcagtcaagttaacaatgttagaactggagtcaatccacatcgatccgctgtcttatgacgtgaagccaaggggggattctcagcggctggacctggagaatgccgtgctcatgcaggagctaatggccatgaaggaagaaatggcagaactcaaagcacagctctacctcctagagaaagagaagaaggctcttgagctcaaactgtcaactcgagaagctcaagagcaagcctaccttgtccatattgagcaccttaagtcagaagttgaggaacagaaagagcaacgcatgcgatctctgagcagcactagctccggctccaaagacaaaccaggtaaagaatgtgccgatgcagcctcccctgcattgagtctcgccgaactgaggacaacatgcagtgagaacgagctggccgcagaatttactaatgccattagacgcgaaaaaaagttaaaggccagggtccaggagcttgtctctgcccttgagcgcttgaccaagtccagtgagatcagacatcagcaaagcgcagagtttgttaatgacctcaagagagcaaactcgaatctcgttgccgcttacgagaaggccaagaaaaagcaccagaacaaactgaaaaaactcgaatcacagatgatggcgatggtcgaacgtcatgagacgcaggtccggatgctgaaacagcgtattgccctcctcgaggaagaaaactcaaggccccatactaatgaaacctccctgtag

SEQ ID NO: 37935 - DNA, 3060 bp, Artificial Sequence
  derived and/or modified sequence
atgatggccgccgccgccgccgccgccgccggcagcagcagcagcggcggcggcggcggcggcagcggcagcagcagcagcagcagcgacaccagcagcaccggcgaggaggagagaatgagaagactgttccagacctgcgacggcgacggcgacggctacatcagcagaaacgacctgctgatggtgtgcagacagctgaacatggaggagagcgtggccgagatcatgaaccagctgggcgccgacgagaacggcaagatcagcttccaggacttcaccagatgcagaatgcagctggtgagagagatcagaaaggaggaggtggacctgagcgccaagagcgacaacagctgcaccaagaagctgagagacagaatcgccagctggcccaccagcagcgacaacagcctgggcgccctgagcgccgccagagagagctgggagtacgacagcggcgccagagacctgcagagccccgacgtgcagagccagagcgccctgcagaagctgctggagtacggcggcagcagcctgcaccagcaggccgccctgcacaagctgctgacccagagcccccacatcggcaacagcgtgggcggcagctacctggagctggccaacaccctgcacagcgccgccctggccagcctgaagggcgacatcgtggagctgaacaagagactgcagcagaccgagagagagagagacctgctggagaagaagctggccaaggcccagtgcgagcagagccacctgatgagagagcacgaggacgtgcaggagagaaccaccctgagatacgaggagagaatcaccgagctgcacagcgtgatcgccgagctgaacaagaagatcgacagactgcagggcaccaccatcagagaggaggacgagtacagcgagctgagaagcgagctgagccagagccagcacgaggtgaacgaggacagcagaagcatggaccaggaccagaccagcgtgagcatccccgagaaccagagcaccatggtgaccgccgacatggacaactgcagcgacctgaacagcgagctgcagagagtgctgaccggcctggagaacgtggtgtgcggcagaaagaagagcagctgcagcctgagcgtggccgaggtggacaagcacatcgagcagctgaccaccgccagcgagcactgcgacctggccatcaagaccgtggaggagatcgagggcgtgctgggcagagacctgtaccccaacctggccgaggagagaagcagatgggagaaggagctggccggcctgagagaggagaacgagagcctgaccgccatgctgtgcagcaaggaggaggagctgaacagaaccaaggccaccatgaacgccatcagagaggagagagacagactgagaagaagagtgagagagctgcagaccagactgcagagcgtgcaggccaccggccccagcagccccggcagactgaccagcaccaacagacccatcaaccccagcaccggcgagctgagcaccagcagcagcagcaacgacatccccatcgccaagatcgccgagagagtgaagctgagcaagaccagaagcgagagcagcagcagcgacagacccgtgctgggcagcgagatcagcagcatcggcgtgagcagcagcgtggccgagcacctggcccacagcctgcaggactgcagcaacatccaggagatcttccagaccctgtacagccacggcagcgccatcagcgagagcaagatcagagagttcgaggtggagaccgagagactgaacagcagaatcgagcacctgaagagccagaacgacctgctgaccatcaccctggaggagtgcaagagcaacgccgagagaatgagcatgctggtgggcaagtacgagagcaacgccaccgccctgagactggccctgcagtacagcgagcagtgcatcgaggcctacgagctgctgctggccctggccgagagcgagcagagcctgatcctgggccagttcagagccgccggcgtgggcagcagccccggcgaccagagcggcgacgagaacatcacccagatgctgaagagagcccacgactgcagaaagaccgccgagaacgccgccaaggccctgctgatgaagctggacggcagctgcggcggcgccttcgccgtggccggctgcagcgtgcagccctgggagagcctgagcagcaacagccacaccagcaccaccagcagcaccgccagcagctgcgacaccgagttcaccaaggaggacgagcagagactgaaggactacatccagcagctgaagaacgacagagccgccgtgaagctgaccatgctggagctggagagcatccacatcgaccccctgagctacgacgtgaagcccagaggcgacagccagagactggacctggagaacgccgtgctgatgcaggagctgatggccatgaaggaggagatggccgagctgaaggcccagctgtacctgctggagaaggagaagaaggccctggagctgaagctgagcaccagagaggcccaggagcaggcctacctggtgcacatcgagcacctgaagagcgaggtggaggagcagaaggagcagagaatgagaagcctgagcagcaccagcagcggcagcaaggacaagcccggcaaggagtgcgccgacgccgccagccccgccctgagcctggccgagctgagaaccacctgcagcgagaacgagctggccgccgagttcaccaacgccatcagaagagagaagaagctgaaggccagagtgcaggagctggtgagcgccctggagagactgaccaagagcagcgagatcagacaccagcagagcgccgagttcgtgaacgacctgaagagagccaacagcaacctggtggccgcctacgagaaggccaagaagaagcaccagaacaagctgaagaagctggagagccagatgatggccatggtggagagacacgagacccaggtgagaatgctgaagcagagaatcgccctgctggaggaggagaacagcagaccccacaccaacgagaccagcctgtag

SEQ ID NO: 37936 - protein, 143 aa, Artificial Sequence
  derived and/or modified sequence
KTHYNCGEHTKAFSGKHTLVQQQRTLTTERCYICSECGKSFSNKSNLIKHRRVHTGERPYECSECGKSFSQRSALLQHRGVHTGERPYECSECGKFFTYHSSLIKHQKVHSGSRPYECSECGKSFSQNSSLIEHHRVHTGERP

SEQ ID NO: 37937 - protein, 437 aa, Artificial Sequence
  derived and/or modified sequence
MAAATLRTPTQGTVTFEDVAVHFSWEEWGLLDEAQRCLYRDVMLENLALLTSLDVHHQKQHLGEKHFRSNVGRALFVKTCTFHVSGEPSTCREVGKDFLAKLGFLHQQAAHTGEQSNSKSDGGAISHRGKTHYNCGEHTKAFSGKHTLVQQQRTLTTERCYICSECGKSFSKSYSLNDHWRLHTGEKPYECRECGKSFRQSSSLIQHRRVHTAVRPHECDECGKLFSNKSNLIKHRRVHTGERPYECSECGKSFSQRSALLQHRGVHTGERPYECSECGKFFTYHSSLIKHQKVHSGSRPYECSECGKSFSQNSSLIEHHRVHTGERPYKCSECGKSFSQRSALLQHRGVHTGERPYECSECGKFFPYSSSLRKHQRVHTGSRPYECSECGKSFTQNSGLIKHRRVHTGEKPYECTECGKSFSHNSSLIKHQRIHSR

SEQ ID NO: 37938 - DNA, 791 bp, Artificial Sequence
  derived and/or modified sequence
cacactggggagaggccttatgagtgcagtgaatgtgggaagttctttccctacagctccagtctccgaaaacaccagagagttcacactggatcaagaccctatgagtgcagtgaatgtgggaaatcctttactcaaaattccggcctcattaagcacaggagggttcacactggggagaagccttatgagtgcacggaatgtgggaaatcctttagccataactccagccttattaaacatcagagaattcatagtcgataaaagccttatgagtggcaaatgtggaaatctgttagcaccctggagaaagtccttgagtacacagtgaatgtcagaaagcttcagctgaaggccatatctcattgagtgccacacagttcacaagggaaagacacttttgatatgtagggatgtccagttgatataacagctctgaaggagatcccttatgagggtggcatcagcctgaattgaacatcctatatctgaacatctgcataaatccaggtatgtgtgaactgcattgcaccttttgccctgcccagggcccatgtcagatttatgtctctgctgatactatagtggaagccattttacctctaccgcctggcaggtgaccaccagtgtgcaccactcacccatcccagtgtattcaggtaagtgaaccttggtgttctgttcatgggaggaatttgtaaatagcccaagcatttattccgttttttttttttcctttctgatgagttaggccatggacctgacccagttttgccagaggaatctgctgg

SEQ ID NO: 37939 - DNA, 432 bp, Artificial Sequence
  derived and/or modified sequence
aagacccactacaactgcggcgagcacaccaaggccttcagcggcaagcacaccctggtgcagcagcagagaaccctgaccaccgagagatgctacatctgcagcgagtgcggcaagagcttcagcaacaagagcaacctgatcaagcacagaagagtgcacaccggcgagagaccctacgagtgcagcgagtgcggcaagagcttcagccagagaagcgccctgctgcagcacagaggcgtgcacaccggcgagagaccctacgagtgcagcgagtgcggcaagttcttcacctaccacagcagcctgatcaagcaccagaaggtgcacagcggcagcagaccctacgagtgcagcgagtgcggcaagagcttcagccagaacagcagcctgatcgagcaccacagagtgcacaccggcgagagaccctag

SEQ ID NO: 37940 - DNA, 1314 bp, Artificial Sequence
  derived and/or modified sequence
atggccgccgccaccctgagaacccccacccagggcaccgtgaccttcgaggacgtggccgtgcacttcagctgggaggagtggggcctgctggacgaggcccagagatgcctgtacagagacgtgatgctggagaacctggccctgctgaccagcctggacgtgcaccaccagaagcagcacctgggcgagaagcacttcagaagcaacgtgggcagagccctgttcgtgaagacctgcaccttccacgtgagcggcgagcccagcacctgcagagaggtgggcaaggacttcctggccaagctgggcttcctgcaccagcaggccgcccacaccggcgagcagagcaacagcaagagcgacggcggcgccatcagccacagaggcaagacccactacaactgcggcgagcacaccaaggccttcagcggcaagcacaccctggtgcagcagcagagaaccctgaccaccgagagatgctacatctgcagcgagtgcggcaagagcttcagcaagagctacagcctgaacgaccactggagactgcacaccggcgagaagccctacgagtgcagagagtgcggcaagagcttcagacagagcagcagcctgatccagcacagaagagtgcacaccgccgtgagaccccacgagtgcgacgagtgcggcaagctgttcagcaacaagagcaacctgatcaagcacagaagagtgcacaccggcgagagaccctacgagtgcagcgagtgcggcaagagcttcagccagagaagcgccctgctgcagcacagaggcgtgcacaccggcgagagaccctacgagtgcagcgagtgcggcaagttcttcacctaccacagcagcctgatcaagcaccagaaggtgcacagcggcagcagaccctacgagtgcagcgagtgcggcaagagcttcagccagaacagcagcctgatcgagcaccacagagtgcacaccggcgagagaccctacaagtgcagcgagtgcggcaagagcttcagccagagaagcgccctgctgcagcacagaggcgtgcacaccggcgagagaccctacgagtgcagcgagtgcggcaagttcttcccctacagcagcagcctgagaaagcaccagagagtgcacaccggcagcagaccctacgagtgcagcgagtgcggcaagagcttcacccagaacagcggcctgatcaagcacagaagagtgcacaccggcgagaagccctacgagtgcaccgagtgcggcaagagcttcagccacaacagcagcctgatcaagcaccagagaatccacagcagatag

SEQ ID NO: 37941 - DNA, 432 bp, Artificial Sequence
  derived and/or modified sequence
aaaacccactataactgtggtgaacataccaaggccttctccgggaagcacacacttgtgcagcagcagaggaccctgaccactgaacgatgttacatttgcagcgagtgcggtaaaagcttttctaacaaatcgaatctgatcaagcatcggagagtgcacactggagagagaccctatgaatgctcggagtgcgggaagagcttttcgcagcggagcgcactccttcaacacaggggcgttcacacaggggagcgtccttacgagtgttctgagtgtgggaagttttttacctatcattccagcttgattaaacaccaaaaggtgcactccggctctcggccatatgagtgttcggagtgtggcaagtcatttagtcaaaactccagcctcattgagcatcaccgtgtgcatacaggggaaagaccttag

SEQ ID NO: 37942 - DNA, 1314 bp, Artificial Sequence
  derived and/or modified sequence
atggccgccgccactttgcgaacgccgacgcaaggaacagtgactttcgaggatgtagccgtgcacttcagctgggaggagtggggcctattagacgaagcccagcggtgcctatatagagacgtgatgctggagaacctggctctcttaacatcactcgatgtgcatcaccagaaacagcacctgggcgagaaacacttccggagcaatgtgggaagagcactctttgtgaagacctgcacatttcacgtgagcggtgagccatctacttgtagagaagtgggcaaggattttctagccaagttagggtttctgcatcagcaggctgcacacactggcgagcagtcaaattctaagagtgacggcggcgccattagccaccgaggcaagactcactacaattgcggagaacacacgaaagcattttcaggcaaacacactctggttcagcagcagcggacactgactacggaacgttgctacatctgtagcgagtgtggaaaatcgttcagtaaatcttactctctgaatgatcattggcgccttcacactggagagaaaccttacgagtgcagggagtgcggtaagagtttcaggcagagctcttcccttattcagcatcgcagggtacacactgccgtacgccctcacgagtgcgacgaatgcggaaagttattcagcaacaagagcaacctgattaaacacagaagggtgcataccggggagcgtccttacgaatgcagcgaatgcggaaagagcttcagtcagagatctgccctgctccagcaccgcggggtccataccggcgagcgcccatacgagtgtagcgagtgtggcaaattttttacctaccactctagcctaattaagcatcagaaggttcactcaggctctaggccctatgagtgcagcgaatgcggcaaatcatttagtcagaactcaagcctcatcgaacaccatcgggtccacacaggcgagaggccctataaatgttcagaatgcgggaagagcttttcacagcgatctgctctgctccagcaccgcggtgtccataccggtgaaaggccctatgaatgttcagaatgtggcaagttcttcccatattcttccagcctgcgaaaacatcagcgtgtccacactgggtctcgtccttacgaatgttctgaatgtggcaagtcctttacccagaacagtggcttgattaaacatagacgtgtgcacaccggagagaagccttacgagtgcaccgaatgtgggaagagcttctctcacaactccagcttaattaagcatcagaggattcacagccgatag

SEQ ID NO: 37943 - DNA, 1314 bp, Artificial Sequence
  derived and/or modified sequence
atggcagctgctactctccgcacgccgacacagggcacagttacttttgaggatgtggctgtgcacttttcttgggaagaatggggactcctcgatgaagcccagcggtgcttatatcgagatgtaatgttagagaatctcgctttgctgacctcccttgatgtacaccaccaaaaacagcacctcggagaaaagcatttcagaagcaacgttgggcgcgccttatttgtgaagacgtgcaccttccacgtgagcggagaacctagcacatgccgcgaagttggaaaagattttctggcaaagcttgggttcctgcaccagcaggcagcacacacaggggaacaaagcaacagtaagtcagatggtggggcaatcagtcatcgtgggaaaacccactacaattgtggagagcacacaaaggcgtttagcggaaaacatacattggttcaacagcaaaggacattgacaactgagcggtgttatatttgcagcgaatgcggtaagagcttttcaaagtcttactcactcaacgatcattggcgcctgcatacgggcgagaagccgtacgaatgtcgggagtgcgggaagtccttccgtcagtcctcaagcctaatccaacaccggcgggtgcataccgccgtgcgtccacatgaatgcgatgagtgcggtaagttgttctctaataaatccaacctgatcaagcacaggcgcgtgcacaccggcgagcggccttacgaatgctccgagtgtggcaaaagcttttcccagcgctctgcactgctgcaacatcggggggtgcacacaggagaacggccctacgagtgttccgagtgcggcaaattttttacatatcatagttctctcatcaaacaccagaaagtgcactcaggcagccgtccttacgaatgctctgaatgtggaaagagtttctcacaaaattcaagtctgattgaacaccatcgcgttcacaccggcgagaggccttacaaatgttcagaatgtggaaaaagcttctcccagaggagcgccctgcttcagcacagaggtgtgcacaccggagaacggccctatgagtgctctgaatgtggaaaattttttccctactcctcctctttgcgcaaacatcagcgggtgcacaccgggagtaggccatacgaatgttccgagtgcggtaagagctttactcagaacagcggactcattaagcataggcgagtacatacgggtgagaagccatacgagtgtaccgagtgcgggaaaagcttctcacacaactcctctctcattaagcatcaaagaattcacagccgttag

SEQ ID NO: 37944 - DNA, 432 bp, Artificial Sequence
  derived and/or modified sequence
aagacccactacaactgtggggagcacaccaaggccttcagcggcaagcacaccctggtgcagcagcagaggaccctgaccacagagcgctgctacatctgcagtgaatgtgggaagagcttcagcaacaagagcaacctgatcaagcacagaagagtgcacactggagagcggccctatgaatgttctgaatgtgggaagagcttcagccagaggtctgccctgctgcagcaccggggcgtgcacactggagagcggccctatgaatgttctgaatgtgggaagttcttcacctaccacagcagcctcatcaagcaccagaaggtgcacagcggcagccggccctatgaatgttctgaatgtgggaagagcttcagccagaacagcagcctcatcgagcaccaccgggtgcacactggagagcggccctag

SEQ ID NO: 37945 - DNA, 1314 bp, Artificial Sequence
  derived and/or modified sequence
atggctgctgccaccctgcggacccccacccagggcaccgtgacctttgaagatgtggccgtgcacttctcctgggaggagtggggcctgctggatgaggcccagcgctgcctgtacagagatgtgatgctggagaacctggccctgctgaccagcctggatgtgcaccaccagaagcagcacctgggggagaagcacttccgcagcaatgtgggccgggccctgtttgtgaagacctgcaccttccacgtgtctggagagcccagcacctgccgggaggtgggcaaggacttcctggccaagctgggcttcctgcaccagcaggccgcccacactggagagcagagcaacagcaagagtgatggaggagccatcagccaccggggcaagacccactacaactgtggggagcacaccaaggccttcagcggcaagcacaccctggtgcagcagcagaggaccctgaccacagagcgctgctacatctgcagtgaatgtgggaagagcttcagcaagagctacagcctgaatgaccactggaggctgcacactggagagaagccctatgagtgcagagaatgtgggaagagcttccggcagagcagcagcctcatccagcaccggcgggtgcacacagctgtgcggccccatgaatgtgatgaatgtgggaagctgttcagcaacaagagcaacctgatcaagcaccggcgggtgcacactggagagcggccctatgagtgcagtgaatgtgggaagagcttcagccagaggtctgccctgctgcagcacagaggagtgcacactggagagcggccctatgagtgcagtgaatgtgggaagttcttcacctaccacagcagcctcatcaagcaccagaaggtgcacagcggcagccggccctatgagtgcagtgaatgtgggaagagcttcagccagaacagcagcctgattgagcaccaccgggtgcacactggagagcggccctacaagtgcagtgaatgtgggaagagcttcagccagaggtctgccctgctgcagcacagaggagtgcacactggagagcggccctatgagtgcagtgaatgtgggaagttcttcccctacagcagcagcctgaggaagcaccagagggtgcacacaggcagccggccctatgagtgcagtgaatgtgggaagagcttcacccagaacagcggcctcatcaagcaccggcgggtgcacactggagagaagccctatgagtgcacagaatgtgggaagagcttcagccacaacagcagcctcatcaagcaccagaggatccacagcaggtag

SEQ ID NO: 37946 - DNA, 432 bp, Artificial Sequence
  derived and/or modified sequence
aagacccactacaactgcggcgagcacaccaaggccttcagcggcaagcacaccctagtgcaacagcaaaggactttgacgacagagcgctgttacatatgtagcgaatgcggcaagagttttagtaataaatccaacctgatcaagcacaggcgagtgcataccggagagcgaccctacgagtgctcagaatgtggcaagtctttcagtcagaggtccgccttgctgcagcataggggagtgcatactggagagagaccatatgaatgtagtgagtgtgggaaattctttacatatcatagctcgcttatcaagcatcagaaggtgcacagcggttcccgtccatatgaatgttctgagtgtgggaagagcttctcacagaactcttcactcatcgagcaccatcgggtacataccggcgagcgaccctag

SEQ ID NO: 37947 - DNA, 1314 bp, Artificial Sequence
  derived and/or modified sequence
atggccgccgccaccctgcggacccccacccagggcaccgtgacctttgaggacgtggccgtccatttctcatgggaagagtgggggttgctcgacgaagcccagagatgcctctatcgcgatgtgatgcttgagaatctggcgctactgaccagtttagacgtgcaccaccagaagcaacacctgggagaaaagcacttcaggagcaacgtgggtcgtgcactattcgttaaaacatgcacctttcatgtgtccggcgagcctagtacctgccgcgaggtgggtaaagattttctagcaaagctgggattcttgcatcaacaagcagcgcataccggcgagcaatcaaactcaaagagcgacggcggagccatttctcacagaggtaaaactcattataactgtggcgaacacaccaaggccttttccggaaagcacacactggtccagcagcagcgaaccttgacgacagaacgttgttacatctgttcagaatgtggcaagtctttcagtaagtcctattcactgaacgaccactggaggctgcataccggagaaaagccctacgaatgccgtgagtgcggaaaaagcttccgacagtcttctagtcttatacagcataggcgggttcataccgcggtacgccctcacgaatgtgacgagtgcggcaaactattcagtaataaatccaaccttatcaagcaccggcgggtgcataccggggaacggccatatgagtgctccgaatgtggaaaatccttttctcagagaagcgctctgctacagcatagaggagtgcacacaggcgaaaggccttatgagtgcagtgagtgtggcaaattcttcacgtatcacagctccctaatcaaacatcagaaggtgcattccgggagccgtccctacgagtgctcagagtgcggcaaatcgttttcccagaactcctccctgatagaacatcatcgggtccacaccggcgaaagaccttacaaatgttcggagtgcgggaaatcgttcagccagcgttccgcactgttacaacaccggggcgttcatacaggggaacggccttacgagtgtagtgaatgcgggaagttctttccttacagcagctcactccggaaacatcagcgcgtacatacaggaagccgtccgtatgagtgcagcgaatgcggtaagagttttactcagaatagtgggctgattaagcacagacgcgtccatacgggcgagaagccttatgaatgcacagaatgtggcaagagcttcagtcataactcctcacttatcaagcaccagaggatacactcacgttag

SEQ ID NO: 37948 - DNA, 1314 bp, Artificial Sequence
  derived and/or modified sequence
atggccgccgccaccctgcggacccccacccagggcaccgtgaccttcgaagacgtagcagtgcatttctcctgggaggagtgggggctactggacgaggcccagagatgcctgtacagggatgtgatgttggaaaatctggcccttttgacctcactcgacgtgcaccatcaaaaacagcatctgggcgaaaaacactttaggtctaacgttgggagagcactgtttgtcaagacttgcacatttcacgttagtggcgaaccatccacctgtcgagaagtagggaaggacttcttagcaaaactcgggttcctgcatcaacaggccgcccacactggagaacagtccaactcaaagagcgatggcggcgcaatttcccatagaggcaaaacgcattataactgcggcgaacataccaaggccttttctggcaagcacaccctagtacagcagcagcggaccctgactaccgaaaggtgctacatctgttccgaatgcggcaagtccttttccaaaagctattctctcaacgatcattggcgattacacaccggagagaagccctacgaatgtagggaatgtggcaagagcttcaggcagagttcgtccctgattcagcaccgaagggtgcacacggccgtaaggccgcatgagtgcgacgagtgtggtaagctgttctccaacaagagcaatcttataaagcatcgccgggtgcatacaggcgaaagaccctacgaatgcagtgagtgtggcaagagtttcagccaacgctccgctttgctgcagcacaggggagtgcacaccggagagagaccttatgagtgcagcgagtgcggcaagttcttcacctaccacagtagcctgattaaacaccaaaaagtccatagcgggtccaggccttacgaatgcagcgagtgtggcaagtcattttctcaaaatagttctctgattgagcaccaccgcgtccatactggggaaaggccctacaagtgtagtgaatgtggtaagagcttctcccagcggtcagctctcttacagcatcgtggtgtgcataccggggaaaggccctatgagtgtagcgagtgcggtaagttttttccttatagcagttccctccgtaaacatcagcgcgtacataccggcagcagaccatatgagtgttccgaatgcggaaagtctttcacccagaacagcggcctcatcaagcatcgtagggtccacacaggagaaaaaccctatgagtgtacagaatgtgggaaatccttcagtcacaacagtagtctgataaaacatcagagaattcactcgagatag

SEQ ID NO: 37949 - DNA, 432 bp, Artificial Sequence
  derived and/or modified sequence
aagacacactataattgtggagaacacacaaaagcattctctgggaagcatacactagtgcaacagcagaggaccttgaccaccgagagatgctatatatgcagcgagtgtggcaagtccttttcgaacaagtccaatctgattaaacatcggcgtgtgcacacaggagaacggccttatgagtgttcggagtgcggcaaaagcttttcgcaacgctcagcgctgctgcagcataggggcgttcacaccggggagcggccttacgagtgctcagagtgtgggaagttttttacatatcacagcagcctcattaaacaccaaaaagttcactctgggagtaggccttatgagtgtagtgagtgcggcaagtcatttagtcagaactcctcgttgatcgaacatcatagggtgcatacaggggaacgcccttag

SEQ ID NO: 37950 - DNA, 1314 bp, Artificial Sequence
  derived and/or modified sequence
atggccgctgctaccctcagaactcccacccaggggaccgtgacttttgaagacgtcgccgtgcatttctcttgggaagaatggggcctgttggatgaggcgcagcgctgcctctaccgtgacgtgatgctggagaatctagccctactaacaagcctggacgtgcaccaccagaaacagcacctgggagaaaaacactttaggagcaatgtgggcagagccctgttcgttaagacttgcactttccatgtgtcaggcgaaccctctacctgtcgcgaggtggggaaagattttcttgctaaactgggctttttacatcagcaggccgctcacacgggagaacagagcaatagtaaaagcgatggcggtgcgatcagtcatagaggcaaaactcactataattgcggtgagcataccaaggcatttagcggcaagcacactttagtacagcaacagagaaccctgactacagaacgctgctacatctgctcagagtgcggcaagagctttagtaaatcttatagtctgaacgatcactggcgactgcacactggcgaaaagccatacgagtgcagggaatgtggcaaatctttcagacagtcttcttctcttatccagcaccgcagagtgcacacagccgtgaggccacacgaatgcgatgagtgtgggaagctgttcagcaataaatccaatctcattaagcaccgcagagtgcacacaggagagaggccctatgagtgctcggagtgtggaaagtcctttagccagaggagcgcccttttacagcatcgcggtgttcataccggggagcggccatatgagtgctcagaatgcggcaagttcttcacctaccactccagtctgattaagcaccagaaggtgcatagcggcagcagaccatacgaatgctctgaatgtggcaagagttttagtcaaaattccagccttatcgagcaccacagagtgcacaccggggaacgtccctacaaatgctccgagtgtggaaaatctttctcgcagcgtagcgcactactacagcaccgtggcgttcataccggggagagaccttacgaatgttccgaatgtggaaaattctttccgtattcttcctcccttaggaagcatcagagggtccacaccgggtcgcgaccctacgaatgcagcgaatgcgggaaaagcttcactcagaactccgggctgatcaaacacagacgcgtgcacactggagagaagccctacgaatgtacagagtgcggaaaatctttctcacataactcatctcttataaaacaccagaggatacactcccgatag

SEQ ID NO: 37951 - DNA, 1314 bp, Artificial Sequence
  derived and/or modified sequence
atggctgcagctacactgcgcacccctacccaaggcacagtaaccttcgaggatgttgccgtccacttcagttgggaagagtggggactactagacgaggcacagcgctgcctctatcgggatgttatgctggaaaatcttgccctcctgactagcctcgacgtgcaccatcagaaacagcacctgggagaaaagcattttcgttctaacgtcgggagagcactgttcgttaaaacatgcacattccacgtctcaggagaaccaagcacatgccgagaggtggggaaggactttttggctaaactgggattcctgcaccagcaagcagcacacacaggcgagcaaagcaactcaaaatccgatggcggagccattagccacagaggtaagacacattataactgcggggaacacaccaaggctttctccgggaaacacacgttagtgcagcaacagagaaccttaacaactgagaggtgttacatttgttccgaatgcggaaagagtttctctaagtcatactccctcaacgatcactggagactccatacgggcgagaaaccttatgagtgcagagaatgtgggaaatcatttcgacagtctagctccttaatccaacaccgtagagtgcacactgcggtccgccctcatgagtgcgacgagtgcggaaaactgttttcgaacaagagcaatttgattaagcaccgcagagtgcatacaggagaacgcccttatgagtgttcagagtgtggaaagtctttttcacagcgtagtgctctgctgcagcacagaggagtgcacacaggtgagcgaccctacgaatgtagcgaatgcggtaagttttttacttatcacagctctctaatcaaacatcagaaggtgcatagcgggtcccgaccctatgagtgttctgagtgcggaaagagtttctcccagaacagtagcttgatcgaacaccaccgtgttcatacgggagagagaccctataagtgtagcgagtgcgggaagtcctttagccaaagatctgcgctcctgcagcacaggggggttcatactggcgaacggccatacgaatgcagcgaatgtggaaaattctttccatatagctctagtctgaggaagcatcagcgtgtgcacaccgggtctagaccttatgagtgctccgagtgcggaaagtcatttactcaaaactctggactgattaaacataggagggttcatactggagagaaaccctatgagtgtacagaatgtggaaaatcatttagtcataattctagcctgatcaagcaccagcggatccatagtaggtag

SEQ ID NO: 37952 - DNA, 429 bp, Artificial Sequence
  derived and/or modified sequence
aaaactcattacaactgtggagaacacacaaaagcattcagcggtaaacacacacttgttcagcagcagagaaccctcactacagaaagatgttacatatgcagtgaatgtgggaaatcctttagcaacaagtctaacctcattaaacatcggagagttcacactggggaaaggccatatgagtgcagtgaatgtgggaaatcctttagccaaaggtctgcactccttcaacatcggggagttcacactggggagaggccttatgagtgcagtgaatgtgggaagttttttacatatcattccagtctcataaaacaccagaaagttcacagtggatccaggccttatgagtgcagcgaatgtgggaagtcatttagccaaaactctagcctcattgaacaccatagggttcacactggagaaaggcct

SEQ ID NO: 37953 - DNA, 2746 bp, Artificial Sequence
  derived and/or modified sequence
cctcttcgtggcggccattttagcttctctgaggtgtgttcaccggatcagagatagcagagcgccgagttggggccacgaaggcgtgaggggagtcgtcgtccctcctgcacgaaagcgtctaagccttggcgacgccgccctgggggacccacgtcaggcctgggatagggaccgctgtccccgggtccctaccaatgtcgcccgtcgctcccggcccagctctacccgcagagtctgatggcagcggccactctgaggacgccaactcagggcactgtgacctttgaagatgtggccgtacacttctcctgggaggaatggggtctccttgatgaggctcaaagatgcctgtaccgtgatgtgatgctggagaacttggctcttttaacctctctagatgttcatcatcagaagcagcaccttggagaaaaacatttcagaagcaatgtgggcagagccttgtttgtgaagacctgcacattccatgtgtcaggggagccttccacctgcagagaagttgggaaggacttcctggccaagttgggatttctccatcaacaggctgctcacactggggagcaatcaaatagcaaaagcgacggtggggccatcagtcacagaggaaaaactcattacaactgtggagaacacacaaaagcattcagcggtaaacacacacttgttcagcagcagagaaccctcactacagaaagatgttacatatgcagtgaatgtgggaaatcctttagcaaaagctacagtctcaatgaccattggagacttcacactggagaaaagccttatgaatgtcgagagtgtgggaagtcctttaggcaaagctctagtctcattcagcaccggagagttcacactgcagtacgacctcatgaatgtgatgaatgtggaaaattatttagcaacaagtctaacctcattaaacatcggagagttcacactggggaaaggccatatgagtgcagtgaatgtgggaaatcctttagccaaaggtctgcactccttcaacatcggggagttcacactggggagaggccttatgagtgcagtgaatgtgggaagttttttacatatcattccagtctcataaaacaccagaaagttcacagtggatccaggccttatgagtgcagcgaatgtgggaagtcatttagccaaaactctagcctcattgaacaccatagggttcacactggagaaaggccttataagtgcagcgaatgtgggaaatcctttagccaaaggtctgcactccttcaacatcggggagttcacactggggagaggccttatgagtgcagtgaatgtgggaagttctttccctacagctccagtctccgaaaacaccagagagttcacactggatcaagaccctatgagtgcagtgaatgtgggaaatcctttactcaaaattccggcctcattaagcacaggagggttcacactggggagaagccttatgagtgcacggaatgtgggaaatcctttagccataactccagccttattaaacatcagagaattcatagtcgataaaagccttatgagtggcaaatgtggaaaatctgttagcaccctggagaaagtccttgagtacacagtgaatgtcagaaagcttcagctgaaggccatatctcattgagtgccacacagttcacaagggaaagacacttttgatatgtagggatgtccagttgatataacagctctgaaggagatcccttatgagggtggcatcagcctgaattgaacatcctatatctgaacatctgcataaattccaggtatgtgtgaactgcattgcaccttttgccctgcccagggcccatgtcagatttatgtctctgctgatactatagtggaagccattttacctctactgcctggcaggtgaccaccagtgtgcaccactcacccatcccagtgtattcaggtaagtgaaccttggtgttctgttcatgggaggaatttgtaaatagcctaagcatttattccgttttttttttttcctttctgatgagttaggccatggacctgacccagtttggcccagaggactctgctggtgacctgaaaagagggactacatatttcaggatattgttggtctcacatgactcttgatagagtttgccagccttcaaatcaccaactgtgggaaccaactgcctcttattgccttggtttgtacaataacaaaggccttattaatcttgggggttctatatgtatgggttggtttgaaaacagttgggttctgctaacatgaaggggtgaataactttttttggagatcccaaacattgtgtagctcaacagggacagggacagggacagtaggatggcagaatatagctctctctctagtttgagcctagttttcattgctattcaaggcctctgagaaaaaactacagggtattgtcctaatttatatcctggatgccatagaggtcagcctgaggaggcagcagttacttgacatcctttgatgtttctgaaagcaacatgaaattgttctcttgttcacaaggaatactgcatcgtgttcagtgccagtgggggaaatctgttccccaggtcctgtatgccttgatatcctgaattccacagggtagcaccacaggtggtaagattatagtaggaattataattgttatagaagtactggattgatagagagtggaaaactgcaataacactgcaataaatagaatgtgcccctttt
